United States Patent Application Publication US 2016/0002648 A1 - sequence listing, part 3

SEQ ID NO: 3797 - DNA, 5427 bp, Sorghum bicolor
gtctcatacatatgccgcaagacgtaagattcgatgtgataaaaacttttgaaaaaaaaacaaaagttttaggaactaaacaccccctaatgagatgcaaatataggccaatacccctatcctccaaaggctaaaataatcatcgtcggccaccacattggtgcgtgctttatcaattcatcatttcccttttttccgtttgttttccaatcctcttttcgctaatccgtgtacgtgtatagtacaaagacaagtggagggtttttttccctgacaacaaggataagtggagttgatggaaggttcgtcaaacggataacgaacgaacgagccatgtgctcgaccatgtgcacggtgcacctttgcttctccaacactggaacttgcatgatacctttgctcgttctaaacacacggaaaatccattcagttttttttttaaaaaaaagttggaaaaaatatttacttgtagagtagtactccgacaagttggcttaatgggacgtgacagcagattctcagccgggtgccgtacgtgcaccgtctggcacgtgcaaactggattccgtctctgaccgcgaggccatcccggcctcttcttccaaagccaatccacatggtgcgcgggtgagccaggaactgacacgtcgctacagcaccaccggccagcggcatggtggcactgagacggaagaaagctggttgaattttatacctcaaccaatcaccgacattacccactaacgatgcatcctaatcaaacaattagaaatggattcgatcctaaaaagagcggactctctcttcctttctctacagccaaacgagttatttaattcggtgaacaacgacgtgtcctcctttttgttgtttctggccacgtggggtagctacgtgtctctatatatatataatcaaacaaacatattgtctccataaaagtaataatttaacattttctttcgatgagtcaattaatctcaaacccaatatattgaaaatattaacgattagagtgaaatgtgtcatgagtccagagctcaagggcgagacataaagtggcgacgatgagacgacgaagcggtggcgcacgggcaaagcttaacggcgacaacatggttagggagcttaggcccggtgacggtgagcatacgacgataacgtctggatcaagcagttagcacttagcagtgggggttaagatggtaaagtttatttcccttcaagggcatgtgctctcattctcttactcatggattcgttttaagaagtatacaaatacatatttcaatgtaaaactattttgaaatgtgtgtttttatatttctcgaaataaattcaatgtatgaaaaaatgagggcatgtgtcctcgaggataaaaaaaccgtcttggtgttaaggtggcctggtgcatgaggagaagaaaatgcgaggagaaagaaagaaaacagagtgacatgtacattctacttgccagatatctcattgtaacttcaaaaataaataaataaaaaacagacatggaccggactcaacaaaacatgaaatgagcccttttctgtgtggcctgtttagtcaacgccaaaaatcaaaaactttttaaatttttttgtcacatcgaatgttaccacacaagtatggagcattaagtataatcaaaaataaaaactaattaggcagtttatatgtaaatcgcaagatgaatcttttgagcctagttagtctataattagacaatatttgtcacaaataaacgaaagcattagagtgtccaaaatcttttcaatttgccaactaaacaaggcctaacaataaaaaaatcagacacggacccaagtcctgcaaccaaatagtgcattccttctggttgtgaaagtgaaagccgattggtgccctgacaaagagggcccagtgctgctccaccctccagagtccaggcggacacggagtcacggacccaccccgggctttgcctgtaggctgtgcaagccggcttctctctctcccctgcccagtgtgcgcactccctccctccctctctctcggtttctccctcttggcgacgactgggcggccgacaggccgtcgccgccgccctacgccaggttccgaggtcttcatcgggcccttctccggcgacgagcaccacaggtacgcttacccgttgtcttcccttgcctgctgctgtgcgagaactgagcacccaaaccctaacttaactatttctattcggatctgatctgactacaagtgtgtgcgcgcgtgtattatgcctactagtttcgattgtttcgcaaaaaaaccttgtcgggtgtagatgtgtacacccatgtccttaaccgggtccgctcctgctacgaagtttcctagtagaaatatgtcctgcctttgttgcttcctcagtgggattacactagctactggtctgcctttttttgttggtagatctgttagcagtaccttaataatctttgcgtgtgcgttttttttttctagtaaaagtcaagtactgatgctcatggggaaatttgtttcagggtgacaaggatagctttctcaggtcagtgaaggaagacatcttcttgccgcggtagagctcctgacggttgctgggttgtgctacaagtatctaggggtggatttggactgggagatggtatactgaaggaaaactcaaaagtctcaagtgagcttgcttcaagatggatgaaggccagggagttaggtattggtgccacaggtgtgaggaggtgatagatcctatgcctgagatgaagtgcccaagctgtgacggtgggtttgttgaagagatgggctctgaagacttcgaggcagctacgaacgcaaggtctgatcgctccctctctctcttggctccactgctgtttggtatgttggggggttcgtcccgcagatcaagactcaggagggaggccatggctgacgatgatgctgatgaggatgacgaagaggatgattcagaccatgagcttgaagcttccagtaggaggcggaggaggaggggctcatcagcgcttttgaggatgctccagactatccgtgaccgtgatgacgtaaggggctcggatgacactgacagtgatacagagagagacctggagagagcgagaagggagaggatcgagaggcggatggcgagggagaggattcaggagcggatggagaggcagagagagagggcaaggcaaattgagagagtgagtgctcgtggcagagagaggacagaaagcctaatactgatcaactccaacaatgaggctattattctgcaaggaacatttggatctgatgacaatcaagaggactcaagcaacacaagttctggtgtatcacttggggattactttcttggtcctgccctagatactctcttgcagcgtttggcggagagtgacctcaatcgttctggcacaccacctgccaagaaggaagcagtagctgcgctgccaactgtgaacatcgaggaagtgttgggctgttcagtctgtcttgaggattttgagatgggagcagaagcaaagcagatgccctgtcagcataagttccactcccattgcatacttccatggctggagctccacagttcttgcccaatctgtcgatttcagttgcctactgaggagacgaagaatccatgtgaatcagccagcactgcaggggccatgaacagagatggagacaatgctgctgcaagcagtagtgatacagaaagtagtaaccgcaatggagacaaccattctgatagtcctatcttctctgctctgagcacactcttctctgatccattctcatctgatgatgatgaaagtgttccacactcatctgagaactgaaggtaatgataaatactatgagtctatgaccgtaataatatgaacaatgaaaacaccaaccctactattaatgtgcttgatacctacctcagtagttgcgcttgcattgcagacagcgttggatgcaagcttgcaatatggtgaaggtgttctgaaatatgaggctggcatctttatattgtagtttctgtacatatctctgaatggtcgcccccccagaagacaaactattatcttcgctttcctgaaaactatgtggcttgtaatctgctagtgcttgttatgtttacttgcctcaaataaatgttagcctccagcgtgcttaccatctccggaagacttagacatgcatgtggacgccaatttggttgacagtatggccaatgtaaggcaacccctccactagctgttatggcgtatgtatgcagtgactttgcgtcttatattttaactgtctatgagaactccttagaagatggctggaaaatttctgtgaaggcaaataccatccaatggtcctcattccacagtccgttgtatttttgagtggatgcaacgttgcaggtgctgcctcatgtggtcctgaatgtcacccctgaggttgaggatatctggtatcttattgctgtgttttttatatgtgttccttttattgctctgtcctccctgttcatgattgttttttggggaaaaaacatgaaattggtctctgttgcagccaggttcaagtgcattcgtgttggtattttgatccaaggagatcacgtaaacagcatttgccatcgtaccagttgggtgacagctgagatgttgtcatgcttatcagttccttggaactattgcccgagcaagaatcccgcttgctgtttattttgatggtgtgatcatgtggtaggtgcgggtttgatgtctggttctccactctctgttgttgttctgcttggttggtggtttggccctgtttggtaggcatcgaacttggagtgttttgatttgccacgccttgattatcaggcaggcatggctggattcgtaggtaaatgcaactttcgaattttgggaatttcatgctgagttttatttgttggaatttactgattagcaactcatgtttgtggtttgccgttccaagtatatgctgcagcgattcttaatcgaggatgtgttgaagcttgaagcagggtggtggtattttgtgtcctgactagggtagctatttccactcgcaagtgtcttggaacaaaggttagaagtttagagcgagtgagtttggttctgatcttgggttcccaagcagtcgcagaatactatggcctgttgagttattttgcagctaagctatcttgtgacgctgaatctgatcgaacggcacctgcagcaggtgtcttcatttgactgataaactatggtagaaagaaccgtcgactgatttgttgtgagataaaacaccttgaatgactgatagatttggctgataagctcaagcgaataaggctagtttgaaaagtaatgactgaaaatattatttgctaaattattgtaaaagaaaaatattgaccggcagaaaaagtat

SEQ ID NO: 3798 - DNA, 4725 bp, Sorghum bicolor
ttcaatcatggatttacgatagtgcgttcaggttatagctgagaaagagttagttactgctcgaggtgagcaaagtattcatcttccagctacattatccattgtcattctggagacttggtttcttaacaacgtgatacttactggaggatttccacaccttaataatggcatcagatcagaattgtgcagtccagaatcaactgtaagcagtttcttatatgttgtaaattgtaacctgtaaatcgtaaatagaaataccagagaaaatccccctcctctccacccagtttgtactaaccagtgatgagctgcctattaggtgttgtattgtatggcacgaaaaacacacaatggaaaaaggatgagtgtttcctcttgtactgtcaactgacccaatccatgtgtcaattgtaagatgggttcaaggatttcgttcaaaaaaaagatggttttagtatccatctgttaaagtaactttgtggagttagtaagttgagtggttggattggtgtgttgcgaccaagttgtttttggttgcctcctaagtgagaatgagaagttgtgtttagttttagtgggtatgtcttggtaccggagtttaggggcttgattggttagctgaattagcagtaaggcttggcccgtgacatgcacggtgcgcgtgtggtgggcgcatgggaggaaaaagttcacttgctacaagctccgtgcaggtaatcaaacagacttgacatgcagacaagctagtcgaaggcaagcaaccaaacaaaatgtgttggtaacttggtattctttgatcctgtccagcaggagctagtatgagccaggccaagaggagccagaaaccaatcacgcacttagtggttgtaccctagtcgatcgtgtggttttcttggcctggtttctgtggaaaaaaaataagctaggacgtatttttctcgttatccttctgataaaacttgtggcaaatcttttgtcgttctttcgaagaaaaaaacttcgtggaagctcatatgtgcatttcatggcataaatccaccgttgttctttgaataattgtacttccttcactgccatggtggccttggcttggggatctgtcctttggcgaagaccatcgagcatctcttcttcaccttctctcgtgtggcggtgttttggcgcaaggcatgcccgggcatagccatggtgaacctccacaatctcgacactcatatgcatctcccctccggatgcctgtagcacactggtatggtgtcccactcattctctagatcagcatgcaatgtattgacccttctcttctttcctgatattagagcttagggcctgtttcgtaatcctatgaagaagttaaaaaatcttgactccaactttgtttttgaagtcgttttctacagtcatttgatacggctcttgtagaagggagcccctcctggagccatatcaaataggccctcacggagctctttttgagcttaccaaatatgtagcccatttagttggtaacgtaggtcttcttatccacattcttcttaaaacttggcatgccatgcttgtgacacctttgtaactaccctgagtttgtttgggatctccaccaccgttgccgcctaaaaggaaagagagcttcaactttcaattcttgtactagttcctaaaacgacctcgattataaattatgctagcttgtatttgttcaaaaaataaaatttacatgactatcgtcataactcataagagcatagcaattttttagcgacgacgtggaacagcacaattacaaaacgggcctcgattcttttctttttttttcttgttttgtaaacatcgatctgcagcaatttgaatatttgatttgatgcgggtagtggcggagacgtggccatgcatgtggtcccattcgcgcggatatatgcccaccaatagggcccacatgcatagactgctccagggttgccgcgccaagtcggagagatcaatcaagaaattaaaccgtccgcgttcgtgaaggcctcaactcctctcgtcgtctcgtaggcgatcgtctcctccggcggcggcgatcgacgtcggcgacagtccacgatcttcttcaaagaaagatagcaaggccgatcagagtcagacgacgccatctcaaatcatggtaatcaaccgccctcaatcccacatgcatgcattcccatttgaaatgcatgcctcgatcgatcgctcccatcttcgtctccgatgttactgagtgcgaatcatttagattagatctatacacactacctcgtgaggtgtcttcgatgttactgagtgacgaacggcgacggggaggtctgccgccgcgcgcgacctcgccgggccggaatattcgcagaacacccacggccttggatcgcgaacaataatcatgcgtaaaccaccggatcggcgattaataaccgcgatccgaataccttgcaaaaatgtccccggccggctcctcctccagctcatcgccgtcgtcgtgccaccattctccgggatcgcgcgaaatagagagagactactaggaactggcccgcatgtcagggaatgaaatctcaaggttttcccaaacatgatcagtgctgaagaacctgggaaattgagctcatcatgcatgagctccaaagccagatttcgagtgtttttcattttcattttcatgtcgtagcaacatgacatttttttttgttgttgctgttgctttggtgtcagatacattttgtgctcctcatcagcaggcaggggaaggtgaggctgacgaaatggtacactccatacccacaaaagcagagatccaaggtataatacaccggcaggttttccactgcagttttaccatttttttggctggggcctacaaagtaatttttatatgcaattgcatcacatgatttatcacctgcttttcattcacaagatcatcaaagagataagtacgctcgtcctgacaagaggccccaagctgtgcaattttgttgactggcaaggttacagagttgtgtacaagaggtgaggagttgtaatgccggatgaatgatgatctatatgaaaacttttattcctggttgttactaatataatataactaaccagtaaaaggcaaagcgcttgcaaattagtaatcagctggaacgtaacactgattatattaactctgatggctccatcctgcaggtatgctagcctttacttctgcatgtgcattgaccctgctgacaatgaactggaaacccttcaaatcatccatcactatgttgagatattggaccggtactttggcaacgtgagacctccaaaatcctttgcttaattatcccctcagttccaagacccattttcctgatggctgctgtctttgtcatgctgcatgcaggtctgtgagcttgatctgatattcaattttcataaggtgcgaaaactttgatatatattaggctgtctctttctgccgaccatatatttgctacaatataccaaagcacttagctagacctcctctcactctttttcttgctttctgaatttgcaggcgtacttcatattggacgagattttgattgctggtgaacttcaagaatcaaacaagaaatcggtgctacgtctagtaactacacaggtatagctattatctattttattttaccttgaatctagaagcgctctgagtagtataaaactatgagcatttctgactgcacatgagtgctctctgccttgcctttgttgacataaccatcatgtggactcacaagagacaaacttttaacaaaaaggcgtagtgttttatagtccttaatacacctgttggactgtgccaatttctagctagcttgtcagtacagtggaaaggataagttgctaccagcatgcatgttcatgtgctcatgtgaaatgcactaaggattgggggccggtgatggtgtatcatggcatggtggaataagcgtgtgtgtgttttgcaggacgctttggtggaagccgcaaaggaggaggcaggctcattgaggaacataattgcacaggctaccaagtagagcacttgtgtcttctacaatcattactcacacccccacggcatgatagtaacttaatcactaccatacggcagcagctttcacccttaatttttttcattactgttccatctctgcattttgttcagagatctgttctgtcctgtccttttctttccctcttttttttttcgcactgcaccaccggtttcgagggaatgtgctgtttcagcacttttgcacaacgttgtatatggaaatggaataaaataatgcaatatatgttttggttcccaattctatggtcccagttcccttaagttgcccaactctatctatggccattcagatcattctcagcctccaggaaaagatatcttctttttgcagatttttttttcttttattacatttgcagcaggcttggcttgttctgtggaaatatataataaaaaatgaaaaaaaagggaacacacatgccatcagcatgagccttgtttacatcatgcaatagttacccgtcaaaaggcatgcgacgtccccaaaagtgtttgattaacagggcagcatggatctacgccatgcacgtgtcgcgtaaacaagcggtgaacactcgaccacaccgctgtgaactcgctcgcacattcacatttcccaaaattagtaaatctagactaatctctcaataatg

SEQ ID NO: 3799 - DNA, 6370 bp, Sorghum bicolor
tatgtatgatctgataacatagaggtttcttcttcaaggctgtcagagtgggtttgaatgctgaaaagagtggcgatgtcgggcgtatcatgattgttgcaatcaccgatggaagagctaatgtatcactgaagagatccactgatccagaagctgctgctgcttcagatgcaccaagaccttcgtctcaagaactaaaggtactactctgtccgctgacatctacaaagtagtatgatgggaagtatctagtcttgttccaataatgatggaacagtgtaaccacccttgcaaacttctccactgtggtgcgaaatcaattccaaatagcttcattttagaagtcgtttatcttaactatttgctggctaatgtgatttaatcgttttttttccaaggatgagatacttgaggtggctggcaaaatatacaaggcaggaatgtcccttcttgtcatcgacactgagaacaagtttgtatccacgggatttgccaaggaaattgcaagggttgcccaaggtacgcctgtaatgacagatccatctaatgcctttgacacttctttttttttttttgaaatatcgcaatccagtttttccctgttgaactgtcctgaatgctttttttttcggtgttgctctgcacagggaaatattattatctgcccaatgcttcagatgctgtgatttctgctgccaccaagaccgctctgactgacttgaagagctcgtgattttggagcagcggcacccgttttctctaccttctgatatggatggtgaacctacattcatgcagtaatttgcgtgtgttcatcaatgcttgtgtagaggtgagcgttttggctcgtttgaccaattttggtgtaggtctccaccacgagagaggaaaaaagaaatccgagcatggcatattggcatcgtgtaaagtgtaaaggtccaatggcttccagtctctaatgtttggcgatgtaaatccgctggccgcggcccgcggcagctgtgtactctgtatatcttgagtgtcaataatgccatgcttagcacttagcagttaagaatatcatctgtcatacatggattatagtgctatatagtgtggttaaaaatggcggacccaaatactaagctagccagctaggggtatcgtgtggcttcaatataaaaggaggcagtcgcggtgcgtgcagagaaaactgaaagttttttttgaacaactgaaaagtgttttctagtatagtacttgtactacaaagacgaaaacgtttagagctccctgccaccaaaaaaaaaagaaaaagaaaagaaaacgtgtagagcttgtctgggtaaaaaaaacgtattcatctgcaatgtatgtggattagactggaaaataaactattttttctttcaatccctcgtttatactcctttagatataaaataattgtacgttgctcacatataaagaagtttgacatattgaattgaaaagaaagatgtccaattattttcaaaataactgtacgttgctctcacatataaagatctcttgttatttaccctctcagtcccaaaatatcattctcaagaagttaaatatttaataattaaatatattttcatagcataaataaacttagtgatataaatattgctagtatttttaaattctttaagaaaatttgagcaacacaacttattttaggatgaagggagtagactgagggccattacctagatttttgaaaaaaaaaaacaaggccttagctacagttcgggccggccccaattgtcagcaagtgctacagcctacagggcttttcgttcgcccgccgccctcctccctgtcgcaatcacccgcgcccgcgatgttggatttctggcgcgaaacgtagatagatcaggtggcgccgtggcgggtagacagaactaaaaaaaaaaaaaacgaaggaaaggagaaggccctcctgcccttgcttcctcccgtggcggcggcgactgctcggcccggccgccatgtcgatctgcggataccactccccgcgcttctccgaggtaaacgcgccaccgcgccgccccccacccccacccacttccttccctccctccctccctccctccctgcttcccttctctctcgctcggtcgaacggttggggccctgtagtttttctctctcgggaaccggggaacgcttccgtttctaaaagcttcccggtactttttttttaatttttttccaggatattgcttggctccctcaatggcttcagccgtatggcacgccgacggttggcgaccaccggaacaccactaccgccgtttcatcaccttcttgccaggtgctcttcttattttctgcactaactggctccgaatctgttgattctgaactattattttgattaccgaagatcttaatcaaagccagaggtctttcatttgattggaaacaacatactgaaatccagtctgccatttgcgatctgatgccttggtctcttcctcgagttgcagaattgtgcgtttgtcggacacccttcgcaggagcgtcaggattgtcagaatgccactggtggttatagcggcttcatattgcacttgtcaggagatgaggacacggttgcaagttcaccagtcagcagcaatgtaagaataggatgctattgttctttactttgatcaaattcagccttggtactgctgccggaatattacacttagccttcaatcctaatcccacataaataacacctttttttccgagttctgaggtaatatggtggtttgttactaagtgcacactttgacagtctgcttatatctcttttgctggttatcatattgtgaaggaagggctagaaattcttttttggtgtcctccattttcatctctactgctgacattttgaaagaaatctctactactgatattaatccctttcccttcatttcaaaatgtgcattaacgtttctttagcttgatgcctattattattttcatgatgttgtatgttttgatctcatactgactgactgttgttcacctttggtggattgcatactgagttctgaagttatttcatagtagcaaatttgggttgttgtagttgaattatgctgactctttctttctacagcacaaacagatcttgtgttgcattgttataacgtcttagttgttccccctctacaggtactacctttctctttgcgtttgtcttccgaaagtgctgcacaaccgtccctgcctgaaggtagtggtaatcctcagatgccaaactctggtacatgcaaaggtccatccaagggcctttgtgcagatggtcaagaacaagaggtcaatgctgtctcccagaatcagttcgaggctaacaatcctcaagctgagatgctcacagtgacagaagtggcttgcaaggagatcagtaaacaacttgatacaaacagacacaaaaggcatgatgtctatggtggaaaggttgatgttcgaaaactccgtaatgctgatgtaaatgatgcgattgaactatctattgctgcatctgaggccatggttattgcagagatgatacttgattctcagtctgataaatcggctgcagctgctatagaagctgctctacatgtgaaagaagcccggaaacaattttactttgaggagccagaacatgcttgtggatcctcagaagatggtcttgatgagactgattggcttgcagaattggatgagtctgaaatggttgacgtataccaagatgttggtctgtctcttgtccgtattgcttgttcaactcaagatcagaacccaggtgatttgaagcaacaaaattctcatcctagttgtcccccatgtgatgcagacatacacatcttatgggattcttcttctgagaggcaaaataaaaaatggaatagccaaaatgctgatagtgatgaccatgtatctgattcgttcccaaataatcagtcagcaggtgtgctaccaaatgaaccaactccgtgctctgattctgtaaagcaagcagctctatgtaaaacaatttcatgctcaagaaataagaaaactgtcctccaggcgtcaactcaaaataatgctgctttgcatggaaccttgggagctctagcaacataccaaaatgttcataaggtaactttgtgaccaatcatttctttttttttttggtatcgtgtggtatgaatgcaaagtatcataataaactttatcaactcataaacctttcccatctgcattcttcatattctcattactacatacatttctttccaggaagttgcaggagttgctgcacagacgaatgtttgcataaagaagcatgtaaaaggtttgtttgaggaagaaaatagctacatttctgagtcaattagcatggataagtgctgtcctacttctagagcatcatccatggaaattgtcgcctcttcaagggcatctgtttattacaatgctgaaggtctccttgaagaaaatcatcatgcagaaactgaagagttgtgttgccaagtagtatgttcgagcttgtcacaggtggatcctttatgttccgttgttccatgcagcatatcttgcgatgaaggtcccagtagccaggcagtctgcaagcagagtgaaggccatgaaggtccgagtagccaggctcctttgtgcaaaaagagtgaatgcaatgaaggtcccacttgtctgacacctgaacgcggacatagtaaaggagaggagaaagaatttatacataccaaagaatttcctatgatgcaatacctggatggggatgctggtccatcttgtgtgtctttagttaagccaacagattctaatatttcattcaggcgaagaaaatacagttcactaaggccttttagcacagtagcaactaagtcaaacatattggcaagcacttcaaattgtaatgctgatgttccagtttgtcagctggagagattcacacccattattctaaataagaatgtacagcgtgtccaagctgctaagaaattcatacaatatagtgccggagctgaaaatttgcaagatttctctgcagttcagaagcagacatattatcctcaggatgacagtgaggatcaaatcagggagctacaggtcccacgggatgtctttccatcaactgagaatttggttggtaaacagcaccttaaaagaaaaagggtccaattttcagaagcaaatcatagtagcagaagaaccaagatcaatagaaggatcttgaataaatcaagattcagtcgtaagtttttctttttaatattagtgttcagtcttttgagggatatactctgatgtatccacaaaaacattagtttcttctggtaatcctcacttgtgaattcttgcaggatcagatagcagaacaggacagacacttgaggcaagagagtacactgataataaagaagccacatttcaaggagtagagtttctgttgactggctttcctaatcagaaggaaaaagaaattgagtccctaatacgaaaatctggtggctatgtactttctaaagtgccacccttcccacttgataaaagaaagagcatggctgagtttccaagctggaagcctcccatagtactttcccctaaaaaggtttgctattttatttcctttcagtgttttggtcaatctatttatcctgtgtctttcataattacatgttgtaggaatcacgagtcccagttgaaaattgtcaacttatatttgtactgtactgtattaatgattccagatgttgcatcaggtgtcaacagctaagttcttatatggctgtgctattgatgcctggatattgaatcccaattggctcttcgattctcttcaagctggtgtcatgctgccacctggaaagtaaggcaagctcatagcatcagtgcatgtctttggaagcttctgtacacacattgcaaaatgcctaccctttggaaaataattttttgatattcttctgcatatttattccctgaacattcattgttccatacctctcttggagtaatcaaggcaaaattaccatttatactatggttatggtctttcataagatttgtcattctgtagtagttctgtgcagtacctaaaattcaggcttacatgcttccttttcttttcttttaatttcaagctaagctattccaagtgaaaggcatttgcatgtttaatgagcttgcccattctaactgcatgtgactatgtcaaccatcataggctacctaacagttatgttgttaatggtttcctaacagtggcacagtttaacactagtttaattttcactgtaaatatggaaaatttacaccatatttaagtctagactagatgcttgtaggtcagtatactgaaagctgctcattt

SEQ ID NO: 3800 - DNA, 4152 bp, Sorghum bicolor
gcggtcgtccccgtcgccgcggcccggtcgccagggaggtggccctaggtggccagggctccggccttctcgagctgtatagggttcttccttgtgcgtttcgcgtgatatgcacgctatggcacaagccggattccgaaacccaagcggcgcaggagcggagcaggaccagcaggtgcccggtgcgctttcaaacgaaacaaacctcctctgcgtcaaaacgtcgaaaagctagcgcgcgcaatgtccgccgccactggcgtttccctcgtcgttgccgatgccgtctgggcggggatcaattctactagccaggcatccgacgacctggcctgggcaactggcggcctggcctaggccgctgggcgcctgagcgaggccggccagccggggggcgggagccgggtgaccggcgacctggcactggcgggcaaggggcagagagccagcgacggggagcctcggagccggagtcggacctcggacctcgcagggccgacggcggaagctggatgcggggggtgggcgtccgacgccgacgcggacgaggcgagcgggaggaccacggctcgtgcctggtggctgctgcggtgatgggctggtggttgcgacttgggcgtggagggggctgttgggctggatctgaagatttgctccctacagttttggcccacgaccggggctcagcgccctctcttctcttctctctctctctctctctctctcgtccatttggaatgataaagtttaagaacctagactagatattaaaattgagacttattagggactcagacagaccaccatatactgtacaaatttggagactatggccctctttgacagggcaattttgcaactattgtcttgcttagttcatgaaaagaaatttttttggcattgtaacatatttgtaatttataattatagtaattagtgttcagtcatagactaattaggttcaaaagatttgtctcgcaaaatacttgcaaactatacaattagtagttttttatctatatttaatgctccatatgtctaaacattcgataagatagggtaaaaagtttttgagggagagaagagaagataaaaagaaaacatggcgcacaatgttcacacaatgataagtgggtctcctgtgtacatttaccttttggtttaccaccaccatctgatatatttgatcttttttcgaggtggttaaaaatagctagtaaaaagaataatttattgttatttttgtgtacatttaccttttggtttaccaccaccatctgatatatttgatcttttttcgaggtggttaaaaatagctagtaaaaagtataatttattgttattaacagcagttgatgcactatgttaggcaatataggtaactagaaacgaagtagtttttgacaaatgtagaccaaaatctttttaacagatactatttagaggaacttactggcttcgacagtgggcaagtctgcagaggcatgatgatcaacgggaacagttgatccaagttggagttatttagctctagcctccagtggatgattatttacaagattagttggctatgtttagcataaactatatttcgtttcggtttcccatttactgtgatgcaaaacttatgctattgacatatgtttgtaataattagtatgattctatttttcgacagatgaagcctgattttaatatccattattttaaaaaagtgggtcacgtgtatcggtgcctatcataacgaaaatggagtgagtgggactgccaaaacgaagaccggaaaacttgagcctcaaaaataggccgaactctcatagtattaaaaatgtagggaccctgatttcgacggtgcattggaataatgcccccatccatgtcacaaaaatgatcgaagaccacacaaattaaggacctgctggcatggctaacacccacatattaaggttgtccggtacgtaccgattgattgatcaccaaaatcgatctgtgaagaaaattagtctggcagcaatataatgaaaatgatcgttctccttatttttgttgatgacaccgatctgcacgtacgagtacgagacatctctcccaaagtcccaggcaagcagctagcccaacaagaagctgagctcatgcatggagggctccttgtctgatctctcgagtactacaaggtgagttcgcgtgcgccatacagtacatctcaatgcatgcgagaagcgttcttcttcttccctgcagtacttacctctcgctgtttgcggttgctgggcacaggatcgccgtggtgaccggcgggaacaaagggatagggctggaggtgtgccggcagctggccgacagcggcgtcgccgtcgtgttgacagccagggacgagacgagaggcgcagctgccgtcgagaagctcagaggcctggggctctccaatgtcatcttccaccagctggacatcaccgacgctccgagcatcgctcggctggtcgttttcttcaagacccgtttcgggaagctggacatcctggtaaataacgccgggtttgttggccttgagtacatccaagatcatatcgatggcacttcaacgacgagcgagaaggtgaggaggttcctaataaatcccaatacatgcatcttcagatcatcaaattgcatggaggccagattctgaaaaccttttgctttttgatgcgtgcgacagtttagcggcatggatatgaatcagagactccaactgttgatgaaatggtgcctccgggagacttgtgatgctgggaagaaatgcatgagaataaactaccacggcacgaagcaagtcatccgagcatttctgcctctgctgctgtcttctgacgatagaaggatagtcaatgtctcctcagtgcttggccagctcagggtacccaacccaaagctattcagtcgttgccttctgctacctcgtgacatgatctgaaaccaaagcctgctgatgggtggaattcatgtagtttttcggcagcgaggctttgaagcgggagctgaacgacgtggagagcctgaccgaggagaggctggacgagttggcggccatgttcgtggaggacctggagggcggcgccgtggaggcgcgagggtggtggcctgctggtttctcgccggcgtacatggtgtccaaggcgacgctgaatgcctactcgcggatcctggcgcggaagcaccccgcgctgcgcgtcaactgcgtgcaccctggcttcgtcaagaccgacatgaccgtcaacttcggcatgctcacgccggaggaaggcgggagcagggtggtggccgtggcgctgctccccgccggtgggccgaccggcgcctacttcgaggagcgccagcagcaggcggcgttcgtgtgacacatactctgcttcgttcaccacccaccggtgtataggttgccgagaaatttgtgacatagctatgcccctcgcggtttcttcgagttgatgacacacgttgaatccttcggtgcttttatccatgtaagattttttttctttaaatttgacatctaatgcatccagttgattgctatgcacctgacggatgaacctatactacacaagagactttaaacgtggagaaaaacaagtgtctatggatccgttgcgtagcttggggcagcaacgccttcatctattgatccttcttttttcacccactttcctgtacccgtcgggtgacggcaatcacatcttccttctttcatttttctcgcgtggttccatcgccagtcaccgagatcctggcaccggaatctccggtgttccgcgcgcctgaaccacacgctgccgaattgaagccgcaaaggggaggttgtgcgtgcccttgacggtgcagctgcaggttatggtcccgctccgcacacctcgcacacgaagcggtttgtggctagcagcgtctccggcgagagcccgatcaccgaagcgtccgtatatatatgtggccgcggacaagcaacaggagtcaaagcaggcaaagaaaccattagcgcacaccgactccaaagcaaagcaaccacgggcagcacaacagacctggcgtcctgaggggattccccttgttcataaggctcgcttacctcagaatggacacatggaacgattcccagccagaacaatagtctaattt

SEQ ID NO: 3801 - DNA, 5089 bp, Sorghum bicolor
tttattaataaaggttgcgtgtttatttcttttgggtgaactgctgttgctagtaaaaaatttgccactatttataagaaaatatattccacaaaaaaatcaattaatatttatttggcatcacaaatattgatagtttttttatttttagtcaactttgagatggtttgattggatactatgaatccacgatatatgtatgtattttagcttttctttggctctttgttgaataatataaaataaaattgaaaaagaactgctttaaactagtactcctagtatgaaactttttttctttagataaaaatatctacatccacttttgtttttcctcctctactatgcatcacccacgtattgcttgacattatttagaaaacaagcctgctattgcatctctagagtctgtataagtgtggtgtgtttgtatagcggtgtcgctgtgttagtgtgtattctcttgaatttgaacaaaaatgtagtacaatacaatttttacatctatactttttgctgagttggtaaatcttttgtctaacagctcacgtacgttctaataaagaaaaattgtcatgctatgtgttgaattggacgttggtaccgtaaaatcgtttcttttgtcaggtgagagtctggtgggcaagctatggccatgtctgcctagctttgtgctaacttgcgaacttgaaatactaggagcaggggacaataattaaaaagctcattttaggtctggcttccaagcaagaagtcatgattagtagcatctcgataaagttttgtaaaacgactctaatttatttatttttcggaaaaagagaggaaaaaaatattccctccaaccgtttatttggtaaaggaggtcctttttaaagataagatgtcacaatatatcttcgagactcgagagaggaactcaatatccgttcacatttgatgtttttttctcgaaaaattagagtaaactggacacatgaataaactaaaaaaaagtgtctagataagaaaacggtgagagacaaaaaaaactttaaaaaggatttgatcagttagaaatagttagaggtttgtaatgcaaaataatctaggaagctattgtagcatattgttggaggaggataaaatttaaagttattgttccttttttaaccttgctagatctattagtttgacaagtaaactatacagaacacctagagagcatctctaatagttttaaaaaataataatgggtaaatcaacaagttttgtcccactattcttctccacatccttccacctctatattgcccgattgataagcacgtatattttcacgtggtagggttggttccccaagtgtggagttgagatagggagttagtaggtttcttatcttactattaaaaaactaggttgagagtgggttttggaagctcttgggtggctctcaataccagaatttcccaagatctaagtgttttaatacatattgtattaaactgcatgaaaagcataaacatagaacctaaacatgattttagggacataaagttaggcatgtttagatccgagggactaaacttgtgggcgtcaagatagactaagagggactaaaagtgcttccactctctcttctctccttttcatctttcagcactggggtccaaatagccatcttagactaaactttagctcctctagtttttagtattgtttggaggtatcgtatgagtaaaagaaattacgaagggaagattattcaaattgtcgctcgcgctcctcgagcactcatttttatgttgtcccgagatcgcttccgcaaaaggaatcttattccaaggcattatatattactatccacgaataggtacatgtatgtatagataaagtagtacacttgaacagatgaatgaacgttatacaactacatcatttcattggctatatattatgagaatcagaggtcccagcctcacgcacatctgtttgattctgggacagatcgaggaatggcaatggctatgctggttccatggttggcatggcttctagtctctctgctcgcagcatacttcctcgagctctatgcccacgctcgccggggccttccgccggggccccgcccactgcctttaatcggcaacctccacctcgtcggcgaccagccacaccgctccctcgcccgcctcgcccaactccacggcccgctcatgtcgctccgtctgggcgcggtcaccacggtggtgatctcctcaccggatgttgcgcgcgagttcctgcagaggcacgacgctgtcttcgccaatcggttcgtgccccacgccgtcggcgaccacgcggacaactccgtgccctggttgccgcactccgcccgctggcgcgccctcaggaagatcatggcaactgagctgttcgcgccgcagcgccttgacgcgctccagcacctacgccgccacaaggtggacgaactcgtcgcccatgtccggctgctggcactgcagggaagcgcggtggacgtcggccgcgtggcgttcgccacctccctgaatcttctctcccgcacagtcttctcctgcgacctgacgaacctcgacgacgaccacgccggatccagaggattccaagaggtggtgacggagatcatggaggttgccgcaagtcccaatctctcggatttgttcccagcgctggcctgggcggatctgcaaggattgcgccggaggttggcgaagctgtttgcacggctgcaccaggtgttcgacgtggagatccgccggaggttgtgcgagcgtgatgcctgcgatccccggaggaacgacttcctcgacgtgttgcttgacaccacgacctccacagcgttgggccgcgacacgctcctgtcgttattcacggtaaagcaggaaaaaaaaaagagcattccctcagtttatttatgtgtgcgcgtgccagtgtcataatcaacgtggatcagaaattgtttcgatatattttcagtttcaagaaaaatgtggaccagaaatggtttcaatatattttcagtctcaagaaagtgatgcatataaccctcctttcattagccttgttcgtttaagtttatcagccgaatctaccagccaacaatacttttttgggagatactgtgattgtcatatttaagttggtgacagtgtatgcatataaatgctacattttcaaactttcacaattagtttatctggatttgaaagttaagggaagtaagttgtctaatattcaagtcaagagtgtttttaaattcagcaacaagtttatggaggaaaattggactttactcaatcctttataattttgataaagttttaaattcttcataccttatatacttcagaactaagagagtattactagattcaactatgtgaagatgtcaactatatataatccagaaagcaagtaattatctgtaattgtatccaatccattttaatcctagtaaatggcatcagaagccggctacaaattatatcttctgcatatattctagtctagtacatataagtgcatagattggttggagtggtgccaaaattaacataaatatactctaacagttaaacggtatttgtgaggttaccaatgttatctctaatataatttaatggtttgaaaaacgaattattgttctatcttgtttagtactaggggtagatggttattccacttagaattcttaaattcatgtagtaaaatttcaggtgctagtattcatatatataatacattcttttggacattttggatttataatgttaaaaacaattgtgatcaaaacctaatttaagaattaaattagttaaattagtggcgcaaacagaagtttttatgctaagaatcaacagttcttgggacaacgaccatatatagtactgtatgtagctttcatcttactatatccactcaatttaacaaactaatacttctggcatcactaactttatgttacatctttattttaggatttgtttgctgcaggcagtgatacaagctccagcacggtggaatgggcattgacggagttgcttagaaacccagtctcaatggttaaaacatgcaatgagcttggagcagccattggctcggcaagaaacattgaagaatctgaaatcgaccagcttccctacttacaagctgtgataaaagagacttttcgactgcatcctcccgtaccactgttgttaccgcgacgagctgaggctaccacagaaataatgggtcacataattcctaaaggcgcacgtgtgctcgtaaatgtatgggcgatgggccgagacaaagatatttggccagagccagaaacgtttatgccagaaagatttctggagaggactactactgattttaaaggtgggaatttcgaactcataccatttggtgcagggcgtcgtatctgtcctgggatgccactggctagcaggatggtgcatctggttcttgcatcactgttaaatcagttcaaatggaggcttccgaacgagctcgaaacaaatgggattgacatggctgagaattttggtgtcactctaaaaaaggcaacgcctctttgtgctatagctacacctgtttgaatgagcagcccagatcaaccgggatgacattagttatgattgttttcctgttggataataatgtatctcgcatgtcatttaaattattatatacaaggtttacagtgattagcaaaaatagagactgttcaaaatagaaggtgcctagctttgtactaacttgcgaacttgaaatactaggagtagggaacaataacagtccatttcaggtcggtttggcttccaagcaagaagtccgttactggtaaatcatctctgaaagttttaccaaaaaaagaaaaaaaaatccgattttgattttttagctaaaaacaaatcttccatcggtttggtaaaaaaaatcacttaaaaaaagtcaataaatatcttctccaactcacgagagtatctccgagcgtcttttttaaagctcactctctaaattattattggagctatttacgtagaaatcactttctatatctttctattctctaattttttttctatatcttgtttgc

SEQ ID NO: 3802 - DNA, 3692 bp, Sorghum bicolor
attgcagcggacactgtctgtatattgttcttatgatttgcctaattcattcagagaatttaattgacatctaaagccttccacaatttgacacccagacccacatgtcaatgactcagattgactctctacacatcattatgatgtcagtgtcaaatattgaaaggctcgcggattggatgttaattgtcaaaatctcattcatgttaggttccaattcatatttagatgtactagtttgctgtaattttaaactgttttgacatttattattgggtggctacttttctagcaccggattcttttttcttaatggcctgtattggaattttgtatgatattagtttgtgaacagtgtggtatctaaagttaaatatacttagctcgtgagtcatggagtatcgaaaattctaaactaacttaagtttgttttgtagttacgcaacagttgacctattaacatataatatattagtatttttgttctgctgcaatttaattcatacattcatatatagatgtctatccagtggcatttattagtaatttgttttggttatgtgcaggcgaccttcgactgcttgatgaagacctatggcttccttactcctgaattctggactcagaccaaattctccatgactccattccagcagttcacagaccttctgggaaagcccaccaagggtcttgtgcttgaggctccaactgagacagcagaggcttaggatgggttgagtgaaaagctctactcattgagagttgtctaaatgcgctttcaatatagttaagaactgtgggagtcaactttgggttctgttttgccctggatgttgttctttactgtcaattttttgattgtggtacttactatggtactatttatgaatgctacataattatctcacgatagtcttttcacggcgaaggctttttgaggcttgtgttggttgatacagttttgtgcctttgtgctgtgaatgtgttctgctttgtctttagcagaacttgaggcactgattgcagtgatggtgcttggctgccttctgtgccattatcatttgttgcagtttacttatcacggtgattgcttttggaggcaggtcatctggttttatatttatctatccacatgatcatatattatgattctgaaatttgtattttgctattgcctttcatgttactattttgctgtatctgtgttgtcgtggaaagctatggattattattgtatggtagtactcgtttcctttgtggtacaacccaatgtcatgggcagtctttttgtggtgagggtttttttttttgaaatttgtaaaatgtcatgcactgaactgtatttgttgcccagacctccaggtggcagctgactagttgtggagcactaattgagtatcagttctccatgagaaatacgtacacaacgtgcctgtcctccactgtaaatgctgttttctccgtgcactgcgatttgccgtccgttttgctcgcacaccggttcctttgtttgaacctcaagcttccattccatgtgctcgcagccttgatcggacgcggtgcgccaggggaactggaattgccgtggcctcctcctgaaactcaaactggaaagctgtccatgacacgccggggccgccctggattccggtcagaatcttcgcccagtggcgctgacgcgaaaagacggccggacccggacagccggactcacggccgtgcgccctgggcctcacaaaatttggttggtgagagggggacgcagccacggcagcgcgagaggcagccacgaggacggacggagcgagcgaggaggcgaaacagcactgcaagtcctcttctaccctgcgccacttggatttcttttcttttcttttcttttcttttataccacaccgcaccgcaccgccgctgctagctgctccccagatcgtcgaccaggtttacaggggaaaccagctgcggctgctgcaagaaaacacaggtacacagacagcagcatggccggagtccaggtgacgccggcggccgtcggcgtggcggggctgagagggtcaggggttggcagcaccaccggcttgttcgccggcgactggaggaggaaggctcgacgcccggcgtgctcggtctgggcgctcaggcggcagcagagacggagcagcagcaggagcaaggggggcggcctcgccatcgtctgcaacctcgcgggacagtacgaggattcctttgacgacgtccagcgggtacgtcaaactaaactaggttcttgcacctaatttccatcagctttgttgaatacttgggatagattttcttgtaccggttcttgcacttcttggtcatcagctgtgctgatcgacaggctaaacgcagagaaagcatcgtaatgttcttgaaacgtagcaacgagatcgagggaaaaacgtaggatttgttctgattttctgagaccaaattcgtttggttcatttcaattcggagaaattcaaggcgcttgctttcggctgacctttttttttctgaactgaactttccttctggtgtttgtggttgcagcaactgatgaactacttcacctacaaagccgtgaggaccgtgctgacccagctatacgagttgaacccaccaagctaccgttggttctacaagtaataatagcaaacaaatcctctctgttctactctgaattctccctgctcacggttgtgtaaacatgcatgttcttcgttcccattttctgtagcttcgttgctgtcaacaaacctactgacggcaaacacttcctccgtgctctcagcaaggtatatacacactacacctaaatccacacacaagatttttgtgcggatcttctgcagctacgaatggagctcacgcaattgcctctgcttattttgcaggagaggcaggagcttgcagagcgagtgatgattactaggcttcacctatatggaaaatggatcaaggtaacaaaccatcgataagcaagtgctgctgtagcctgcctattgccgacgtatatgatgtctgacattttggttgggttctggattataatctgtttgtcagaaatatgaccacgcaaacacgtacgagaagatttctgatgagaacctgacgctgatgcgagagcggctcatggagacggtcatctggccaactgatgacaccaacacagagaagatcggctgatcaagcttagctccttatattaggtagaatactctgggtttctctatcagtcagtcagtcagtcagtcagtcagttgtatataatcagagttttagtagagagtatatatttctctgggcagtgttcaggcaattaatatgtgaggtgttaacaatgctgttttgccctcccaagtctctacagttgctctagaggaagcaaaaaagactttaccttgtaatttgtatgaataatgaaagctttggttcacttcagagttcagagatctacttgaattcgtcaggaggtctttatatttttccatttttccacaccatccacgcattgcaggccacatatctcaagctgcatgtaaccttacaggacattggattgtttttgtttaacttcaggacattggatttactataacagggcatgtattcctagaaacatcaactgctgctgctttcaataaaagaagatacaggaaattcacatgaatgatccaattaatgaa

SEQ ID NO: 3803 - DNA, 3463 bp, Sorghum bicolor
actttatatcatgcctttctcttacctagactttagttttaggttcatgcttcccataaatattaaattttagtttttagtaattcctggaagaactctaatataaaagctaggtactcaaaagtaagcaaacagagcaactgtggggggggggggggcagccgctctctcctctgcctcccctcctgttatggatgggtccgctctgccctgggagggtccgtggccgtcggatcgggcgcggacggctcatgattgggagggttttctttttttccttgcccgccgtctctggtttggcgccctaggtgggggactggggaatgtggaatggcttttattgcgttccttttacgtattgtcgtgtagaaaacgaaacattgctcctttgttgatagtccgggttatttttaaatatgaaacatgtttcatggtcttcaatcaagacgtaattttttttgtaatcagaggcactttcccttaccatgcagattaattaccacgaattacggtgtgtttccgcctctctttttttctctttttctttttgtaccaggtaagagggaaacttgactcttcgggccttcgaagttggcatccgggcgacagcccattggacattttgtgggccaaaagtatcacttcagcccatataaaatgagtagaactataccttctctgggccggcagtgcactgacgcagaccactgtgtgtacatccaggacgatccggttcatcactggtgcagtgctgctaaaatgacgccagtccacggaggaaccagtgaaggaaaaaaaaataaggccttgtctagttcactccaaaaactaaaaagatttcaagattctctgtcatatcgaatcttgcggcacatgcatgaaacactaaatatagacgaaaataaaaactaaataaacagtttgcctgtaaatcgcgagacgaatcttttgattctaattagtctatgattagacaatatttgtcacaaacaaataaaagtgctacagtgtcaaaatccaaaaactttttacaactaaacaaggcctaaactgttgcattatcagtttctaatttattttaatggtaatagagacaaaatatcactttactgtagtgcgcaaaaagaactcaagtcagaactgaccaaaacttcaccaaacaggcactatgtgacacggttttgtttagctccagctttttactacagcgagcatgttcgcttgaatttatctactgaatttatgagttatttagcattgtttttctttcataataaatcagtaaacaatctttaagttatagcctttctgctaagcaaacatttagcgtacggagaggcttctaatggggaaaaaagatattgttaacgtctcctaattgcacgaaggagttgagcttcaccaaacaaacatgtgcttaacagggccgctgatttaggtcttgtttggcatggttttttcagtaggttttatgagttgtttgaaattgttttatgtcaaacatttattttttaaaaaatagattcacgtgaagcttcttgaaacctgctgccacaagaaattggtatggaatgaagctaaaaatagcttcttcttcttcttcaaagttcagctcgctgtgggccctatgtgaaattgtatgagagcatatttataaaatctctacgtgtaaaactattttatcaaatgattcataaaaaatagcttcgactctatagctaaaaaaacctactttattggtgaaacgggcccgtggcaatgaaaccttagctttggccagactttatatcatatccatgctgtacaactaccggcgatgcaccatgatgcgatgacgagatattgtgatgtgccacgctctccttggtgcgtgtggaagacgacgaccccgctgtgacgtgtgtggatgcccagcctccccacgtatcaaaatccgcactccccattggccggactcatatccccttatccacttcgccaacctgcggtctcggccacaccagcctctcttgtcctcttagctgcatgctcgcgcggcgcccttctccatccagtccactactctctcatctccttccttccaagaagctctccgccgcgcgcccatggccatggccacgcaagcctccgccgccacgcgccacctgctggcggccgcctgggcgaagccacggcagctgagctcgcagctcgcgatgccgtcgtcccgcggtccggccccgctccgcgcgtccgacgacggaccggcggcggcggcggtgactgaggaggcccccaagggtttcgtgcccccgcagctggaccccaacacgccgtcgcccatcttcggcggcagcacgggcgggctgctccggaaggcgcaggtggaggagttctacgtgatcacgtggacgtccccgaaggagcaggtgttcgagatgcccacgggcggcgccgccatcatgcgggagggtccaaacctcctgaagctggcgcgcaaggagcagtgcctggcgctcggcaccaggctgcgctccaagtacaagatcaactaccagttctaccgcgtcttccccaacggcgaggtgcagtacctccaccccaaggacggcgtctacccggagaaggtcaacgccggcaggcagggcgttgggcagaacttccgcagcatcggcaagaacgtcagccccatcgaggtcaagttcaccggcaaggaatccttcgacatctaatcctccgtcgcatgcttaaaggacttgcgtgttcttcttatatgaattattactataagttagctgctggtggcgccatgcatgcatgcatggtttgatagatgatccatgtgtaattttattatcaagtcttcttggtgaccgtggaggcgcagcgtgggattatatgtacatgatgttcatttgctcgtgataacgttgcttctttgcataataacaccgatcgatcatcatcattagtggtttagtcctatatatacgtatattcattcattttcattccctccgtccgaaactagtgcatatttaaagtcatacatgtttatatcaaaattttctatcttaatacaaaatgcgcaaaaattttgtgtatttaagaaatatataaatttaattgaacttaaacaagtttaactcggtttgatcctaaaaattgcatcgtatttgaaacaaaaggtagtgaatgatatgcctacattccaaaaatccgacgatagtcgactattgatttagcacttacaaaaaaactactacacttatcctaactatgcctgaatttttcgagcaagcatgccacatatttgtaagataaaatcatgtgttctttagtgtttagtgtttagtgcttagtgcatggaattatagtgtacaaaaaattcgtgtttcttagaggattttaacatagatgctttagttacactaactaaatgagtatttatttctgccataatattctctagcttatgtgtttg

SEQ ID NO: 3804 - DNA, 6604 bp, Sorghum bicolor
aatatttaatattatggagtataattaatctactatggagtactataattaccggcgcggcgccgtaccaaaaccgaaaacatccaaccgatgtacgtctggagccgtcgtacacggtttcccgggctcgttcgtacgggcgttttgccggcttctgactggaaccctagctaacaccgaagtgtactgccggtaggaattagacaaatctcgcgggtaaaaatctcggtctgcctgctgttggtgctcctttcgccggctttgtgcatgcagaggacgtcgtggtaaaaataatcactttgttaacggcgtcgcctttcgtaaagcggccggtgttatgttaagcaaaagccccctccgctttgcgcgtgcgtgcgcccggcccggcccggcccggatccaatgcgtgcgctccgcagcggtgcgtgaccctcatcacgcgcatgcgttgagccgctgccaggcatggcccgccggcctcgtggctcgcggctctctttgctgggcgggggcgcaagtgccgcgcagggtgacgggtcggccctgggctgggcggaagccgacggacgtttgccctgccgccgggcccgaggtggtgccggatgggcgggcaaagctggcgggtgggccaacctaggacccgacacgagcccggataaagaaaattactactcctaccaacccacgagtccacgaccagccaacagcatcaacacgagcagtgctggtcggtcagcaaacccttgtcaaaaaaaacacggtctcaggagaaaaatgaactttttgaatgcctgctctctgccgtaaggtgcacgtctatatttttagaaacctttttgcaatatataaacacttattagttagaaggtatcgattatatctagggtggtgttttataaagacactcgtgaacagaatagtttctatgccgaattaataggatgacacacagcacacttcactgatttcaccatggcatcaaggggaggaagggatgaaaatttcaagaaactgagcctcatacaaaagctatgccttgcacaagaacaaaaactaaattaagaaacggaatggacactataaatactaggacaaaacaaaagagcgttgggaaaggaagatgactggatgagtttttttttatagccatagcttggacattgtacactgtgagctatagcttcttaggtggtaaatatactactattaagtacttagtttgtttaataggactgtcctaaagacacaacgacaaatataattttacttcatatgagctgctccctccatccaggaaagaatgcaactatggccttgtttagttcgcaattttttttgtttttggatactgtagcatttcatttttatttgacaaacattgtccaatcacggagtaactaggctcaaaagattaatctcataaattataggtaaactgtgcagttagtttttattttcgtctatatttaatgctccatgtatgcgaccaaagattcgatgtgacggggaatcttgaaattttttgcgaactaaacaaggcctatgggtttctatactagtaaaagtaatttacgtttgaccaagttcctaccctgtagcaaatcaatttattatgacaatacatttcataattaatctaataatatttatttaatataaaattgatattttttatcctcaaactcatcaagatactaaaatgtgatgttggcctaggattgcatattttttttcttggaggggggggagtacattgttatggagcattggttcctttgaagggatttgactcactttattttattattgacgaatttccgttaccagctgatcacatccagacattggaggcccacatatcagtgggcatgggtccccggtttgacgttggaggccgggtgcctctaacaataattcccgaatcatagaggggcatttccgtccagaagcacaagctggggaaacggcaaaagtggccgcgagagtgcagagcgctgctcgcttcacaacagtcttcactgatgagtgcccacttgtttgtggtctgcagcaagcgctagtggacgcacgcgccgctcccaaccgaggcgacgagccgcccaaggcgacgagcctgccattactcccgttcccaatcccactctctcaccacgcaggcaggcacccgcattgtttcaaaattctcgaatcggccccctggtgtgtggtggcagccgcgccggcggcggcgagggggctctgtgtctggggggtaaagcgaggcgaggccctgctttgcgagctcgccggaggaggcgagcggaaggggaaaaggaggcgcggcagcggtggaggtgtctcaagactgaggaggaggcgccgcccatggacacctcgcggggggtcgcgtgcctgctcgtggcggtcatctgcttgtcgtgcgccgccgccgccgccgcgaggtcgccggccgcgaggctgcaccgccacctcaagcggctcaacaaaccggccgtgaagagtatcgaggtgcgtcaacccacttgtttcctccggcttttcgtcccgcggaggtgtgcgtgtgtgccatgccggcagttttgctgttactcttggtagatttgaattgcttgcttggggagaaaatattttcttgaggagatttttccatagataaactaacgctgcattagtgagcatttgaacaagcccaagcgaggagatgggtgtgtctaccttttgactactcgttgaggacgacagcttttgaggcttcttttctggttgttcttggaaatttgctatctttatgtctaatctaatcttctcttttgtgtgcatgctttgtgcttgttcttgtatttagttctttcttgcttgacttggggaaactaatttatcagagagttgtcaaactaaatcctttcgcggggaaactctctgttccagtcgcacatctaattctaatccagctggctgcgaattgcaaatctgcagagtccagacggggacatgatagactgcgtgcacatctcacatcagccagcgtttgatcacccctacctcaagaatcacacaatccaggtaaactcccctgctgaaaacgtgcagtaactgaattggtcttgttggaataatgtcatagttaacgcattctacggtttgcagatgaggccgaactaccaccccgaaggcctgttcgacgaatccaagacctccagcagcagtggggagaggcctatggttcagctctggcatcagaatgggatgtgtcctgaaggtacagtccccatcaggagaacgaagaaggacgacctgctcagggcaagctcaatgcggcggtacggcaggaagcggcacaccaccgcgaacccaatgtccgtcaaccccaccatgctcaacgagggtggccatcaggtacctgctcgtatcatcccctatgttgttgatgacctgtggggtggaagaaagaagctacataagtgtgctgttgtaccgtgatgctcataactgttgttgacaatcgcagcatgccatagcgtatgttcagggagacaagtactatggcgccaaggcgactatcaatgtgtgggagcccaagatcgagcagcctaacgagttcagcttgtcccagctctggatcttggggggctcatttggggaggatctgaacagcatcgaggctggatggcaggtagagagagaaaaagacccacagcacatgagcttcatattcataatcagcatcgagtaaatgcaccaccgttttcgcggttggttgccctgctgtcccgcgatgcagtgtatctgtgtatatgtcatcacgagctctgaatcacttccgtgcttctctgtttgatcaggttagtccagacctctatggggataacaacacaaggctgttcacgtactggactgtaagttttgagcattctgcctatcctatcttaccgttattgcaacatttgaagagagattatgctttcatttacagttcctgaactgtttcgccatgtggcatttgtagagtgatgcataccaggcaacagggtgctacaacatgctgtgctcagggttcattcaggttaacaaccagattgccatgggagccagcatcttcccaacctcaagctactctggttcccaatatgatatcagtatactgatctggaaggtgagataagtaattaaattagtaactcaccacatgccatgcctagtacgtacagaattatcagacatgcagagaatctttagcccacttgctgttatgctcttactcgtgctccttcttgactcgtgaacctgtaccctggggctttgaaaattggtttcctccttacccgtggttatcatactccttttctcaacaacctctttcttatcgctaatgattaatctacttttgatttttttcaaaagaaacaaccattgctacttttcacctcaaccagctagtgtttttccatttccattgagcatgggtaatgagtgcacgatttgcatgctagaagaacatgaatgcatccacttaggtggcatttggattgtggggtataacaggtgggaataggaaatgggcagggtaggatatgttttgccttgtttggtaaaagggatatggaaatgagttgggtttgggataagggataaaaggggctcatatcccatacctgactcctgtcagtccaatgtatcgcacctgtggccacttgccgccacaaggaacagcgaacacaacatccctagcaagtcacgccacaggagttgtagtactgactaccagcaagcatacataggagtcagcagtgatcgccatggaagcaaagagatgggcaacagcatacttctggagatgtgaatcttcctttttttttcttttgcattttccattacttaacccaaacccaatccaaatgcatccagacatgggaaaggcaatagaatcttttatccctaatccaaacccaccaacttataataagccaccacatatctttatcccatacccacccagcatccaaacggcaccttagtgtatgctcagcatcagcggctattattccctaatactcaaatctagctatgtaaatgtagaaaaggattttgcataaaatacatccaatgtgtggctgctatatctatagttaatctcttccgtatgatgttaactgtgcaggacccaaaggagggcaactggtggatgcaattcggcaaggattacgtgctcggctactggccgtcctttctcttctcgtacctggcggacagcgcttcgatgatcgagtggggtggggaggtggtgaactcgcagccagacggcgtgcacacctcgacgcagatgggcagcgggcacttcccggaggaagggttcagcaaggcgagctacttcaagaacatccaggtggtggacagcaccaacaacctcaaggcccccaaggggctgggcaccttcactgagcagtcaaactgctacgacgtgcagaacggcaacaacggcgactggggcacctacttctactacggcggccctgggaggagctccaactgccagtaactttcaaggtgtgacagccatcggagtggtaatacatcagttttctggtagctctaggtagtagtatgtgatgtgaatgggtgggtctgtcttttgtttgtgctggtggcttcacttgtagtagtttctctcttgagtttcttcttgttctcttttcattagtgccaggatagcttctgaagagaagcatggcacccttatggtggcctacctccttttcctatatggtagattcacttgtccttgtggttatgggctgtgcctctttttttccctgtcaccctttttttcacctttgatggatgtcagtgtggcgcaccgaaaggtggaatgggcagaattcagatctaggccagcagctttgtgtgccactgatggatggtgggtaactgcctaactgtgctggttgggtacaagaacaagaacaagaacaaaagggtgaaaaaaagaagaggaaatgtccatgccattgcattgttaatagttttggatagagcacatcttggagatcataaaatgttctgtactcgggtagtgaaggtataaatagtgcaccaatgacatgtacatcagtcagatgttttcgttggcttttcctggtaatctcttgtgagagacggtttgttttgggggcgggggcagaacagcagcagcttaattttcaattctgtgcgtgtcgacgctggaaaaatttgtgccgttgtgaaaacatgacagggtccatgtgacgcaatttcccaggccaaccaaacattggcccgcaggactgtaaacggaaaaaggaagatcctgtttaccggcaatcaaaacattcgtcttggtaagtaggactaggtctcccatcgttcagtgttttgttcccaaaaattatgaatcttatggtacatgtagggagcattaaatataaataaaaaaataagtaattgtatagtttgtttgtagttagtttatggttagataataattaccaagcataaatgaaagtgctaccttagtcaaacctttttttttttggaattttctgaaccagcatcatcgacttttcaattgatgttgatcgtgtttaca

SEQ ID NO: 3805 - DNA, 3557 bp, Sorghum bicolor
acattctcaatcatgcagcaaaaccatcgagtgttgtataaaaaaacttggtatatgtagaagcaatgattgagagcgcacgcgtcacccaaattttccatgtaagaaattaaaactccatttccacttgaacattcatagcaaagctaagcatgggggaagcaagtggagcaagtgacgatcagacgatgcttgttcacttgcaattttcttttcttttttctgaaaaatcgtgaaggcagatacatgcatgcctataaattttctagagaagacaacagcgagagatggtctcacctcacggtgtacctgtacttgcatactccagtcattttccactgtagtgcatgtgaaccggttctccggagcaaagaaaatttcaggaaaagagctcgagagggagcgaaagtgacgccatgtgcaacctgcaggtgcaacatacataatagccactggaaaaaaaaaaggggcctccatgtgggttttgcgagagaaaacaagcctgtctttttacagcaatttgtcacctgttcacttgtgtttgtctgtctgcctgaagttttcttgagcatggcatgggctcaagtgttttgacccattccttttcctgattgtctggccgttcatagtcccagatttcaagatcttttgcgagtaatatgatctgcagcagcacaagatcacaggccttgtttagttcaccttgaaaaccaaaaagttttcaagattcctcgtcacatcgaatcttgtggcacgtgcatgaaacattaaatatagacgaaaacaaaaactaattacacagtttagctgtaaatcagaagacgaatcttttgatcctagttagtccataattggataatatttgtcacaaacaaacgaaagtgctacagtaccgaaaacttttcacttttcgtaaccacagttcacagaggccatcagatcacaattcacagaggcagtccagtccctctcctactactcctagcatcctactggtacctagcgcgcggtagtcacagtggcactgggcaatggcatggcagcagtcacagaaagagaggactgatgaggaacagcgagagccagcggctgcagcgcttcctgccctgccctcctctccctccctccatcttccaccatggagctagctgagcagtgagttggctgccagcgcgtgctgtatcttgtatggttgtactgtatcccctcctctcgctaaccttttgtctccttcccctcccaaaccaccaccagctccacccctccccactacttcttctgagctccttgctgctgcggctgcttggtgcttgcttccctcatctctagcctagcctgtagtacaactggttggagtggttgccagtgttctccccacttgctcctctcaatccactctcccatggccatgggtatggtgtgcaaccatgcatctaccgctgattgctgaagccttcacctcgcctcgcctgggggaaagcttctggttcgccgctgccgctgctgtgggtataaaggtggaagactgagctgcccttcgacggagtcccggcggagtgggaagatcgctccgtcgccggggtttcgcggcgaagaaggtggcctacgcggcgccgctgtgtcgtatcgcggtggaaagggaaggagcggggcggggccgtgaaggaatctttgccccgacaccattccctccgctgcccctcgatttcccggcggtgtcggtgctgcctttcgcaagtaaaagcgggatctcgcgtccgccggcggtggcattgccggatcgagcagtctccgacggcggcctccgtatctgcgtggccgatctgttcgcggctggtcatctcttcgccggcattgcgaagcgggctggccgggcggtgtggactgctgcggtgaggagtgcagaggggcgttgctctgtgctgtgatccaagcggcgggcgggcgggcggctgcacgccaggtgttcgacgaaggaccccgaccggtgcaagccagccatgagggacttcccttcctgcttcggcgagagcggcgtccagatcgcggacgcgtcgtcgtcgtcgtccagcgccggcaagggcgcggcgcagaacctggtgacctgcctctaccagacgcagttctcgggccggccctgcgtgatctcgctcacgtggagcaagagcctcatggggcagggcctcagcatcggcgtcgacgacctgtccggccactgcctctgcaaggcggacatcaagccgtggctcttctccaagaagaaggggtccaagagcctcgacgtcgaggacggcaagatcgacatcttctgggacctgtcgggcgccaagttcggtgccgggccagaaccggtggaggggttctatgttgcggtggtgttcgaccttgagctcgtgctcttgctgggggacatgaagaaggatgcgtacaggaagactggagccaaccgatcgatgctgaatgccgcgttcgtggcgaggaaggagcacatatatggcaagaagatctactctgccaaggcgcaattctgcaacaatggccagttccatgacattgccatagagtgcgataccgtcggcttgaaggatccatgtcttgaaataagagttgataagaagcccgtgatgcaggtgaagcgcctggcgtggaagtttaggggaaatcagacaattctcgttgatggcttgcctgtggaggtgttctgggatgttcacagttggctctttggatcaacgacgagcaatgcggtgttcatgtttcagacatgccaggcacctgagaagtcgctgccatggtcctactcgcagatttttagggagtcccagttgcaaggtcttggtttctcgctgatcctgcatgcgtggaaggttgaataggttttttttgcaggatcacaatttgcttctgcacctgcctccttttctttagtgctaacaaaagacgttttgttgaggtcatcagaatgctatggaggctctccaatatatgttctttcattttattttgattttgttttgccatctcctataaacgctttgtttgaatagttggcaagttatgtgatatcccagtggctttgccactctgttctttctcactcttcttcttgtgccttgagtgaggataattctaatgatcaaatagttcaatcggtgaccatgccgaagaaagagaatgttgtcattatgtaaagtatatcaaagttccgattatttgttggtgatagtaacgtccaacagtttgttctccttttgtttgtcttgtgatcactcacaattgtcactgaatagcaaaattatagaatacatcttaacatagctttgagttgaacctgtaaaaaagttaggagttttaaggaataaaggcacgtgaagacgtgggcatcaaggtttgtaaccctgataactgcctttttgtgcttatctgtgggcacctgaatgatcattctgatgagtatcctgaagttgagataaaacaacttagtttaactgtctaagagattctttcgtgacttccttttgtgcatttttgagttactttcagttctgatacagttt

SEQ ID NO: 3806 - DNA, 9004 bp, Sorghum bicolor
aacttgaaatatgaatttatagctgtggcttcgtaggtctcatggctttgaaaaaaaagcaagcggtttgtaggattggacatctgagaacgattgatcacccctttggatgccgggaatacaaagtttcaaaccagttcagacgaaagtgcatgttagaaaaaaacatgcgatttcgaaatatgcaaagttcataatagcattcatcacaggtttcagacgaaagtgcatagaaactttaatttcaagcggcctgtaaactgtaaacaaggtctggagctattccagatgaagttcaggatcggtcgcagatcttcagcatgttcagtcacgttagtgtccaaggttaaggcatcatgacacagcacggtaaagtttttttccccttgagggccctcttatccttttactcattgtattagtattgaaaagtgtgtaaatatatattttaatgtactatttaatgtgaatctaacgaatgagaaagtgaaaacatatgtgttaaacgaaaaaaaaattaaaaaaatttaaaaaacagccgattccccgcctgctccatagccggccggagcgctttcccgcctggaatgaagcgcagaggacgagacggcccattcaatctcactggaccgcgtcatacgacgaagggtcggcccagcgcatcatgcaaacggcggttcttcctgtaggctcagaacggttccgtgcagttctgtttgggccacggtttctgtgaacggcttccgtgcggcaggggaccagggaccagtccacaatccacatcgtgccgctaggcctgtctgatagtactagtgctgtgccgccgccgttttccgtccgtagaccgtggacgtgccaaaagacaggataggaggatggctggacggctgtcgcgtcagatcaaggccttgttcggttttaaaaaaattataaaaaaaattcaaattaatcgtcacatcaaattttatgatgcatacatataacattaaatataaataaaaataacaaataattatacaatttatatataattcacaaaaataaatcttttaaatatagttagtttatgattagataatatttattaaatacaaaaaaatactataatatctattttgtaaaaaaattgaactaaaaaaaggcccaaatgaacgatctccggttcggtacctgagcatactccttggcagaacgtgtaggccaacaagacagtgtaccgtgtacgtaggagatacaaagactgcgtgtttttctctcttcaaaataaaagagtgaacaaggggtcgacatgcgatatatcttctaagagtacgtcgtatgtgcacccctgtacacggtgtacggtgaaacgtaagcggccttgccacgtctccccgacacctgagcccgtaaccaccgtagcgcgcttgcagctttcagatcgggagccgagaggagacaaaacttttttcttttctttttgttttggtgctgactgaagaaagaagaaatattagatcggcgagagccggcacgttccacggtccacgcaccgcgccctccactccactccaagccaacatcgggacccttgtgcaagcaagcaccaagcatcgcattcgcacaacttcgcattcgcacgacgcgccggcactcccatggccatggcgggcctccacctcacgaggccgccacgagggccgcctcacccgcgctccgtcgcgacccggcaaagcccctgacgattcatgcccaacccagaccagccttgtccactgacactccggcccacccgaagtgccgcgtcacagggacccactcgtcataaggcggctggccctcgacaggcggagacaacgagccagatccgcttgcaactactcgttgccaacccgacccggacgaccagagtaattacgggagggagctgccaacgcacaacggacagcgccgcggacggcgacaccccttctcatctcgccccgtcagcgtctcctccaggggcggccgctagaaatactcccacgcggaggagactggtccggtacctcccacgcacgagccgcatcgcacccgtagcatcgggatccctctggtttctgggaccggcctgcccagccggtcgatcgacgtcggtgaggagactggtccggtactccggttggttggatcggaggctcggccatgggggcgctgtcgcggccggaggaggtgctggcgctggtgaagctgcgggtggcggcggggcagatcaagcgccagatcccgcccgaggagcactgggccttcggctactccatgctccagaaggtctcccgcagcttcgccctcgtcatccagcagctcccaccccaactccgcaatgccgtaagtaacaactcgattcgcctctctcctttttttttttgaccattccacacgaattcgtttgcgcctgtgattttgttcgctttcgtcccaacaattttggtgtgcgcggcgctgcgactccgtgtggtgttttaatgtctgttgttgcgatcgcgcaggtgtgcatcttctacctcgtgctccgtgccctcgacaccgttggtcagtagtctcatgcccttgcgctagtgctatttggtttttagcttaagctggaatgttttgaggggtttgtgattactaggtgctaattatttgacggctgtagaggttcccgttctaacagtaataaataaaccatgttcaatgactacagaggatgacactagcatcccgacggaggtgaaggtgcccatcctccaggaattctaccggcacatctacaaccgcgactggcatttttcgtgtacgggatctctcctctgaatatgaggctctagttcaccaaaaatgggccctgtcgttctttttctagaagagatgccgactggtgttgtggctgtccttgcaggtggaacaaatcactacagagtgctgatggataactttcaccacgtatccactgccttcctggagcttggtcaagggtaactttatttcttccctgactcagttgccttcttcagacttccccaagtcctcgctgtccttactttgataagtttgaacttgaggtatcatatagatttttttagaagtcttagctacactttaattgttcagaaagcacttttacaagaagtatttgacctttctaaatatcgagctttaacttggtcgtacggtaatatattgcttggatttgaaatcattctctcattatcaggtttcacgagggaagcaaatagccaggttctgatagtcacacaagcagacaatttgcatgaggatagtgtttgtctttatacttaaacaagaaagtgtgcagttccctaaattaaattcaatgcacagtgatgtattgtccaatactggtgctgtatgtaaatcaactatttcaggactagtgttttttttataaaaaatgtttgcatagtagtactaaatactaatgcagaatatgtatttgaagttttatctccttttgattttcttgtcagatattagtttagtaaatagccttgtggtaaataactatattttgttttcagttaccaaaaggcaatagaagaaatcactaggcgaatgggagcaggaatggcaaaatttatatgcaaggaggtctgttaacgtatatccattaagtatccaaccgtagtcacagacttagagtgctaatataaataaactatatgattatttatactgatgaaacattgttatggtatgtaatactgtcattgcatcattttagcattttataggatctggatgtttgtcaggaatatcattgcgaatgacatgacttaagaatggaagtatgccactgccatgtgtctattgagtacattagtgtccttaaatgaacataaattaccttttacttgcattcacttcatgaccaaagaccacaggttatgccagcacaccgtcgtgccacattttcctggttatactgcttgacatgatgcaactccagtttctggatgagtggatgccatgtcaatgggttgtcattttggctgctgctctatatgaaaatatgtttccaggctttgtggctttcaaacatgttttattacactgatgcatgttaagccatgaaagttatgggtgattcaactttttcattgataccttgtagctatcagcaaacatgcatcatggttagatgggtctggataaataaaaattatctgctgccacattttcatggtatatagtcatacatgtgtgaaagtgatttatatcctgcactgagaaaaaagcagcaaggaaacttctattctttcagcgagcattatttattagtccttgattcattaggaaaacaaggacaaaaatccatgtaccgattacacctacagtttctatatatgtgttggttaagtatttctctgaactgatgtgaaatgtccttttttttatttaggtcgaaactgttgatgactatgacgagtattgtcactatgtggccgggctagttggttatggactttccagactcttttatgctactgggacggaagatcttgctccagattcactgtcaaattcaatgggtctatttttacaggtatgttaattagtgtgaaccaatcaactgagccattttttgctccctgtgtgaaatggcatttcttgattttgcgttgttaacaagtttttgtcatcaaatttcagaaaactaatataatcagggactatttggaggacataaatgagataccaaggtcccgcatgttctggcctcgagagatatggagtaaatatgcagataaacttgaggtacacaaaatattcatattttttttactgctattgtgtagctgcatgtatgacattttctaaattctaaattctcacacatccggcaatttcatgatatgtgttatgtgttctacctgttgggggagttcataactgatggttatagatagtaactcaaatattgtagtgaataataaatagtcagatgtttttgaaccataaatacagcaagggaagccctcaccgtaggattttattaggaaaaagaaccactaaacaagcaactgaacaatgaacagaagagggaggagaaaacaacaaaaggaaaactgtacaacaaccaagcaagagaaagagcttaagcaaagaggcttagcagggagaggaaaactgattttcttgagttgctaaatctatgagcctgaggcctagcatcctcggagtcactaaatagtcagatgttatctacctagtcaaccttattatgcaagttgaactttttgccatagtaatatatgttttgtctgtgaaactaggatttcaaatatgaggaaaattctgaaaaggcggtacagtgcttgaatgatctggtgactaatgcattgattcatgctgaagagtgccttcaatacatgtcagctttgaagggtcatgccattttccgtttttgtgcaataccccaggtacattacataacttgtttgactttatttgtctactgtggacctagtttttcaacgctattctggtggtgcatttgtagatctagttccagattgaacacagttatttagaattttaactaaaaaatctgcacataaaccctctttcaaaatagtacaattagatgagatgtgtttgtagctctggaaagcaatgttaaaagtctgctagtatttgtggaaactaccttatagctcagagtatctgagttaagaaaagattaaacttaggacttgttaatctttttgcttctgtcagacagtattaccaaagttagtcttgtccttcaagcacatctttgtggtaattggactaggttctcaaaactcatatactatcttttttcctggaaatacccaaaacttttgtattttaactttagtcgctgcttgaaataatagtttagcggttatggaagtttttttaaaattttttaccatgtttcattgctgaggaaactgttacatttttagactcaattgaaatatggtattttgctaagttgtgtcacgagctttgctctaaaagatctcattttgtggggaaatctagatagcattcctggtttcttgactgatcaagactgattatccatatattttggtcaaatattttattttgttatgcatgttatatactttgttcatcaatatattcttgaaacaatttcctccataggatactacagtattaagttgctatctcctctttctagataatggcaattggaacatgtgctctttgctacaataatgtgcatgtcttcagaggagttgtcaagatgagacgtggtaagctatttttgtaagacatactgtacttctgcaggacctacatgtctttgcctcacatgaaatgcctgtttgttctccattatatcaccttgtcacagttaagattagtgaaatatattttggagttctgcagaactatgcttttgtatgtatatactaacattctgagaggtcatattatgtttccttgatttcttgtgattactgctatgtgattggcgtttaatcactgaagtaatgcatgttatgctctagggagaaatgtgtgtctatgaccacctcgcaccctttaaatacaagaggcacaaaattgcaatctgaaacatgcagggcacctaatattgtttatgcatctgttttggaactgtgtagaaatgtatgtgcctgaatggggctatttcatcctttctttgccttttttttgcgcaagtgggtctcatcttagtatcttacaattgcttctgattcataatcactaatctaactagcataaaatgcaaggtgcaatttctgtatctctaattaccctctttcttaacatcatgtgattattattctattactttgtcttgtctattaattacctgacacatttttgctcttaggtctcacggctcgaataattgatgagacaaactcaatggcagacgtctatacttctttctatgagttttcttcattgatagagtcaaaggtacactatggaatactgattgttgctgcagccaatatggagtttagttgcctttatataactagaacatctataatatgtatagcccattcctttgtaataatagtatgaaatttaataggatgttggtcgatccgactatctgaaacccactccacttaattggttgttcacttgctaccactcttttggtttgtggtcagtaatcatgcgaactgtgttcgagccaaagtaaatcatgagaactagggtgaattaatcggtcaatcgaacctgagctacttgcaccactacaaaatctattatgtctgtcaatatcattgtattggcattctatcgatttcttactgaatcacactaataactacataaacatcagtttaaaattgttcgtcaggtgggcagcctattattatactatcagtcaaaattagttgctgtttcagacagcccaaatggacctgcaattatttatatcttgcttcagaaatgtcaataaatcatgttgacccgttggccagttggactactgactaccttaatcaagttgttcactcccagctgctccatgcactgtcttctatggaacatgctattggtttaagttgacagtgtgttaatgctgccctaatagataaatataagctcatttggagcaagtttccaggtcctgaccagcttagtaccattctttgtctcattcgtggggtcagtcatggcctttaaactctaaaaggcttctggttgctgttcgaaacttgatgcatatctggtctgtgttccagatagatgacaatgatccaaatgctgctctaacacggagacgtgtggattcaataaagcaaacttgcaagtcatctggtttggtaaagaggaggtacgccaaatgatttaagagttgcacttctctgtttggcatcttcatcctgaattcctgattgtcttgattctgcagggggtaccacttggacaagtcaccttataggcctatgctggtgagtaaccgataatcagtaaattcattttagcactctgctatataagttgtcaatattcttctttgatttcctcagatcatgattgtcctcctgctggtggctattcttttcggggtactgtataccaagtgatgcactttttcctacggatcttgagagaaactatgccaatctggtatggcaaacagtttgaacaatttaaaccacgttgctttgaacaatttccattccccccgaggctgattatgttgcgatactggttttgtgtagatcctttttgtactctgtagtttccaaaggctgcgggaaatttggaagtgctgactgtagatcgatacggctgcatgatacggcttccgtgactccgttgctgatctcaattcgtttgttgattttgatttctcgtggggtgtatgtgtgttcaagctgttttaagtgagaaaataccctgatatgtatcctacgactacgaacatgtgtttctgttcagttagcagtgggcacactgtagttagtgctgttgtgtttagatgccttgttttcaaagctgatgtgtttgtgtttaccagaattgtgtagtggagttttttttttttttttttgccacgttgaccttgagccgtcactcaaactttaaaccgtcaataatatgcaaagaatacccctcctgtttcctttcatcatcacaaagataatacgccggcagtaatatgcgaagattactttttcataaaaatgataatatgcgaagatatcgtgcacctagtatgttacgcatacaagtacctaaattgatgcgcggccaaacagttctagagctcatatcacaccgacctgtatcgacgatgatggtatattgctcgaaaatgaatacgataaataaaagaaacggaactctctctctctagcaagtagaaacataagcaatgcccaacaaacatacaatgcttccttctgatgaataattagctgcaatggaaggcatttccatttttatcagtggtataataatactccgtagcaacgagaccaccaga

SEQ ID NO: 3807 - DNA, 6074 bp, Sorghum bicolor
attcctttgggctgccaaatgttctagaattggaaccgtcatagccctagaagcaatatatcattctattttgacgtctgcttatttcttgttctgttttaatgtcacttcattttgtttaaccctgttgccttggttctgcaggaggcatattgggatcgacgagatgctgaaggagataagggctgccctgagaaaatgctttgatcacaagttaccagaaccttgagcaaagcaagttagcgtaacataggcttagtaccatagtccagttcctgtagcagaaaagggaatgatctggatgcctcctggcacatactgaagaatctccaacggcagtaaaatccatggagagttttctgaagcaaccggaagtctgatatctgacttggagcgcgtcagtttttaagctccgtttgtaacatgggtcctccattgaaatttctgggaaattgaactgtgtccgtccacagcagctgtttatagacgacaatacaacatgtgtgaatagattagtttgggttacgtcgacgctgtcagtgtatcattcattcatctccaatatgcacagatgcacgcctttctctgtctttagaagatatgtcggtttcttagcttccctgatggagagttaaattcaaagacaattcaacattcccaaggttccacagagcatagcttgagatgagcatgagaagatgggtggaggaataccatattgtttcacatcttcctgagctttttgttggcccacattcttctgatttgcctaattaaaagttaacattagatcaaaagtaagtaaactaaggagcacccaaacatgcacctgcgttagcaaggagatctacatgtgacagcttcaatttatgtcatggagtgtggtatcttaccccaccacgctgtgtcattagttcttacatcctctgcccgatagcttccaactctgggtcagcctagcaaacaaaattgtattccatcagaagaaatgcaacaaaagcatatagctgtggatactggataaagcaaattgttcctgcttgtgacatatctaaagccaatcaatacgtctaagcatcctaaattccactgaatttaagatattttctttttcctaaaagaccaagttaaacagaaacatgaaaagacttgagccagaaaaaaaaacaagttaaccaatactgattaatttcaacaactcctaaagttcttgtgcagttgggtgattgattgcgagtcaaaatgacagggaagctatcaaaaaatatcagagaagtaatctttcaaaggtaaaggaggacatgctgaattgctcatatcagatatgaaggcacacaacacatggcagaagagatggaaggaaccctccaactctaacaaaatgataccagacatgaacgtattttcttgttcttttggatgtacatgtccaaatacacgccatgcacacatatatatcagtatgagcgtcaaaattattctcagtctcagcaagcttacatgagcagctccaaacaacatcgctcccttgtcaaaaaacaacatcgctccagctcatctctaaaggtagcttaaccactaatttttcaccgttattcagttatttgcatttgataaaccagaacaatcacaatattttcaaaacagcctgttctagttaaagggagatgggtgtacacatgcacaggccggccgattcgcacgatgcaccaaccggacgtcagcttgcgccagagcatgcagatgcaggcgcgccgcgcgcagccggcccgagcatatccgcactggatgctggcggcgattccgtggcgcagcgcactccgccctggctcccctccgcccaacgcctggcgccgcggcggccgcccgctctccctcgtcccgtccgcagtctcctccctacaaagaagcaagcgccaaaccgccaacgcaagcagagcagtgagcagagctgcggaaccgcacgcaccaaggccatcgcccaccagtgaccagtccctatggcggggaacggcggcgagggtgcggtcgggaaggtggcctgcgcggcgtggatacggcggcgggacgatgacggctggccacccggcctctcccgcctcctcgtggcgttcgcccgcggggccacggcctcgtccccgccgctcgtcgacgtcctcgagttcgacgccaaggcatccgcactcgccgcctacgagtccgagcccctggtgagtgcttccctcgtgtgcaccctggaaggccggcgccggcctgatcgcgaactgagcttatgcgcgtgcgcttgctttgcttgtggttttgcaggcgagggtcaccgtgggcgaggacgcagcggacgcgccgcgcgcgatcgccgtgcaccctggcggccgggagctcgtttgtgcaaccgccaaaggctgcaggtggactgtgtttcctagttgattgatgctagaattctagtacgaatttttccttgtagatgctaactcgctgatgaactttgtcagtaacaaattaacaagttgctatagtacttcaaatttgcatatgccttggacattgttgggttcatttggttcgaatgggcaaaggattgaactgtcacctcatgcctgcctgcctgcatacatacctgaacttcactagtagttttactttcaaaaaaaacttcactagtagtttgaactttgaagttgttttcccctatgctaaattagacattcttcaggtttgtaatgcagaatgttttgaagagtgtatctagctgcatttcttgtaatatcagaaatagccctttgttttctatatgtggatcacttcttttcgttggctttattctttttcatactataaaataatccactatactattattctttctgttacttttgtagggtgtttaatcttgtttataaagacttcggtattcaccttatttcaagagatgcttcacctctccaatgtgttgggcctcaaaaatgtttagcattcagcactgatggtgctaagtttgctgttggtggtgaggtatgagctcattcttgtaattccatttttcaatttgaacttttttttttactgaattaacgatatgatatgagttccatttttatttgatgtattgatcatccatatggtgataattttcgaaataagttttgttcaagagttatgacatactttaaactgatgtacattttttttgttatatggtgtactaaaattttgaatgttacatctacaatttactagcctatttcacaatgacaggatgggcgtctcagaatatttcattggccaagtctcaatgtgattttggacgaacctaaagctcacaaatccttctgtgacatggacatcaggtaaaagaaatggggaagcatgcttatgttgctattacataaaaaatatccctatttcctgctgaattgatgcatgcattattaatttattacctcatgctttgtgttggctacttagatataggattctggtacaatgcacataataaaccttctagctgcctagtatcatggtagttttaatatagcttttgtcttaaaattccttgctcagaagagagggttactacacattggttacttttttgcaagccaaagagcctaaattcatttctttaaccttagatcctgacacagtgcttgtccccttctcatgtagcttagactcaaagtttttagtttcatcatccattgatggctctgcaagaatatggaacattgatgagggggctccactaatcaatttgacaagatctttggtacagtatgataatttgccgtaatagcctgtcatgatagttgaaactgaaatgttcgtctgatcttctctttccttctgtttatttacaggatgagaagattgagtattgccgcttttctagggatggagccaaacctttcctgttttgcacacttgtaaaaggtaatcctttgaatgaatttggagaagtgcaccagcagccagctatagttcagtttttgtctcttaaataggtcatgacgtttggactatggccgtggacataagtaattggaagagaatcggttacaaaagattttcagcaaagcccatttccacactcgcaattagcttggatgggaaatatcttgcactgtaagtggatgagatgccggctgttgcattgagtctgcaaatacatttctgtctagcgtttttcctttgctaggaacacctgtatttggaaattttgaaagtactcaaaatagttttatgttcctagaatttaagcaatttcttcatatttgtttgcatcaaaggcatcaaactgtccttgttgtatactttgctgagctgaaaacattatctgtgttattgtaaattttatgtatattatgataacagtggctgaaagtatctgtgtagctgtgtatttctgaaaatttacgaacatgcaaccatttgcagataaatagtggccacctaacctgaagcgcgtccaatcaactgaagaaagtattagctagtcaacacataatagttatgctactagcaggcttaacgaactgttattgaaatctcaaaatacctgctctgtttccttctttcaaaaaaggaacttatcctactagcgatcccagttacatgcctttaaaaatttacattaatattgtagtctgaatctgtcaatacttgacaaccagggtttgattttcctttttatgcgaggtgctattaatatggatataattttcaccctgttttcagaggaaatcgtgatggtgacttttgcgccgtggaaataaagaagatggaggttgctcactggagcaagaaggttcatcttggcttcccagtttcctccattgaattttgtcctactgaaaggtaacctttctctttgttgcaaaaaggaagagacaaactgataggttagcattactaagcagcttattacttactagtagatatatccaggagaccaggacagaagcgtcttgttgtgtagcacagggaagggaaccttgaaagagtagtcaatcctgcattccgacaggattcgtcattaggccctctgttgtcaaaatagaatgaaaagtagataataaataggctacgaactcacgaaatgggactactttgcatatccatccatgtccaccataaatacaccagggttttccaatgggacaagcaaaaatcagtcatccacatgaccacatccatctatccacagctactcaaactcaacatgtctggattttgcatgatcctcctccttgcactgttgatatgattcatgcactattatgatacttgataccgtcttctgatattgtagggtagtaatctccacctcacatcaatggggagcagagataacaaaacttgacgtccctcccgaatggaaaggtacacgtctgtctgtctgtctgtctgtctgtctgtctgtttggccgtgtctctgtaaacgggccttgctctatccacttgtgctgttgtgcagtgtggcagatctggctggtgctcctgagcctcttcgtgtcgtcggccatcctcttctacgtctttttcaagcacgcaaggatcaacctggggccatagaagtagaagacacctcgaatttctttctgatggcgaatctagaagcagggctgttgccgacacctgacagcgataatagcgccctcctgtccacccaccgcccaccgtcaggactcgtttctgaaggccgtcccaaacctccagccctgtgtctgcaacgtgttctgtacctgaacctgaaccgttcgaggtttcacatcttgtgttacagatagatagattattcgtgacctctcaataaggccttgtttagttgttggggtgaaaagtttttgggtttccgtttgtatttgacaattattgttcaatcatagactaactgagctcaaaagattcgtctcgcaaattacaaacaaattgtataattagttatttttcatctatatttaatgtttcatgcatgtgccgtaagatttgatgtgacgagaaatcttgaacaacttttggcttttgggtggaactaaacaaggcttaagtgaaggaaacacagtgcttttcta

SEQ ID NO: 3808 - DNA, 2830 bp, Sorghum bicolor
tagtactctcttagtccataaaagaatataattcttgttttttagaagtcaaacagtttaaactttgactaaatttatataaaaaagtattaacatgcatcatacaaaataagtaccattaaattatttatagaaaatatttttattataatttatttaaagacataaatgcttatattactataatattaattaaacatgagctagcttgactaatgtggattccataattatattctttcatggaagtagatcagggccttgtttagtttaaaaaatttttgcaaaatgaacaccgtaacacttttgtttgtatttgacaaatattgttcaattatatactaactaggttcaaaagatttgtctcacaaattacagataaactgtgtaattagttattttcttttatctatatttaatgctccatacatatgccacaaaattgatgcgatgaaaaatctgaaaatttttcaattttttcttttaaggccttgtttagttcccaaaaatttttaagattccccgtcatatcgaatcttgtggcatatgcatggtgcattaaatatacatgaaaataaaaactaattatacagtttatctgtaaatcgcgagatgaatcttttaagcctagttactttaaaatagataatatttgtcaaataaaaacgaaagttctacagtgccaaaaaactaaagtttttgcgaaccaaacaaggcctaagagcatctccaatggactttgcaaatgaattttgcatttagtgttgtttgcaaagtcccaaactcatttgcaaagtctaaaaatagtccaactccaagggactttgcatttagaattggcaaacctaaagtgtggaccccacctccgaattttttttttcaccgatcgcgtccgcgtgttttttctcttcgcgccattttgacgtacgtcgtgcgtgtcagtcgccgcccaagccaggtcgtcgcctagcctaggtcttcgcgccagtcgccgcccaacccaggccgcgttcgtcgttcgtcgccgtcgtcgttcgcgtcagttcggctccgtcctcctccgagggaaggtccacctccgttcccgcgccgtggccgcgtacgtcgtccagacgtggcagcgtacatcgttgttcgtggacgcgcgcgagtctcctggtcgcgccgccgccagttcggtgcatcgtcgtgaagacacagggacggcacagatggcatctaggtagggagggcgggcgcgcgcggcagggagggcggacgggcgtagagaaatcgcgtggggtgggggggcggggggacggagtccaacgtggaaggccgaaattgtagatgcaaagtggtgggaaggtttacatatatgcaaagcctcaacctctatctgcaaagttaaccaaattgaaaaccttatttgcaaaaccattggagagatattttctactctttttttgcaataggacaatgcaaagtttgtttgcaaagccgttggagatgctcaaactaaacaagacccgagcaaggatttggattccgatttctcactgcagatgggccctgcttgccacgtagcaccagtttccttgccaggaaagtaaggaaactgcgtggcgcccacgcgcgcccctgcaaacttccgagtccgaaccgcagtcagtcgcaaccgccgccgtcgccgcgccgcgccgacctccctcttctcctccccaggctacaaatacccacgcatcccttccccctaggcgcttgcttcgttccagccagccatcaatccaccgccaccgggagagaagaaaccaagaaactcgcgccgtgcttccatccagcgaccagcgtagcaagaaaaccgacatcctcgatcgcgcccgcgctctcggcaacgacgttcgatccctcggctccaccacctccagcttctccgcgccgcgcacgacccgctcgcccgttcttgggaggaatccaagttcccgctgcgcgcgccctgcttttgctcggcccgggaagcgatgaggaggaagggggcgccgatcggcagccggtacggccgcgtgtgcgaggagttgctggacatgggcgcccggatcgcggcgcgctcctactcgcactgcccccagacggggcgcatgtactacaagcccccctcggctccggcctccgccagcagcagcgggaacgacggggcctccgccggaggggccgacgcgtcgtccgtggcggcgaccagctggaagcaacaggcggcgcccgaggtggagttccacgcctcagagttcatcttgtacggcgacggcggcggtggcggtggcaagaaagaagcgacactctgttcgagatgaagagcaggttttgtcgtccgcatgatccgagtagtggttctttgattccttaattcggcgatacgtgaagtttttcctaactcgctcgattctgtggcgatggagttgagtattgaggttgaagagaactgatgttcttgctattgattttttttttgaatcaaatgttcttgattaattcaattgaaagagctattctgagagggcaatccgtgatttcatcatcgaatttttgctgggagtgcttttgaatttcagagattgtgttttgttatcatagtagtgctcgtttgcacgcttcatttctggattatgcctgagcgaaatagtatgttatgtgcatgtgcgtccatgagatttgatatacacgatggtaatacaaaattgtaatttctccgtagcaactccatgagttttagataaacagctacctaaactaacttcttcttcttctttgatgaaacgaaactaactcacatttagcgtaacacatgaacatc

SEQ ID NO: 3809 - DNA, 4575 bp, Sorghum bicolor
tgttatcgtggcaaatgttactctctctctctctctctctctctctctctctctctctctctcgtgcagcggttgtgtggtgcaggcatggcgttaggtagtgctttaggaagcgcaaactataggagtgcaaatctgagggggtgctcttgccattttgttgtgcaagtatattaggcacgtatggtaaaaatttggttcttatcaatgcattggcggacgcacgaggggggctggggtggctgcagcccccctcttgggctcaaattttttgtaacaggtttttttttatcaaaagacttcatgtatttggtatttttctatgcttatttaatgaatctttgccttttaacactttgaatcaatattgaattatcaatcttagctatatctattaggtcttatttagtttccaaaaatattttgcaaaatttctcggattccccatcacatcgaatcttgcggcacatgcatgaagcactaaatatagataaaagaaataactaattacataatttacctgtaatttgtgagacgaatcttttgaacatagttagtctatgatcggacaatatttatcaaatacaaacaaaaaatgctactattcctattttgcaaaaacaaattggaactaaacaagaccttagtgtactggattgagtgagaaaaaaaattaacctatattatttagcccccctcttgatccatttctcgatccgccattgtatcaatgtatatttttaaaacttttgcatgaatgtagccacactcagtatacttaatatagctctacccccactttgtgttgcattgggggggaggtcagcgtgtggcatgtcatgatggcatgccattttggctgaaattgccctcaacctcccaaaagtttttagaaattatcattctaatacttttaaccattttagggatcagttacatatcactgttcttttggttacacattaaaaagctagacatgcactctctattcaaaaaataataaggtgaatattccaaaaatatgtaacgtattttcacaacaaactttgatcaaagttaaataaatttaattaggacaaactaaaatactgtgtattttagaaggtggagtaggtaaagaaggttataattgattaaactatctgttcatttcttatcaaaattatggccttgcttagtttctaattttttttaagatttctcgtcatatcgaatctttggacgcatgcataaagcattaaatatagataaaaaataactaactatacaatttgtctataatttgtaagacgaatcttttgagcctagttaatctataattagactataaatactaaataaaaacgaaaatgcgacaatagccaaagccaaattttttcctcagttaaacaagacctatctctccggtagtgtatgttacgacgtcaagttgtagtgcttggacagctagcttttttttccccgatgacttaaacagttttttttttccgatgacttgaacagctattgtgggacatacattcacattgaatgtgaacaataatgaaatgcaaattccagtaaccacacaacgtccaattgttgacccgttcagaccctgagctggacaataggacaagatataaattcaacatgattattcaaagtcttcattgagtaagttgctacatttcaatcaactatcatttatttagcattttgtcagctctagtttacacccgtgatgattgaccagttttttttttataaaaacaaaacaaaaaagcaaagaagataacaaaaggcaagaagatagagtttgataactcagaatggacataatcagaagacatctgggccgtccaccttaccgacggccctgatcatcaccctcgttgactttgcaaaattttattccgatcgtgctccacctctcactcccaaatggaatatcatatactcaccagaattacttcctgctcaagtgaaggagaaggacccaatgagactgcctcctcacatatgctcttgctctccctgtttaagatcacacaaagatcttgcaaagactctttccaacgccaccaccattgctgcaattctcgcaacctttctacctctccactcaatcatagtcataacatagcacctggagaaatttcatgtgcaaatctaagattgattagtggttgcaatctcactgggtaattcaatcgaggctaccagtgtgctacctactagcactcggatttgccggcggtgcaagttttctgatgaaagccatggaggtagtggaggaagccaaccgggccgccgtggagagctgcaagaagctcgtcgccgtgctctcgctctccggtgccgacgcgttccggcctttgcccgtggccgcggagaccgacgaggcggtcgcccggttcggcaaggtggtcgccgtcctgagcgacaggctcggccatgccagagcaagggttgctggcaagaggagcccaccggcgcctcccgtcgatgcgagctgcctcttggagtaccacccgtcgctggcagtggcaccgcgacacactaccaacggcggccatctgctggtcagtgctacttctcctcctcctcctccgccgccgccgccgacgacgacgacgtcgctgcttgctagcatgacgatgcgaagcgctgcggagccgatgacgatgagaagccaaaaggcggaggtagtggcgccggcggtgctggtgtcgccaccttgtgccagcaacgtgacactgacgccggccccggccaagaagtttgacaggagcatgttcctcgagacgtcgctgctagagttaaacaactcttgcagcgtgcctccatcttcgtcgccggccatggcggtgcagaagagcagcccgaaagtcgccgcgcccaatccgtgcaccagcaccccccacatccagttgcagcccaccacccagttccagccaccgccacagcagcaggcggcgaagaagcagaagagcttccagttcgaccagacgccgagcggcgagcagttccacatcgaggtccctgtgccgctgccccgtggcgccgcccccgccgcgaaggaggtgatcagcttcagcttcgacaacaactcggtgtgcacgtcgtcggcggccacgtccttcttcacgtccatcagcagtcagctgatcagcatgtccgacgccgcgacgagctccgccgccaggcccgccacggcgaagaagatgtgcggcaagggagtggaggacggcggcggcggcgtcagatgccattgcccgaagaagaagtgagtggcagccatctgcattatccttgttgcaatgcaaggtggctaatggatgatgggaaatctgtgcatgcaggaagccgagggagaagagggtggtgagggtgccggcgatcagcgacaagaacgccgacatcccggcggacaactactcttggaggaagtatgggcagaaacccatcaaaggctctcctcacccaaggtgcgttgcatcttgagaccatttcgttctcttcacgccattgctttattagttataatgtccattaatctgccatgccatcttgtttgtgctactctctgctacactgccattctttgatcattattcagaaaaattgcagttttgtacgactgaaaaattctgaacgagagcaggagtactgatgaacatttgatatgcaggggatactacaggtgcagcagcaagaaggactgcccggcgaggaagcacgtggagcggtgccgcagcgacgccgccatgctgatcgtcacctacgagaacgaccacaaccacgcgcagccgctcgacccctccgtgctcaccgccgccaacgcggaaccttgagagcccatcggacggagacggagacggtgccggagtctctgccaacgtcgtgcaggagcgacgaattcttttcttatttccaaacaagatgtacagtggtgacaatttgattgcgtttcactgctcccgtttctccatgtcttctgtttagacgaaattcattcagatgaggcctctagtttaatttgtgcatgccaaagagtgtaatcctactagttgatgtttcactttcatccgccattcagaattcacgtgtcaccacctcgtttcggcatacctgtctgtctgatctttctgccgatcttctgtggatgcgaggcacgcgagtggctcgagaacaccaacgacgtcgccttctgaataattacagattcttcagttctaacagctcacacgagtgaaaattttaaattcacgaattccgagacgccagggtttccatcacggagcacgctcgatccatgattcagttccgaaacgatcgatccatcatgctgttggttcgtcgttgcagttgcagagcggacgacgcacgcgattctgttcagttattaagcaactgtcagttgctaatctggctggcactggcaagatcgttagggcattaaatgcgcccccacgatgagcggcgatgattagtggcgccaagcaatcaagcatgtgcgtgccctgcccccccgtgccgtggatcttactgacgctctaatcctgattttgttcaggagaggccgagctggcc

SEQ ID NO: 3810 - DNA, 3821 bp, Sorghum bicolor
aatgcaatgcaagcaacgcaggtcgtcgtcgcgggccgcccgcgagacgacggcgactagccggggcgtgtgcagtgcgccgtgcgtgcgggcgtgacaggctgacagcgagttcgaccattcgctgcggtgtgctacggcggcggcgcacctactggcaaccgaccgacccattatggccaccagatcgctgtgcggtgcgtggccacgcacagcgggatcggcggaggattgattatttgcatggatggcacggcaacgacgacacgagtggggggaggacagggacagccgggggatggatggatgcgtgcacgcgcgtgttggttccttgtcaagaggggacagaggcaccaaccggccgggcagcgatcgaaagcatgtctggtctggtccgctactccttccgctgccggtgcgctatgcaatgggttggcgtacgacgtcgttgcttcgggctagctagctgggcttgcttggtttggtgtatgctcatgtctatccccgcgacatgcatgcatgtgcggtgtgcgcgcgcgcgcgtgcgttgcatgatttctctttgcgtgcggttgcttggttggttggtgcatgctctcgccgtttgggcgttgggccatgccatgcattctgcgcatggccgtgtgtgcccgtgaatgcagccacccatggcagcagctacgacgctagcgcatattattcccccgtcgatcggcatctcgcatctctcgcgatcgactcgcgtagtggcgtggccgtatcgatccgtctattgctgcatgctcaggccgcgcgcgcgcgggcatatgggcgagatacgaggagcgatgctgctgcaacattgcttgcttgttgatgctgcttgtattttgtttatagttgatgatgatgatctgcttggttcttggggcggggaatatacgacgattttatttgttcctctcaaacacaatcagctggttctttcaaaaaaaaacacaatcagctggcgcacacgctgccggccggagtgtgtagtgtagtctaacgactacgcacgcaggagcgatccgcagctgaatcaaatgccactctttgggatctaataagtgcctcgttggaataaatcgtaccgaacggaaataaatatatacacttaaccttttttatcgttgtgctcagccttttcttttccaaatgcctgaagaacgtacaggcttaatttgctttcttcatcgtcgttttctgatccttctcatcagtcttctttttttccttcgttttcacttttttttccagagcttgtttgaacacgaacgtcgttactaacctgcacttctaatcaagaaacattagttacaacgtacgccagtctccagactggctcgctgcaactcttctgcatgagtgccgggaatctacagtaccactaccggcgcgacgctacctctcttcgcgtatgcatgagcagtatccatcgtcgtcgtttacgtccacggtaccgccgacgtggcccatgagctggctggcgcctgcatgcgatgcgatgcgcccacggcccacggccagccgcccccattcacccacgatccatccatccaagcgagaccagactggccgagccgcgacacgtgtgagccccgcacggtggcagcaggccagcagcagcggccatgccatgctctggcctggcccaccgacacccgggccccgcaccccacagccacatgcgcctgccgccccgaggcaacgagggcatcgcaaggaatctagcccccgacctgctggtccacctcccaggccccacctgtcggctgggccccggccgctcacccacccggcctccatgtcccctcctccgtgggacccacccgccataggtggctcggcgacgtgtcatggatggcacgagctgcggaggggcgcgcggcaggctagctagactagtgcacgcaactgctactactggcaagtggcaaccgcctctatatatgcgagcctccaaggcacgcaaccgaacgacgacgacgagcagtgcaagccaagcattcttctcacgctagctgttctctctgcttctttgccatcatctctctcggcgagttcgtcgtcgatcggtgttgcatatccacaccaccggcgagcaatttctttctgtgatcgaccgcgtcgtcggcgagcggccagctagcgcccagcagcatggagatgatcgacgcggagctgcgtcttggtccgcctgggagcaacagcgacgtcgtcgtcaccgtcgtgcagccgacgaggacgccggcgtcggcggcggcgaaacggcggccggagtcgtcggtggtgaagagcgaggcgtccgggacggacgaccatgacgacgcggcaccggcctccaagtaagtcgccagcacacatgcatgtcgtcctttattcgttagcagctatactataccagctatagctagcagctgagctgatgctgatgcttgtgaacgccgcagggtgcaggtggtggggtggccgccggtgagagcgtaccggaagaacgcgttccacgcggcggcggaggcgaggagggcgacaaagggcggcgagcagcaaggatctggcctgtacgtgaaggtgagcatggacggggcgccctacctccggaaggtcgacctgcggacctacggcggctaccgggagctgagagacgcgctggacacgctcttcggttgcttctcctcctctgccgccgccgacggcggctgccagttcgccatcgcctacgaggacaaggacggcgacctcatgctcgccggcgacgtgccctgggagtaagtgccaaccatctatccatccattaattagttggatcacgtacgggtccagtagtacaaggatcgatcggaggaacaacacctgacctttctgtggatttaattttgcaggatgttcatctgttcttgcaagaagctgaggatcatgagggggtccgaagcaagataagcaagcaacgaggatgcaagaacatgttggatgcatgcatggaggaccagcagatatatggtcgaacttatgcatgagagagagagagagagaagaagaagatctttatatcgatcattgggtacgcatggtgctctacaaacacgaaattgaaggcgttgggtcgtatacctgctgctgcatggggagggcgtggccaggcgccagcccatgcatgcatgcgtcgtcgtgttctacggccagccagcccggccggcccatacacacagcatggagatggaggtgcggttcaagaatcacggcggcgtacgcgtcacgccgccctgtcatcagatggaatggacggatgatgcggacagtgctgtggacgcctatatgcaaatagcatcaggaagagagctacctaggatttgtactgtgcacataagctgtagcttttcatttgtaattttgagttttcccttttgtatgtgacctgggtggatgtatattaattcattctagggggggtgcagttgcactggcgcaaaaataagaatgatgtgattattagagctaaattttgactatttattatacacttcatgtgttaaaaatcattgcaccaacaagacagtccggttagctccagtttcatctctggatctgagtgagcaagattgagaaaatgtatgaaggaaaagagggaaaatttcaaattcgacttcgaacttgtgtcaagatccttttccttttggtcgctcctgacactataaaagtcacaaagaaaataccactactagtatgggaactgttttgtccgacaaagctgctgcttttctcactgtctcttggtgtcttttccgtttccatggcacatc

SEQ ID NO: 3811 - DNA, 3123 bp, Sorghum bicolor
atgtcaaatgttaatcaggtaaaaaagatgttgatcttaatgttggcttaaagaagctataaatcatctttagtatctttctttttcttagataaaagaggatattgttcataaaatcaacggttcaaatcatattgattgtatctactggaattatagaatcatgagatataattaacttgagaaaaacacaacagaaagattattttatttctaattggacctttattaccttagttgaagagatttttttctctctgtaatctctagaattaggacaataatgtcaggtaggaatggatggagagcaatgtgaaacaacaatacaattgcttatttcgactgtgtagtttctgcttgtagacgtgcgctaagatttggggagaagttgaccaaacacaacaaccaaaaaggtctaacctgctcaactgccctggcacgacaacagggcacccaattcaacaagtttcgacctgccaagaacaggatcgtcactagtacaaatcataatagccacaaaaccactttcgatgtgaagacacgctcccaccagtcgtcagtcgaaatcgaagccagagacaatggtggcagcttatcatcacgtggccacgcgctgccttgccctgcccctggccttcatggcggccggggtcctggcgtggcagtgcgcggcgcagtccggcccgggctgcatgccggagctcgtcagcctgaacccgtgcatggactacatgtccggcaacgagacagcgccagacgggccgtgctgctcggccgtgtcgggcatgctgcgctccagcccgggctgcctctgcatggtggtcggcggcacggccgcgtcgctcggcgtcgccgtcgacgccgaccgcgcgctccggctgcccgcggcgtgcaaggtccaggccccgcctgccagccagtgcaacggtaagcgggcctgacaatcgagactttgagataacccgatcttggtagtttggcacgggcacggcggagaattgagaatggagaactaaaaatgttgcgcgcttttgcagccgtgggagttccagtgccgtctccggcggcggggacggcgtcgcccggggatccggcggcggcgacgccgtcggacgccaacgtcacgcctgcaggtacagcactaggcgtacatagttcatgctgtcttgacactgaagacttgagctctgaatttgtgacactgcagggtctggatcgaaggctacaccggcgtccacccttccatactctgacggaaacgatagcaaaccaggaacgttcttcgtcttcgccgtcgttgcactggcgctgctccatcgtttctaagatgcgacagcttcttgtgtttatcatggacggtcaacttgtacagttggggatgtttgccttgcccagagggacagaacactgtctgtgttgatgtgcacttgggcattttcagttagcgatcactctagctttttgttcacacgttaaagctcgatggaggacgtgatttgtagtgtctcaggaatgatgtcatggttatgatgtgtttggcggctaatcgaacaggtcaatcggatttacgtatttccgagaagtaaagaagtcacagtcaagttgaccgtttgacttgcctgtatctgtatgcagccacgagcctcacctcacaccttccttctcccagcttcctcgttccttcccacaagaaggcgataggctcataccacacgtgcgacaccaatttgcataagctaatctaatctacaccaagcttgccggtcaagattctccttctctctggtcaaagacagacgaagtttcatccactggaactgaaagtatatgaacagaggcgagtagttgcactgccgcatcgagaaatcagcagacctcaagaaaatagctcagcaatggacgccacggcgacgccaacaacccaagaagtcaccggcacggcgaaggtaaccgtggccgaggtgacgctccggaagttcgagctgtccgacgtggacgccatgatggcgtgggcgtcggacccgcaggtggccgccccgtgccggtgggacgcctacgagtcgacggagccgctgctggccttcattcgcgacaccgtgctcccgcacccgtggttccgcgccatctgcctcgagtccggctccggccgccccgtcggcgcggtgtccgtgtcgccgacgggggacccgtgccgcgccgagctgggctacgtgctggcgcgcgcgcactggggccggggcgtcgccacggccgccgtgaagcgcgcggtggccacggtgttcgccgaggtgcagggactggagcgcgtggaggcgctcgtcgacgtcgccaacccggcgtcgcagcgcgtgctggagaaggccgggttccgccgcgagggcgtgctgcggcggcactactggcacaagggacgcgccagggacatggtcatgtacagcttcctctccgacgacaccctccccgagtgatccccttcgccctttggcgggcgaatcgtccttgcatgcatcatctcgatcagctcagctgcaaatctctttcgcaatccttgttactacatacggaaaaaatatgtatcgatgcaatcatgtaaaagtggaccgtgctatcatgtgttttggctatgtttgggaccaaagattcgaagagttagctgtttggtatcacacgtggtgctctgcatctgctgctccgagaacacctgcttcgccgcttggcgagtagcgacacgaggaaagcctttcgacgccacgtacgtgtcgatgagcgtgatgccatcccaaatgcgataggtggaagggattgtccagagaacaaactctgatcaatcgaacacgtcactctgttcctaattcagataaactaagtgctggtgtggagcctacacactcatgcgatagtgtggctgaaagaatgaaagcagagacaggacgcagaagcctccactagtgagtagtgactgagcatcaccagtcaccaccaagcaaaagcaacgcgccggaccggaggctcagagatggagcaagaagcggctgcacaacaggggtccgtggccgcggtgacgctccgacggttcgagctcgccgacgtcgacgcgatgatggagtgggcgtcggaccacga

SEQ ID NO: 3812 - DNA, 3394 bp, Sorghum bicolor
aaagaaagatactaaagatgatttatagcttctttaagccaacattaagatcaacatcttttttacctgattaacatttgacatttgtaccataaaaaggttttgtcaacactttccccatatctgaatcctggctcgcccctattgatccacaagtacctggacaataaagacatggaatgacatgcgttaacattagccccatttggatcggtattgtacgttccatattgaaggaaaattacgctgtgtcactgaataagatctaaaggtttacatgccacatggtcagatggacacaatagagtatcatgtgttttatagttttatgtgttattaaatgttaatgtcgataagtacatatttttgaaggaggaaaacttaagcatctttttggtctgtatttccgcttttttgctctaaagtttcatgaaacagtgcattttatttgtatatctgatatctgatggttggcgtcaaacaatctttcaaaaaaaaagatgatgtcgtaaaaaaaaactattgtaacacaaaatttgcacgttgactgatgagcagaagcgggcaaaaaaataaaataaaattggtaacgcaaatctagcacgtctactgacgacgacaggtcacttgctaaggtcttgtttagatgcaaaaagttacgacaggtcacttgctaaggtcttgtttagatgcaaaaagtttttggattttgacactgtagcattttcgtttttatttgacaaacattgtctaattatgaagtaactagacttaaaagattcgttcgtgatttacaagtaaactgcacaattagttattctttttatctatatttaatactcaagattcgatgtgactgaaaatcttgtaaagttttagatttttggatgtatctaaacaaggcctaaagcgggtcacaactctgatcacaaagcaagagtgctctgagtggcagggacctacaagggaaaatcccgcatgctctatactgttaatagagaccatagcataagtccaaattttaataatttagatttggcaggggccgcgcgaacgcgtaccccctctaccacaaattatgacgtccactctcccgcttggggagatggtaagccagcgcgcctgccaaagtgcaatgcaggccactgacctaggccacgggctttcatgatcacccgtcgacctcgtccaggtaagtatggagcaacggggcacggggcgctcgtcttatagctgcagctcgcggcgcgtctgccttccgctggcgaggtggtgctaaactctcagaccaaaccgaaccaacgcgctatcccgctgagttctcgacttctcgtgggctcctaagacataaatacgtacatgggcctcaggtattgggccgacagggaatgtttagactgtgggctgcaattgatctgttcaacgtgcgcttggtttgacatgaaagtagttttcgaggctaacaagctttgttttcttctcttttctctaaaagataaaaggaaaaaaatcactcgctacaattagatttgtacatgattgttttgatttgcatcaccgcttatgcgtgtttctcttattgcatcttgattggtttgatttgcattattatttgcgtcgaaattttattagctgcacgtaagccggttaggaagcaccgccacccgatcgagctttctgggcttttgtgtgtcctgtgtttgttcaacttctcgccaaaaccttttcatgttttaataaatgtttttatttataaacttacttggtttgtagaaactccgcaggtagcacagcgtagttgcgtactgctctttgtttgttggtcaggtcacgaaccattcctacctcacctaatagaacagattaattttgatcacgagcaactggcatgggtcagcattttagctcagtttcgcgcaaccaacttgacccaatcttcagctaacacttcaaacactgtccgatatatatacaccgcgagagcacagtgcttgcagtttgatttgctttgctgcctcaaaaaaagtttccctccaaaaacctcgcgtcactttttctcacgctcctgactccagagggcgtccgtggtgcgtgccggatgatgagccggcgtgacaggatgcagccgccgccggcggtgaccgcggtgctgctgctgcttctgcttctggccgccgcgccggcgacggggcagattgcgacgtcgtgcacggcgtcgctgataacgacgttcacgccgtgcctcaacttcgtgacggggagcaccaacggcggcggctcgccgacgcagcagtgctgcggctcgctggctgagatggtgcgcacgggcgccgactgcgcctgcctcatcctcaccggcaacgtgcccttcagcctccccatcaaccgcacgctcgccatctccctccccaagctctgcagctccacctccgtcccgctccagtgccgaggttggtcggtcgccggctcgccgccgcaaactttatttatataccccgtctccgttaatgacgaagattaaccgctgaaaactgtcgttccgtcttggtaattttttgcagacacggcgacgcaaatcccagctccaggacctgtcgcgttcgctcccgcgctgcctccactgcgtaaggacctggccttctctgctcatgtcacgtcaggtttcttatctgaaactgaatctactgacaaacgtaatcgacacatttgcagcaccgattccaccggaatcgtcagactctccggtggatcctacggcgacgtctccggcggtggactcgccgcccttctcccagaggccagtggtgctgcccagctcgtcagttaggagttctcacgcgtccgtggcggctgtcaccattgtactgtcgatagtggcgaccattttcgtctgattgggatgtggtgttgtgtaggatgcatgctgccgcatgcgttgtgttgtgtggtttgagaaggaactgttacaagggtattagtatttccgggatttgagttggcttgtgatcataattttgtacagtatatcataaatagcacaatgagaaatcaaaacgaaatacttagtcaatgttatgccttagaacggacatatcgatccagccagagcaggcatgatcttcttccactcttccgcctgatttctcctttttatttaggacccattcaatacaactcaagaatagctctacgcctttatcggtggagctaaaactgttttgatgacccattaacaaaacaactctttataatagattttttaaatattcataatacttatctttttttgttctctcctcttatatttcttcttccatatctacttatggacacccctttgtgcagtcaggcgagcgccccttacttgcaaccatgctccgatgactcggcgctc

SEQ ID NO: 3813 - DNA, 9325 bp, Sorghum bicolor
aatctttgaacacgtacatggaatattaaatatacataaaaaaaataaactaattacacagtttggttgaaaatcacgagacgaatcttttaagcctagttactccatgattagccttaagtgttacagtaacccacatgtgctaatgatagattaattatgcttaatagatttgtcttgcagtttcctgacgagctatgtaatttgtttttttattagtttctaaaaacccctcccgacatccttccgacacatccgatgcgacacctaaaaaattttcgtcagcaatctaaacaaggccttgatggccgatcaaggaaggagccggaaggttagcagtgcgcgctggcgtcagcctgtttgtttagctaataaaaaaatatcactgaatgactgatcgactaataagcaaacagactttaaagatcgctatttaatttcttggcgcgctcacatcaccatcctagctagattcttagtatacctctagctcttgttaaggttactacatgcgcgtgcatcccggccgcgatcgagtgctgggtggggcaagacgatcgatgcatatatatagtgccggttgctatcgagttacaggagtggtactttgcttaacgacgtcttcatcgactatatttatatctttattatttgtcatcatgtgtttgctttgtttgtttgttaggagcactcacaatgcaagactctatcacagagtccaagacacttaattacatattatttatgatattttgctgatgtggcagcatatttattgaagaaagagatagaaaaaataagacttcaagtcttatttagactccaagtccacattattcaagataataaataactttagactctatgctagagtctcgagtctcgacgcaatatgccgtagctactaaccagaaaactccagcagaaagcaatggcttcttccagccggcggttgatcattcacccgacgaacaaggaggaaacagataatatatatagtcgctctcgccttgatggatcatatcgaatattttgacttcgcgagcaactaggcggccgggtccgggtgccatccatgcatacatgcacatgacgtgccacggagaactcaggttgtagccggcatgccgaaattgttgttagcaaaccatccgtgccagtgtggcgctgtggcctagctctgcctgccggctgttcacctgttgcatttcgaggaatccttcattagtggttgtgaatgactgactttttcaatcctttcgaccttggttccgtaggagcaagtcagaaaggttgagaaatagaccaatgaattatgaattttccataacttaaaacttaaacttaggtaagtgctttaccaacattatgtagtgtagtaaaaaaaatggaatttaaccccttcatgcttactataactagttatttcggttttctactggctgctttaactataaccccagctctatttattggcttcgcctctgaccatcaaattaaatgtgaataacccgtcctcctctctttgaaacaaggggcgcttgtacacacactagtacacggcgacacctgccccgtgcagagagtcctctcgccacccaattccgaacacacgaatccatgtggccatatgtatctctgcttgtacaaattaagctggaagctgacaaggctgtggtaccagttaataaccagtgccactatagaccacacactatagtggcactggttaactcgtacccacgactaccacagctaccagaatagagttctgtacatgtgcgtgcatgaccggtggatacggtatccatcacacgtactgatatatactagtgtcctagacctgcacagtgcgtagccagagacgacttagaggcccctccaggctcgcgccgatcgctttccaccgcccggcgtcagcgcgtgcatcacccacacgaccccggcgagcgctggatcacccgccgctccgtgtataatagcagacgataggcgggctcgtgccggctgtgactgtgagtgcctcctccggctctctcggtgcagtcgtcgtccgggagtggggcgcgaggtggccggagtggagctaggcaactcgagctagtcgtcaagaagaaggctgctggagatggggaaggcggcggcggcggtggtgctggccgtgaacggcaagcggtacgaggccgccggcgcggacccgtcgacgacgctgctggagttcctgcgcacacagacgcccgtcaggggccccaagctcggctgcggcgaaggtacgtgcccgccgtcaccatgcgcatgcatccttgtatatgggttaattcgcagctgagctcctagcttggttgctagagaatcttcatctgaacatcacgacaacacgcacgatcgaacggtagcacgtagctacttgaaagcgatttcctaaccgagtttttggtggtggtgaaggtatactaagcatgtccatacatgagagttcatttcctagcctctgtgtgtcttcgtagtagtagagaataggtggagagggaattctcgcacacgtacgtgtaggcttcaccgtatttttcaccagcaccagatttagcttcctggttcttctcatgcatgggtcccttgcgtccctgttcttcctggcttggctgccttcgattttctcgttttcatccccagttttcttgggacgtcagagccgtctcacggcggacgtgccaagaagctgagagccatagaaagccacgggacatcccagtgcaaattcatacaattctctctctgataggataaaattcagtaacagcaacaacaacaacgagatcacagtgttcgccagaaaagaccgagaatccaagacgaccaagaactgaagagcttcccagtcccaggcatctagcttgctatctttgccaaaacacccaagaacagacaaagaaactaaacatacagtcacagaccacactctgttttcggcaggcaactgctaatccaatccctgctcttcaggtcttcgtcatatatatcatcagaattcagcacacaccagaaaaagcaggaaaagttgctacgaaccactttctaggctgtaggatagggccaaacctttttttcttgccccttcgttttctgtagatcaagtacagtacgcaagatcttgaaatgtcaggctcaattgtttattgcgacgctccaccacaaattggcacctttacaccctgcatcaggaacagtagctgcagggtgtgcgctttgcacaaaacagttgtgccaaccttaatcaacttgcattcttttatgtcgaactaatgatgcacaaattttctgcgtgcttaggggaaaagggaaactaacctctttgccgtttttgcaattttaccgttgtgacaggtggctgtggtgcatgtgttgtcctcgtctccaagtacgacccgttcaccgacgaggtgaccgagttctcagcgagctcctgcctgacgctgctccatagcgtggaccgctgctcggtgaccaccagtgagggcattggcaacaccaaggatggttaccaccctgtgcagcagcgcctctccggcttccatgcctcccagtgcggcttctgcacgcctggcatgtgcatgtccatcttctctgcgcttgtcaaagccgataaggcagctgatcgaccagccccgcctgacggcttctccaagctcacttcctcggaggcggagaaggctgtctccggcaacctgtgccggtgcactgggtacaggcccatcgtcgacgcttgcaagagcttcgcagccgatgttgatcttgaggacctgggcctcaactgcttctggaagaagggtgatgagcctgcagatgtcagcaaactgccaggttacaacagtggtgccgtctgcactttccctgagtttctcaaatctgagataaagtcctcgattgagcaggttaacagtgctgcagttcctgtttctgacgatggctggtaccgtcctaagagcattgacgagcttcacagactgtttcaatctgactcattcgatgaaaattctgtgaagatagtagcttcaaacactgggtctggggtgtataaggatcaagacctttatgacaagtacattgacatcaaagagatcccagagctttcagtcatcaacagaagcagcaagggggttgagcttggatcagttgtctccatctctaaagcaattgaggtgctatcagatggaaatgtggttttcaaaaagattgcagatcacctgaccaaagtggcctctccatttgttcggaacacagcaaccataggtggaaacatcattatggcgcaacgattgcaatttccatccgacattgtgactgtactactagctgcaagtacaacagtcactatccaggtggcttccaaaacgcattgcctcgccttggaggaattcttgcagcagcctccatgtgattctaggaccctgctgctgagcatatttatccccgattggagttcagatggcatcacctttgagaccttccgagcagcacctcgtccacttggcaatgctgtctcatatgtcaattcagctttcttggcaaggacttcagtggatgcaggatcaagggaccatctcattgaggatatatgtctggcgttcggtgcgtatggagctgatcatgctattagagctaggaaggttgaggattacctgaagggcaaaacagtgagctcgtctgttatacttgaagctgttcggttgcttaaagggactgttaaaccatcagaaggaacaacacatcctgagtatagaatcagcttggctgtcagtttcttgtttaccttcctatcttcccttggcaacagcttgaatgaatcagaaaaggttaatggtcccaatgggttatatagtaatggagccacaaatggtgccatccagcactcattggagaagcatcttaagtttgacagcaatgatttgccaatacgatcgagacaagaaatgtttttgactgatgagtacaagccagttggcaagccaattaagaaagcaggggcagagatccaagcttcaggtatacaatcttatttccaatacacaaataaacatgttcataagatcatcataacttttttcttcagcatactccacaaagaaaccaaataatggtcctgtacatttctgccacactaattttagtcatcgctgaactgtccaataagcatcaccccaaaacatttttagtgcctgcagtttcttcgcaagaccccttaaccatattccttttactgacacaggggaagctgtgtacgttgatgatatccctgctcccaaagattgcctctatggagcatttatctatagcacccaccctcatgcccatgtaaaggctatcaactttaaatcatctttggcttcacagaaggtcattaccgttatcaccgcaaaggatattccaagcggtggacaaaatattggttcaagcttcccagggatgggagaagaagcactttttgcagatccagttgctgaatttgctggtcaaaatattggtgtcgtggtaatgtttccttactgcatcatgttgatttttccttgctggtcacaaaatcatttatatgtttatgtctatccaaccttactgcatcatgttgattttacaatcaatcagattgctgaaacacagaagtatgcctacatggcagcaaagcaagccgttattgagtatagcacagaaaatctgcagccaccaattctgacaatagaagatgcaatccaacgaaacagctacttccaaacccccccatttttagctcctacgccagttggtgattacaaccaagggatgtctgaagctgatcacaagattctatcagcggaggtacatactttgtaatgtttaaagaggatgtatacttgactttcccacaaaggcaaacaactcatgcttggcatttttgtttctgcaggtaaaactggaatcccaatattatttctacatggagacacaagtggcgctagctattcctgatgaagataactgcataaccatctattgttcaacacaaattcctgaggtcacgcaaaatgtggttgcaaagtgccttggcattccatttcacaatgtccgcctcatcaccagaagagttggaggaggctttggtggaaaggcaatgaaagcaatacatgtaagtcctaaataactagagcttattctgaacttttctattttcagttaccaatgtacatcaaactaatattcacaatgttgagaaaaaatgtgttacagatgactgaatttcctctgtcaggttgcatgtgcatgtgcggttgccgcattcaagctacagcgtccagttcggatgtaccttgatcgcaagacagacatgataatggcaggcggtcgacatcctatgaaggtgaagtactctgttgggttcaagtcagatggcaagatcacagccttgcacattgatcttgggatcaatgctggaatatcgcctgatgtgagcccaatgatgccacttgctatcataggttctctcaaaaagtacaactggggcaatcttgcatttgacaccaaggtctgcaaaacaaatgtctcatcaaaatcagcaatgagggggcctggagatgtgcagggctctttcatcgctgaagccatcattgagcatgttgcctcggcactttcagttgacactaacaccataaggaggaagaaccttcatgacttcgagagccttgtggtgttctacggagataccgcaggtgaagcttctacctacagcctagttaccatgtttgataagctggcctcctctccagaataccagcgccgagctgaaatggtggagcacttcaatagaagcaacaagtggaagaagcgtggcatttcttgtgtgccaattacatatgaggttaggcttcggccaactccaggcaaggtgtctatcatgaatgatggttccattgctgttgaggtcggaggggttgagataggccaagggttgtggacaaaagtgcagcagatgacagcatttggattgggagagctgtgtcctgacggtggtgaaagcctactagacaaggttcgcgtcattcaggccgatacattgagcatgatccagggagggttcaccggtgggagcaccacttctgaaactagctgtgaagcggttcgacagtcatgtgttgcactagtcgagagactaaagccaatcaaggagaatctggaggctaaggctggcacagtggaatggagtgccttgattgctcaggcgaggataagcttgtaaattctaattttctcacaaccatgccaacaaaacaaaaattttaaattcttgtctccttcctttgagacattaacaaacgacaagcaatagcagtagcaatttagtgattctgaggaacacaatatttttcagtatttcaattggtcatgtcattttgtcactcatttgcaggcaagtatggcgagtgtgaacttatcagcacatgcatactggacccctgatccaactttcacaagctatttgaactacggagctggcattagtgaggtaccccttatccaaattgcatgaaaagcacaacaagcgcagttagcaagccaaattgttggaggctgcagcttcagtcctgcgaatgctgacacatgattggaaatttcatcacaggtggaaattgatgtcctgacaggagccacaacaattctaaggagtgaccttgtctacgattgcgggcaaagcttgaaccctgctgtcgatttgggccaggtcagccccaaaataaaaagtgcacctgctgatcacttcaaaagaaatatgctgctcctctaaacattatccatcattaacacaggtggaaggtgcattcatccaaggagtaggcttcttcacaaacgaggactacgcaaccaactctgacgggttggttatccacgatggtacatggacatacaagatccccacggtcgacaccatcccaaagcagttcaatgttgagctgatcaacagcgcccatgaccagaagcgtgtcctctcttccaaaggtgatccctttctcataattcaatccctcacacattaccacagattgtgttagctgcaatttgaactcaccgacaattgctgcctgcaactgtgacataatgtgcttcggatctttgtttgcagcatcgggcgagcctccgcttcttctagcttcctcagttcactgtgcaatgagggaggccatcagggccgccaggaaggaattctcggtttgcactggtccagcaaactccaccatcacgttccagatggacgtgccggcgacgatgcctatcatcaaggagctctgcggcctggatgtcgtcgagaggtacctggagagcatgtccgctgccagcccaacagccactgctcaagcatagatccagcaggcacactgcctatgatgagagggcttaatcagtctatgtaaaattctaaagaacagcatgacatgccgagcttgtctgtgttagctctgatgtacagaagaagaggtagcaatgaagagctgtggtctttgcgaatcaggagtcgtgaacaatagaggaaaaaaaataaaataaataagtgtcggacaggcgaatgtgtggatgaaatcatgtggtttcgactagattttgaagaaatcttgcaatggatctttgtttgtactcctaggtgcatacctgccttctgggcacatgagggataggattgtaccagccagctaggtttggccttgctgcctcgttgcgaccttcactggtagctactccctgtgtgcctatttgaagtagcagagcggcggaaaagctgagatcagactgcttgatttcacgggatgtgtagttgtgtgttcctgcccatgacggacgaatgctgatgctgtgagggggttgccggcttgctgctgccattgggttgggccctgtgattggtctaatagttcattgctagggacatccatgacggacaaatgctgatgctgtgagggggttgccggcttgctgctgccattgggttgggccctgtgattggtctaatagttcattgctagggacatccatgacggacgaatgctgatgctgtgagggggttgccggcttgctgctgccattgggttgggccctgtgattggtctaatagttcattgctagggacatatgcacctattagctgggaatccaaacatatacatgctaatatttacctggaaattgtctaatcttttttctctccttttctgtttcataagatgttgtaagaccccgggtcctcttttgttctaataaattctagtagggggcaacccctcctgttctcctaaagaaaaagttagtt

SEQ ID NO: 3814 - DNA, 2971 bp, Sorghum bicolor
atgtacaggcaaggttgcctagtgagaaaccaaaacatgcataggttgctacagatctcgaaacttgcaatccttccggacatgcatcctagccctagatatccgaaattagacacctaggttggctgctgctaaacagccaaacaagcttgcttggagagactagactgaaaaactaataaacatgctctctatgtggtatggatcttcttgatctcgatgtcccctctccaaatgccaccgtccttcattctgtgccgaactgccggtgacccaaactctatagtttccttctcatttgtattgttatcatgtattgtatatggctaaactttggttgtccactcaacaagctttgttgtcatggtcttggtatggctataataagattatataagttggatcatgaaacaaaaagtattcaatccgtagtgatttttcttaattattacattagcacaaacaagcaagaaacaatatttactcactcataaaaaaattgataatattcactcgcggtaaacaggaacaagtaggaaataaaaagtttggcattttgcaatatcgtgaggactttctcttcttgtctgtcctggtcagcagagcacatgcacatgtgtctaagcaacaaaaatgggtcagttttgcagaattttaaaaaaaagcacatgcacatgtgtctaagcaataaaaaatgagccagttttgcagaaattaaaaggcaaataaaaatgacaataaaatagaaattaaaaagcaaataaaaatgacaataaaatggagatgcggggtatcgatccccgtacctctcgcatgctaagcgagcgctctaccatctgagctacatcccctcagtgaaacttttgtgattttttcgatatttgtaacttcatatgcacaatgtccaaacagtctccgtgtgtcaagccagaagatcccaaccaacgtctcagcctctcaggcggatggagatacagtggtctggtcctcctgctggcagcagcagtcctcgtagctgtgcttgtaaatgtaaatgtgcaatacaattgctattttgaatccttcgtggtagcttcttctgtcatggaataaaaccatgtgtccatgtgtacatagccttgggctgacaccttatctgtcagcgctcaacagtgttttcctcttgtaataatattttcttataataaatcagcgaacagtatttttaagcataatttatcatccaagcgaacagattgcacctactctgtgtcctgtaatgcaaatagtgggggccgtgtccctgcgacatcaaccagccatgcttcccgctgcgccgcacttgaccgccacgccaacccttgctgggtcccagcgctcaactccggtgccccagtcgacgtggcagcgtcaatgtgtccgtgagcctacttgatggcaaagaaacaaagccgtggagcggaagagagcctcatgagagacctctggagctggagggaggctatggagcttgagctcaacaaaacgagaggttcccaccgggtctgtttatttctctaaaaagttatggctaaaagttcgctgatttattatgagagaaaaacactactaaacgaccttgcacaattttttcatcctttctgcaatcagtttgtgtctgcaaagcacgatcatcccccggtgacctaaacgcagaaattttagccacacggcgagcaacaatccgcctcgatctatctatcgctgcaactaatctttcttgtcctgtcctgccattctgatcaccaacttggggctaatcttcaacttgcgctgccacacaccgatccggccaccaaccaatctaatcgcatcttccctccctaatcaccaggctataaatcgcgacgcgtttgacccctgctcttcgcaacacagcaacgatcgaccagagtgcaggtgcagcaagccgtctccagagacagcctactatactgctagcacactagcacagcatggtttccgctgcgaacttcctggccatggttgtgacctgcgcactcctcatgaccagccgcgacacctgccacgcggcgcgccacttggccgacacgaccgccgcggccgcggctcccgctgctgctgctgctgccgtcccgggcctccccgccgtgccgaccatgccacaggcggcgctgccacccatgccggccgtgcccgcagtcaccgttccacaggtgacgctgccacccatgccaccggctcccaaggtgaccgtgccgcaggtgacgttgccgcccattccggcagctcccaaggtgaccgtgccgccgcaggtggcgctgccgccaatccccgccgtcccttcgtccgtgctgcccaagctgaccctgccaccgatgcccgccgccgtcgttccgtccgtcggccccaaggtggccttgccgccgatgccgtctgtcccagccgtgaacgtgcccatgccgttcgcggcgccgccaccgtcggcgtagacgcgcgcgctcctgcagttttgcgttcgccgtgtccaccatgcattggtggtggtgagtggtgtacgtacgtcatcgtttgtgcatcctgtttgtaccgtgtgtagtgtgcacgtgcgtcgcgtgctctcttttcgtgcgtagcgttgtaccattgtccattgtacgtatttatgtacatcctttgtatttctgccacattcatttacgccgtatatgtctgctcaacaccccccccccccttcttatgttcaaattcaaatctgaacttcgaaacatccactgcatatctgaaaattcgacgtactctaaaatttatatgcacctcacatacagttctttttatttgcctacaaaaatttgatccatttgttttctgaaatgaacaatttgtattcaaacttataattctatgcacctcagtaccggattcatgtgtatcagtttttatatatcggtcacaagtaaattgaccttttttcatttggtaacaaagttaa

SEQ ID NO: 3815 - DNA, 2971 bp, Sorghum bicolor; identical to SEQ ID NO: 3814

SEQ ID NO: 3816 - DNA, 4990 bp, Sorghum bicolor
tatttttttttcatgagaagccgtataggacacgtggataggccgatttcctgcctagcttcgccggcttaataagagtaaattgtcaattcattttagaaccaaaataaaacttaagatatatgagaacacaatcacattaccaataaacatccagttttagatagtgcaataaaaatatatatatatatatatatatatatatatatatatatatatatatatatatatatataatcattggtccaaggcaaaatagtcattttgatagtttaaggatattactaagctcaaaaattaagggcatgtttgatacaactcacaggtagcttcatgagctgttgtgagctgtttttttttgccaaacacttatttccaaaacagttttatgggtgaagctgttttccccctcctctcacaaagacataagttggatgaagctgaaaaaagtagcttattgcagcttctccctcatttctctctctcaactatgcatgaagtagttggtgaagctattttgccaaacactttttccaaaacagctcagcttcatctagaaagtcactcataaagctattttctaaaaaaacagcttcactagtgaagttgagctgtgccaaacaagccctaagtatgaggatgaaactatcattttgatggtcctagtgaaaccgagcccctcatatttaaaatattttaaggattgaagcatctgtttttaaagtttatgggtgaaacttggggatgtaagcgggcttgtctgtaggctcacaaagagacttatctaaatcatctttaatttaaacctgtaaaaaaacgtctattggggactcaagaacaagcctaattacatccctagcgaaactaagcaacaaaccagtttaaggaatcaaaatgagtattttgcctttaaccagaaatccagaaatggactaacctaacctaacccagaaaagagaggattaatgagtttcgagtatgaatcttatgaaaaacgataagacggctttaaaacaagttcagagtcgatgctcctgaaaaatgataaggcggctttaaaataacccgcgtgaacttttgatttttttttttaaatttacgaatcaactttgaccttgtttagttcgtgagaaattttataatttttttaaaattttttatcacatcaaattttatgtacgtaagaaacattaaatatgaattaaaaaataattaattacgagatgaatcttttgaaattagttaatgtatgattaaacaatatttatcaaatacaaatgaaggtgttatattgtctattttatattttttacaactaaacaaggcctttgacgcgcgctaataatttggccgatctgcaaatcacgagacgctgacaagtgataaagacaggaaatatctctggtgggcacgcttcccttgtgcttagggcttgtttagatgcaaaatttttttgaattttgacactgtagcattttcgtttttatttgacaaacattttccaattatagagtaactaggcttaaaagatttgtctcgcgatttacagacaaactatgtaattagtttttatttttatctatatttaatactccatgcatgtgaggcaagattcgatgtgatgggaaatcttgtaaagttttgggtttttgtgtagctaaacaagccctagcagcagcaataatactatacgagcgggcccgccacgatcatacttccctatggacccacccgcaagtgaccgactacgcaacaacgagtgggtacgcatagcaggttccttgtccaggggtccacagtggcagtggcagagctacggcggcgcaacggccacttcggtggtgggaactccaagggtgggcccacaagccagtgacccaccagccgaaccgcattcacacgacccgcccggccgctccggccccggccttcctcctcccggagttgagaatcaattcttgctagtacgatttctcctctccccaagtggccaaagccaccaaccacgaccagcccctttttctcttctatttcatccacgctgctcgtgctcggctgctcgctgcctgcttctagcgatcgtctcgggactccagagtgccggccggctctccgcctgttcgtatcgtcgctgctcctttccccggtacagtctctggctttggtagttcaagcggcgatgtggaatcttaagggatcgcttctttttctagtgaaagatggagttaggggactttactgtagggggaaaaaaaggaggcgcggtccctgagtttgggttagtttgcttctgtggaatttttgcatctccttgttttttctttcgggggactttaggtagttttgggcatggtgcgaatgtgcgatgaatcttggggttttactatgaaaccaagagatggagaactcaccgaggagttcttggcctgattttctcgtggctggagaaatatattatcttgcctggtttctttggtgaggaaccgccatattggccagtgttggtcttttaagtgctctgatgatagaaggacgctgtttcggttaatgcttatctactgaaaatgttactgtcaatgattcctttttttttgttgttgttggaggttggattttaaacatctattgcagcaactgaattcaacagacagtgttgctaaattatgtgtttcacggcttcagtagataatccagttgtattatgttattgtcaagattcaggaaggtgtacaactatttcattcaatcgattttagaactggggctactgggctactggtagaaaatgtctgaatatctagttccatttacttctttcagccaagtacattggtctagcattttcttaaattcatatgattgatcctgttcaactggcgtttcttctcatgtgcccctaagccccttatggctgtagtctgtttgttgatttgttctttctttttccatgtttaggatgtgatggaccatattgtctaacttaccttcatatgttccagtgagtttaaaatatacacagtacaggatgtcggaacgttctgagagtgcaactgaaaagattatgagcagcatcatggataccattgctgacaaccttcctaagcagaagtctgggcactttgacccaggttcagtctctgacaaagtgaagaacaagctgtttggtcgtcagaagaccttacatggagttctgggtggtggaaaacgtaggcggtctgcttatcggtatatactgtatgttgagatttgcttggtgggcgtcactgatgtggttctatctgtgattgtagctgctgatgtgctgttatggaggaacaagaagatatcatcgagtgttctggctcttgcaacagctatttgggttttctttgagtggcttgactaccactttctgacaattgtttcgtttgcccttgttcttggaatggttgtccagtttatctggtccaacttctcaaacatgctaagcgggtatgaaatatgtaaaacatttgagcagtatctccgctgacacaataatttgaaatttctttctacttctagatctccttctcaggtgccccgagttgaattgcctgaagagttatttgtgaacattgccattgcaatcggtgcccaagtaaacaagttcatgtgcttccttcaggatgtgtcttgtgaaagaaacttgaagcattttgtagtggtaagtgaactttttctgggtttatctatttattcaaatagatatggttgacacatttatgatattgttgaatgccatttataagcattcctattctatctgtctgtcttagacaggtattttaattgtggtgctatgttttctgtcaggcgattgccggactgtgggccgctgcagtgattggaagttggtgcaatttcctgacagtcatatatattggtaagaggcctgtaacttctattcttgtcagccaccatttcgcattttcgtcaattaccacagagaaacaatacctgttcctatttaatgaatgcgcacatttcagcatgtgtggtagtactgacaaagatgttggattgcctggaacagggtttgtttgtgttcacacacttcctgtgctctatgagaagtatgaagaccaagtcgatgatttcctctacaaccttcttggtctgctgcgagatcagtatcagaagcttgaccaaggcgtcttgagcaagattccgaaggggaacatgaaggctaagaagaacgagtagtttagcagctggtttctctgaatgaatgaatgggttggtgaactgatgttgcgccctcttgtgcatcgcagacttgcgccaattgttgcttaagctgtgtcccattctgaacatgggtgttagttcattgcccactgggtttaaaaactattaagctgcaatgaatgttgtccactattgaagttcttcgactcaattcacatttctgatctgatcacttatgggatattgacacactgctcaagtaatgaagtgtgcccataaccataactcatgtctgaaaactggaagttgccgggagcatctttcttctgtttctagagagtgtgtgccatttcaggctcaatctgcaaggataagtcctggcaaatgtgtctgactcttatattccttgttttgcaattccattagtttgataatgtttacactttacaaagttaaaactttgctcctgtgaccttgaagaactacataatgactgtacatactgaactgccatggtgtctgaaaaagagaaatacctgacagaggaattgtgaattcatatgcaatggcgggtgtggaactttggatggcagaagacattaagcatgagtggatttaattatctccggagagttgatctgcatttgattatgaattctgaatgctagagcaagtagtttaaacttaggtgatatagatgctgcacgcgtccgacgtgcaggagcagtcaaaaccggaatgcaggtcaccacgatccaaccaaactgctctccaaccatgc

SEQ ID NO: 3817 - DNA, 5714 bp, Sorghum bicolor
atgacgggggactcagatgttcgtccgagacggtggtggtggtggtgtcgtccgagggcaccggcgaggggcgctcctccgatgccatctgctgctgctgcggcggcggctggctaggttttaggaagaagtggtttcaggttttgtttgggattaaacggtggatctcgcaaccaatcagttctcctcgccgggatatttaacttttgcccttttatttaaggtatggctttctttttctgaaaaaaaattactacaactgaatttgtgtataactactgaaaaattatgtgaaacatctttttacaaattccaaaccaaagacgctaagcaaaaagttaaattgtgtatatccctttcttcttctttgtaaagatgggtgcaccatcgcataatatatctttgtcacgtttgcacgcacgatcgccatattaccattcgcacgcctctatggttgcctcaccaccatgggaactgtcgatgtccacacgtgacgatgagccgcctaagcgctaaactattgtagtccaccaagtacgcgttgcattgaccaaatggcccatatcgaggaccgcgacctctatcacactcatgacgttccgtcagaccaccatctatcgaaggccacggtagaatctatatatagcatcgtcgatggcaacttccacctcgccaccgaagcacactatagccatcagcgtcaagcgtcacctatctcaccattgtgtccaactcgttgtcgtggcccctagctgcacacacgcgtggatgagctcattccacgatgttgtgccttgctactgcaatcgctatgaaagtgagctatcttatcatggtcgtggcctccacgtgtaacgagctcaaaaagcataaggatgaccaatgataacgacagtgtctaaatccacgacattaaacagatgcatggattagtttaagcatgtcgctagaataggtgccattgagccccattgtctcggcctcggctcctcgatgactctggttacgatgatgtgctattcaacgccactaatcgtgtgcttgcctttcaaagtgccaacaagcaaataaatgtcaaatctcaccacatgtgtttcgactctaagtctagtttatcctaagttagcgtgcccctcaccttcaatgtgcttatggcatgttagatttgccatgcttttaacttttgcttgatatgaatcagataaagtaattgaaaatttgaacaatggagaaatgcatgcactaaacaagaaaggatagggatatcttggacttcgactttttcatctagactagctcgtatgtctagcctgtaaaaaaattagtaaaaactaagtaaaaagttttttcctcactgatgatacaaatatagatgccattttaatactttgttctggtaagtaaaaagttgttttggacagcgacacgatctccaaaacataactttgacttttaatttttataaaaatatttgttagaaagtcaaagtacattttaagacaaatttactcatatgatttttatatttttaaattcaacaacttaaaaattatttataatttatattcttctaaatcttgtgcaaaccaacctggagggagcagtgtttttgaagaaccttgttcctaataacggaaaaaaaaagttaaatactctctccgtcccaaattttaagtcatttcaagaatcttggagagtcaaagtttttcaagtttgaccaaatttatatagcaaaataataacatttttgataccaaccaagtatcattagattctttattagttatattttcatagtgtatctattttatgacataaatatttatatttctctctatattttttgtcaaacttaaaaatattttgactcttgaaaatttttagaatgacttataatttgcaacggagggagtatctcgcacgtgcgttttgaaagccctcacgcgccgctcacgtgccatccatctatccatctcgcacctctctcgtctctgacaaccgtacgccccaccgtgttccggcgccgctcacgaactcctcccggcgctgcccatgacgacagtgtcgcgcgcgctcggctcagcgttcgcgggcttcacgcgggcacccgcggcggcgcagactgcgacgaccctgccctccccgtgcggctcgtcggcgctactccagcactggcgctggagccgggctagccgcgcccggcggttctcgtccggccgctcggcacggataagcatgagcctccgcgccggcatcgtcgggcttcccaacgtcggcaagtccactctcttcaacgccattgtgagtaactaagcttgtttgtttcgctgcttcctgttcctgggaggaattcgtgttgtcaagaactcgtaataaccggggagtctagaatgtttaggctcttttcttctctctctatatattcttctggattcgttcattagctcggtatagggtggaactgtagcgtgtatgttgggtggatgtcggtggacgccaactgttcgacgttttgccacatagacattcttgtggaacggctgacactgtaggtttgtataatttgtaagtcaataaagttcacaaaatatcatgttcttttgtgttgttccgctgctgcacaagttgccctctggagtctggacttgttgcagtaaaatgtttcaaatggagaaatgtatgtgatatacataggacacgttcttcccaggaataatttaatgttaatctttctcaactttttttccaggttgaaaacggaaaggcacaagctgcaaactttcccttttgcaccatcaacccaaatgttggtgtggtggctatccctgatcctcgtttgcaggtgctctcaaaattaagcaagtcacagcagacggtcccaacatccattgagcttgtggacattgcaggtctcgtcaaaggagcaagcaaaggagaggtacaagttttgtcattgtcttcaattaacctgcaggatagctccaactctgctgagcaaagttgagatggtttcagattagtttatacatagtggtattattgttgacaattgacaacagggactaggaaatcaattcctttcaaacatccgtgaagtggattccatacttcaggttggtgtcttgtacttgtatgcttcgtaagctctcatatatttgccaagttctagtgtctgtcaattactgtgtgccatcctgctagcatctttatactttacaggctaatacaattctccatcagatatccttttttcctccaattttactgatatgtgaagtatgacaggagctactctgttattcttatccagcactgcagctcactgctggtgcttcattatcatttcctatttgttggagatagcgaaatattataggatgtgcctcctataagatatgtgtctaggctctaggaataactggttatcttttcttcttgactggattctcaggttgtgcgatgctttgaggatgacgatatagttcatgtcaatggcaaggtcgatcccagatcagacatcgatgtcattaacctagagctgatattttcggatcttgaacaggtaatttggtgaaggaatttgcattcgtcttgctatcatgcatttcaaaagaaacttctattgctatctatgatcctgtccaactgctgacagtagtgtaataagtgtagatagagaagaggctagataagcttaacaagagcaaaactaaagatgcgcaagtaaaagcgaaggtaagacgtacagattctttcattctgatgacctatttgttctatgttctaactgttttcactacttaggaacaagcagagaaatcaggattggaaaaaattcagcaggcacttatggaaggaaaacctgcaagatcggttgatttagctgagcatgagaaggaagctatacaacatctttgtctgctaaccatgaaacctgtcatttatgttgctaatgtaacagaatctgatcttgctgaacctgatagcaatcctcatgtcaaagaggtggctaaagcagcatcagacttgcagtctggtatggttacaatatcagctcaggtttgttgtatgcatctagactacaagaagtttttgaagaaatttctatgtaataatttcatatttttgcctgagtgaagtgatgttgcgtgttctatctatgctaacaaaatcatggaatgcatgaacaggttgaagctgaactcgctgagctacctttggaagagagagtagaatatttaaaatctcttggtgttgctgaaagtggactaggaaatttagtaaaagcaacatataatctattgggattaagaacttatttcacaaccggagagaaggtgcatcttttgtgctgtcaaagtttttttttccccaactgttaacacaaactgacagacctttaactgtgtccttttaggaaacaaaagcatggactattctttcaggtttccttcttcctcacagttatttttattgtaatatttgaagaatttttttagtcattataactgcatgtaattctacatgtaggcatgactgcaccacaggcagctggagttattcatagtgactttcagaaaggattcatcagagctgaaactgtaagctgtgtacaaaatgatgagaatttagtgaacaaatttcagacttcagtttacatgttatgatatatcgcagtcgcagttacaattgccgatacttcacctctatggaatttggatatattgttacttgctttttttgtttgatatttactaattgtacaatgattactaccatacctcaggtatcctatgatgattttgttgcagctggttctcttggagtagcaagggagaaagggctggtaaagatatttgcgttgctacaccttacattcagtgatttgaaacatgcagataaaaatatgcttttttgtttgtttatttactctgtcacttctactgcagttgaggttggaagggaaggattatgttgtgcaggaaggagatgtcatgcttttcagattcaatgtgtgacaacaatagtagcaaaaagcttcaaaacaccggaatttgtcctaggcagaatatagtttgcccatactgtgacatttttttggcctcttgaccaccgactaatctaccagcattatttcttttcttatgaggaaaaatacaatggttcattctgtatgagtatcatatgttaaagaaaggcacctttgcaatagttattcagtgtagcttctcttctagacttctaacaccagtggtggccttatggttcagtcgagatacattgccaaatctgcttgaagttttgcgatgactttataatgttacattacaagagattacttagggctaatatatgtttgtggagatgaaatgttaatctccaattgtctctatctactcgtatttctttcaagaaaccaaagtcgtaaaaaaccaccctatatgtcactatggttttacaacgaaaagaatgtcacccactctcctcacgcagcctgccaccaccagtccaccaaaaagtggcgctgcaaagttggatataattagggctcctgcaacgttaggacaagtccaacgctgttagcttcaacgaaaagtagtactctacgtagactaagatgatatagtgttactgttacatagactaagatgatctagtattattgttctttgaatgcaggcaattgttactcgtccacgagtctcaacgatagc

SEQ ID NO: 3818 - DNA, 2782 bp, Sorghum bicolor
ttttgtgcttaatgaccctctatcttatactcttataaagtaaaactctattacttatttctctcagcatgcaagttattcaactaagcaatccactattacactccactacctatttctctcaacatgcaaggtcaactaggcaatcaactatcatacactattaaaaaccactagctcatgtaattgtaatacccatatcaacaaatcacctatttatctcaacgtacaagttgttcaactagtcaatatatattctaacttatttatatttttcttcatatatccgcggcaacgcgcagagaatccttctagttttagaaacaagtgagccaaggatgtcggttgcttgtggttaatggactcaaataatatggttttccatataaaacggaacaaaagatcttgacaaaacaaaaaaaaacaattgtgggtctttggagacttcatgcatgttagtctggtcatcaagcatgagagttccacttgtagaacttctcaggcttatactgatgagctaaggtagaagttgtcgtttcttttacttgttctctatcctaaatgaccagtaattcgttagtagtacgattaactcaaaaacttggaagaaagtcttcttccccaaagttgtactagatataataaagtaaaatatatcttggtcaatttggcaaattttatattcaatgatgccattggaaggctaggtaacatttggcaaagacggtgtgcaactcagttgatatttgacatagtccaaatgggggtcatcagttcttagacaatgcctacctggtagtataacttatatagaagggaaccatcaccctaattaaaagtctcatctaccgcgccacaagaaagaggttaaaagcagatatgattgacgctcggatgttgatattggtaatatagaaatggctgaaacgcttatgaaagatacatattggcattagatggaccactagagtcattaagacaactacatgcgtatctgaaaatggggcataaacactgtgaattcataaatattttttcttttcaaaatgtattcgtcaaacaacttgtgaattattatcttagagtctaatgcatgatgagtaaggagattaaaatgatctcaaaatggtatatttaaatgtctgctggaaagccattcagtttagtcaaaattggcaatcgcattgttgaattagtctataaaacctatatagcggaacaatgttttcagacgtggagcacatatactaaggacttgtatgcttgggtatataatttatcttaaatatgatatgacacacatcactcttgaatcctagcaattttgtacacttggaaaagaatttctttttttccgattcactcaaaaaaaaattccccttttttttacactgatttccctttgacttgatggaggcgggttacagttgaatcattctgaaatccgtacagtaccttttctcaagatggaaaatccatacagatacaagagttgacatactcagctccacactctacaaacaaatctgattattaagtgaactttattcatatgaaaaacatcacattagttcgactcttcggggtgaaatgttcttatcatgacattggcgatgggtgtacaatgtgaattattgagatgtccatgcaaaatggcctgaacctgacatactgaacacgtagtttcagattagaacataatgcctctaggaggtaattattctgcctttatttttcaccgttgcaccatcagtaattattagtcctgacaccattggcagtttctactgttagattctactgccatgaaggaaacagacacaggttactcaagaggaagtcaaacaagaccagacataagcaaatgcataaacgatatcttatccactgaaaacatttgaaagtcgtccgccatcaccagcaagcactcattcattatataaacacacaagagggctcagaataacccctgggcttttagcaaaccagtttagaggaggatggggaagagtgtgtcagtgcagcgagggcacatcccggtgctcgtcggtgagggggaggaggggctgaagagggttctggtgcacaggaaggttcttcagcacccctacttcaccgggctgctggagctcgcggccatggagtttgggcatgatcagaagggcgtgctcaggatcccctgtgacatcagatgcttccacacgattgttcagctcattagaagcagaaagcggaggaagaaggtgacgatctcatgcctccttttcctcaagctgatgtagcagtcagagagagtgagagtgtgaggtttagggtgttcagaagttctcagtcagcttttgtatcatctttgctagctagctatatcctagtcatcgatcagtgtaattaaccttgtggtgtgttgtagtatctttttttttcaagattttactgctagcacatcgatcgtacgtacgtattttgagctagagatagaggaaatatattgtactttgtactatcgtgctatcagcatagttcctagtgctttggacgattagtgtagtgcactagtgctgcacatacatctgtcatgcacgcgttttgtcgcaaacgttaatcagaagctttgcgttgttcctttaatttgttcttcaaagttcttggagcaaagaactgaagggggccattgaactgaacctcgaatttgagcatatgatcgaagagctcaagaatcattttttttgtcttcccttttcttagattaaataaaagtaccagcagtactgtcacaggaggg

SEQ ID NO: 3819 - DNA, 2728 bp, Sorghum bicolor
tggagtgtaatagtggattgcttagttgaataacttgcatgctgagagaaataagtaatagagttttactttataagagtataagatagagggtcattaagcacaaaagtccaagtgactagatggatatctttatgtggacagagactagggaatacatccttgtctagagcaaaactacataaatcttcctgactgggcctttgaatttagacttcgaatacgggactgtttggttctctttgctaaattatagtcaagctaaacgtagctaaattttcgaacacactgactaaaaaggagctaaaatagtttagtcccactagtcacctaaaagtagttaaaatagttttagctgcttaaaatttagtaaaagaaatcaaacaagtcttaaatgtcacttaggctagtattttggatggtggacaggtggattacatgacacaatatatatactacaaaaagttgcagattgataaagtagctatcgaactagtttggcaaacctccgctgtcctggtgtagtagaatcgtataggagtgtttgtatgagctgtgcttaagcacaaaaaactgctgtggcaaacggacaccgtcgcttttgtacgctggaaacaatgaagcgattttataaggcaaaaacgaagggtctagaagtctagaagatgaatcacgaaggaatcagggccgctacctgctagctcaatacgcgtctacatcgatcgtggagtccctttcgaaaagaggttccaatttcttgattggactgaacgaaggaggcaaatgtatgagttctttgctgtcaccttgagacggaaggaggagagaggcagacagagcgacgagccgataaagctttccgtccatgagaatcttacctgttcctccaccagtgaatcaatttttataagtttattaatcagatctataaaaaactactcatatctgatatacaatttaaaaacaattaaattaactataatatatatattttctataataaatttatttaaaatatataaatgtgtttctgtgagatgaaaagaatactattattctagtattcactttggggaacttggagcatgtacaaaaatgttagatatttttttgatgatgtatggacttgtttggttatgagtcaggcaaatttgtctggatcagacgttcgatttttggacgtataagattagggttataccctgtgtaagggtaaccaaatgtcccctcaaaacatgacctaaacaaagagaactctgaactgtgcttcggccacatagctcaagtccgcatcgaatatttggaccatgtcctatttgattttcttttgtcactttgagtggcagatttaggaacaacaggttatcttttatctctactagtttctcctcccaagattttatcttaggcaagcttttagtaatgtctccatgctttgagtaggcctgcagatgaaacattttgctgttgaacaatattttctatgtctttaaaagctttaattcttagaattatcttaaattaaaatttttaaactttaattgatttttttttaaaaaaaattactaagatttatattacaaaattagtacttttaaatttattatagaatatatttataacatactcattacccacgtgtggaacataaagtacagcacggggcattcgtcactcgaccgttgcctccgctccagcccaggctgcagcccaccaacggtcacccgccgctacgctgccatgccagacaagccacactccacaagctgtcaagcttcttctcttccagctacagcccggccgcctccttccctacgattctcctgcagcttccattgtctccgccgcctatttaactcacccccgcctcatctcccctcccaagtcccaaagcagcaaagcttcaaagcatctcttctcctttttgcttctcacgctccacctccacatcctcccctgcgacttcttcaggcagtagtcagacgagaagagaggaggacatggggttcgtgctggtggtctccctgcctttcatcttcctctccatcctgcttggcttcggctgctacttcctcggcaagcacaggggccgggaggagatgcggaccggcgtcggcgcgcagatctacggcacgccgctgccgccgccgggcgtcgtcggagtctcctcgccgccgcctggggctgagccgttccacgccaagaaacaggggcccgaggccgtctgactgagattcagactctcccattcattctagctactgcatacatgtttcttggtggcgatgttggatttattctttcttctttattaatttcgtccaggccgtgtgagggtgtaaattgagagtgaatccgtgcttgtgtctaaagattgttcattgttatgagggcgaggagtgacggtttgtggatgttgtgaacttgtgatatgattgcaatcacagtttatatctgtaagcaagcgaaaaccaaatgcaatgcagtggcatgtcttgtattcctcactgtcctgactcttgcagctgcacgctgtatgtgtttttgaagatcgcagttagttaatgttgagcatctccataagatctcctatatcacatctcctataaattatcttagagaatcaatgttatttttattatgaattgttttacagagtcaatgcagagaaatctccaatacattgcagttagttattgctgatcatctcctataaattgttttagag

SEQ ID NO: 3820 - DNA, 4340 bp, Sorghum bicolor
tgcaagaatatgtgtcctacggacagcagaacagccaacatgccattaatgggcattttggttgttgatactttattgctatttcagttagtttccattggagtttagaggctctgttggagacctccaatattgataatatgtactcctaagtcctaagttttcatcataatcaagtgtactatatgtaaatgtttttgtagaaaactgcctaagaaattaaaggccgctagcgatatgataaacgtcaactctctctatttatttccatttgatctatccaatcaacttatgtactactacctagtaatagaaacatgtcatttagaataagttttagacacatttaaaactacaaacattgagaccttataattgttttgtttgagaatatacaatttagatgtgtaaattgcattaaaatatttgctacttctaatagttttgaagggtgaatatttttttaaaaaaatagcagcaaagatatccactactacaaaatcaattttaggacacaaggtgtttgattaacaaaggcagagttgttgtctacactaataaaacataggtaggtttttgcattaaatttctctaaaaattatatgctctctattaaattttaagaaattcgatctagagccaatcatttgtttggatctatactagcaaggattatattgaatctagattatcataatagtgatgattgtagaaggaggattcttgtttaaaaaaatttaggttttggttggatctattccttccgttccaaattataggacgatttgactttcttttatatatatatatatatattgctttaaccatgtagatataaatatagatatagtgtatatctaagtactagcaaaatctatttatctagaaatgcaaaaaatcttacagtttggaatagagcgaacgaaatagctaaagattaattattataggtagttgaaggtattttacacccattatctctaaatagtagggtgaaagtggaagttggattctcgtaatgtggttacagtgatagtgataggattataagaatttatccctacaacatctgtgtgtttgaatctcattctcataatatagtgatatggatgaaatcaatagaccctagtgtatgtaatgcgtaaggcccctccttccgttattacgcaccttctagaagatgcgtgcctgcaaccgtacgcgttattattgtgctctaatttcttcaaccatgactttcagtaccaaaatgattctctaatcgtgtcacaatgactagcgtgcaacaatgtcgtcctgatgtttctttgtccacctgtcagtgttgcagcttgtgatcagattcagttcagttttaactcgttaaactgaataagatacagtacggatcatccttaacattatattgatacattaactaatctctaatgttcagcctaactttgtacagtccctttgcgttgtaatatgtaagatattcattaattcttttcccttcaataggggaccgagtcaaacactatgagatcagccccttttgatttctcagcaaacttacacccagtgacttggacgtggcagtcacgagctagtactagtgctgcatggctggctgcccttcccaggcgccaagttgcacgtacctttaatttctcacacaatgacacaaaaccagatcgaagcagcattcgttgagctcagaaggggggaaaaaacccacaaccaacctgtgcaaagtaacagagactatagtaacaaagtgtcatcagtagttgctgcctctcaagattcgtcaagatggtaagtagtacaattcaaacatagtgacttggaccaaatgaatgacgtcttttaagaccatgtcgccaccctttataaatataagacatgggaggagcatgagcaactactgactcctccccccttatctccttgagtaaccatctagaagactgctagctgcatcaggaatatatacatatatacaaacatatatgatcgaactactactcctggcggaaaatatattgtacgtacacaagtagaaaagatcgatcgatcatggttgccaaggagtttggaagagaagcagtaataagcatggagaaagttaagagagacggagaggcgctcatcgctgccagagccggagacgaagaggaagatgatgtggtgctcccggggttccggttccacccgaccgacgaggagctcgtcacgttctacctccgccggaaggtggcgaggaagccgctcagcatggagatcatcaaggagatggacatctacaagcatgatccatgggacctccctagtaagtgttctagcttgactactcatgcatataaacatgctgaatttcttcatctttttattttttttattagtatgtgatgtccaattcagatccttagcacgcaatccatcatatatctcgtactgtaaatgattaaggaaccggagagtaaattttattgatgcatgcatgtgtagaagttaaactgaaattgctttgtaaataaactgatcattgatcttcagaggcaagcacggttggtggagagaaggaatggtacttcttctgtctgagaggaaggaagtaccggaacagcatcaggcccaacagggtcaccggctccggcttctggaaggccaccggcatcgaccgcccgatctactctgccgctgccgctggtgccgccactgcaaactccggcgagtccatcgggctcaagaagtccctcgtgtactaccgcggcagcgccggcaagggcaccaagaccgactggatgatgcacgagttccgcctcccgccggccgccgccgccgccaccgatgcctcccagagcatgcaagaagctgtaggttccattaattctaattccaccaattcaattaacacggcattttcatatatggatgcatgcaattgcaattgcaattccaccaagcgactagttttagttttgatttcccacgcgtcacgtgtgtgtgaaatcacaatatcatcacgatgcactcccacacatagattattccaaagcacgtgaaaacacgctgcactactgtcaactctgacatggttatggtgctctgaaaacgcaggaggtgtggaccatctgcaggatcttcaagaggaacatcgcctacaagaggcagccgcagcagcaccagcagcaggcgtggcggcagcagccggcgggcagcaacggtccgccgccgctgctggcagagtccagctccaacaccgggagcttcgagtccgacggcggtggcgacgagtacatgaactgcctggcagtgccggccaccgctccgggcgtgccccggcagcatcagatcggcagcatactgaacggaggaggtgtcagtgtcactggcagcagcttcttcagagagagcgtgcatggccagcagttccagggtcaatggctgaaccgcttccctgcgccagcagcaatagagcagaaaccgcagctcctggactcgtcagcgatgaccattgcgttccatcagaacgatcagagcgtcgctgccgccgccatgacgaatgatcagtgctacaaggacgggtactgggacgagattgcaaagttcatggaggtcaatgatccaacagtactttacgactgtagatacgcttgatcaatagaaagttcagagctcagagttcagaatttcagagtagagagacccaggtaccaagggtgcatgagagactggcatgcagggcctgctcctccagtgaggccgctagtcagttagattttgcccggcaatgtgcccaaaaacccccccacccttttgtgttcattattctgatcggatgtatacaggacgtgttgtgaccaatgtatgatttgtgtgtgcactggctagattagtaccaaaataaacatatgtttcagccacgaatcatgactttgacacatattgagctctctctgaaaccttctttgtctctaacgcagcaaagcaagcaatcgaaaggcaaaccattttgctcatacaagtagcacacctgtattattattttcactcctagtcactttcagatatgagtgagccgaagatacagacaacctagacatccatgttgccactcctagattgatctcatgcccacaagtcactcaaagctgcgcacgtgatgcatcagcaatggaccattcatgcttgcgtccacagtttagatattctgatgagatacaggtttgtcatttgcggacaaataaaacacctgtgatttggatggcataaacaaaggatgaatcagtttcgacatttcttgtgctgaccctctactttgacccttgcacccaaaaggggggtaaggccaa

SEQ ID NO: 3821 - DNA, 8888 bp, Sorghum bicolor
tatctgtcttatcctgttacctcctatactttgcaaatgcatgaacgttagaaatagtacactattaattgttgtcgctgcacagggccccttcactcatggagtccctgttggcgattcaagcatggaattcagctttaacaaccatatggaagtgcatatgggtttgtcagattaatgctttttgtgcacatggaaatctcagtaatctgcattattcagtttcttgagctccaattacatagatattatggcaatctcatcctcccctgcgtctcctgccatgtgattcacctgcaccttcttgtgatgtgcgttgtccgcttgttctacagccacgaacatagacaggtgccctacaggctgcaggtaagtttattttgattcccatcttcctattgtctttggtacttcagatgtatccccagatcaagcagttaattgttttatgcttactgtactgtcaggagatagtggtgttagagattagtgattagttgggttgcataagaatagtatttttgctcatgtgatctagtggagttaacacattggagaggtgtagttgtagaggtttcaggttcctcttgattttcctttccatggtgcattactgcatttcttcttagttacttcgcagctctgctcatatcacccacttgttcaatcgagtaaggttattctagtgataattagtagcagcccatgttagattaaccaatcgtattccagttctagcctgtttttaaaacaaaaaggtgatacagttcatgcattttttttctgaaaatgtttatgcattgatgtagttcatctatatgcccctctgacactgcaggccatgcgtatgtggcatcagtggtagctatgagcagtgaggtgtgtagttagtgatcagttcttcaaaggtggatatgcttgccttgaagataaactagcaagatggcgaatagcagtgtagaagctcaatccttctaccatgtggatatttacggaacaatacttgaagtcaagtttaccttttggatgcaacttgcaaggctgatggagaggcgaatgaaagcttgtatcatattatttgacgacatatatgtgttataagaagcttttttttctcgagtctttttcatgattatttgagtcatctagatatatgtaatagctttattatattatattatttgattttctagacatctctctttctttctcaatttttgagactatttttgttcatagagatttctacctcttgctttccaaacagcagcagggaactaagacctccggaggaaagtgggcacgtgaaacgattgtcaaaaaaaattccgcgtcgggggttttgctccctgggataggctccgctaacttccaaagttactgaggtaagtaggtaagtagtgtgcatacatgtttgtggatcataggtaagtaggtagtgtacgtaaaaacttctagaatttcgtatggatacattatcagtcgatcgcacatgggtacgaatgatcagcgttaaagaagtacagtacctatccagatgttcgttatggtcatgtcatgtgctatatgatttgatgtgttcttcacggaagggaggactgggaaagcatatatgaaaatgcaatttggtaaggggggaggacgaggcccagatgccaaaaaaagttacgagtacaaactcgagggtggcccgacctcggcggctatcgactgtcggccgcccttcccgcaccgcggtctgcggtttggccgcccctgcgggtccccgtcaaccatatcaaccgaatatccaattcaaagggcggggagcgtacgtgtaccaccaccgccgcccgtccaccgcccgtccaccgtttcccgtctccagcccacgggtaaaggcaagcaaacgagcggcgaggcggctagccgcagtacaaaatccggagggaactcgcaggaggcgaaaagcaaagcagatccgcctccccgacctcgaccggcgatcgccccttattggtaggtgttattaatccgtcccccaatccgccctcgccaccctcaattttttttctctctctctcggtttggtcgcttcgatccgcagcctgttggtaccatagctcgatccggtggttgcttgggttcgtgtttcggaaggaattgtttgtgattattagcgattccgttgtttccgcggttgttgattgatttggtgcgtcgcctcttcgttgtcgcagacttgtagcggaagccatggcgtcgccggcgctaatctccgacacggagcagtggaaggccctccaggtgcgtgaacccgtcgccgatcgcattgcggcgagtcctatgctctgattagctcactgttttttttttccttctgctttcactcgtgcggatgcaggcgcatgtcggcgcgattcagaagacgcacctgcgggacctgatggccgacgccgatcgatgcaaggcaatgacggcgtagggactcacgcctgtgctcgtggaatttcgttttcttgcgtgtgcgtggattctgtttgctttacctgaacggtgtctggttgcagtgagtatgaagggatctttctggattactcgaggcagcaggcgactggtgaaaccatcgagaagctgcttaaattggctgaggtgtcgactctgtcaccttttcattttggaggtggggatttcactttcctgtggtaatttgggatctgtttggtttgttataggttgccaagctcaaggagaagattgagaagatgtttaaaggtgaaaaggtatatatgatgatctgaaattgctattcaattgttccatcacaaatattcattcagtatacatttctatgtaaaatgtgctagccatggagcattgggtacttttaatttccttatattttatttgtcagttaccttgtatatagttactttataaatcttgccattttttctgatgcatgattttgcataaaaagtcaacatgttttatttgtccagttaaattactaaattactaacataagttgattggttctgtcagataaatagcacggagaacaggtcagtgcttcatgtagctctgagggctccaagagatgcagttataaacagtgatggggtgaatgtggtccctgaggtttggtctgttaaagataaaatcaaggagttttcggacactttcagaagtggatcatgggtaaactttcaatcaatatttgaactagttaaatgtggcatgaacttcaagattgaccgctggaactgcttgtactgcaggttggagcaactggaaaaccattgaccaatgttgtgtcagttggaataggtggtagctttcttggccctctatttgtgcatactgcgctccagactggtaaattattgagctcttcagttctagtttccctagaaacttctatgccttttaaactgacatgcctagaaaatattgctgatcttcagatccagaagcagcagaatgtgcgaaaggccgacaactgagattgtaagtgtgtattttgaagcaagctcattatcatgttttaagtgagcatggatctattgattatttgtaacatctcttgtattgagcattagtttgatgaaaggtgaatggttatcttgtttctgtctgttgtacacgtgtacctgatgtgttgacacctatgcttccatggtcttcacatactattgcgttgatattaataaacttaagtgagtcttaattcagtcatcattaatatctcctatactttttaagagctccttgcacttgttctggaaacttatatttgtggacctcttttagatagtggaataaaacagaggtcccagcctctatgcattgtgttgttttattgttgtgtctatgtacatacatgcaatctttatgctattcatccagtaattcatgttctattttttatcagccttgcaaatgttgatccagttgatgttgcacgaagcattaaagatttagatccagaaaccactctgggtaatcacctaccctcacttcaaaatagattctttgtatgttactgatgaatgtcccactgaagatttttatatttcttgtctaacaacttgcagtggtggttgtatcaaagacattcacaacagctgaaacaatgttaaatgctcgaactcttaaggagtggatcgtttcttctcttgggttagtttggtacctgaaaatattttttgacacatcatctcaacttattgtgatttgagttataaaaattgttcattcaggccacaggctgttgcaaaacatatgattgctgtcagtactaatcttaaggtacttctgaaccttctttccaccaaaagtttactgaatctcttctgtgtgaagatggatcatatttagatttgagttgagatacatggagtatttcatatttaccacattatctaatctattagaatatttcaaatttcatattatccctcaaatgttttgattctgacatatcaatttcctactgtgccatttctgtttacaaagcttgtgaaggagtttggaattgacccaaacaatgcttttgccttttgggactgggttggtggccgttatagtggtgagttatatttctgcatatgaaaattactggcatagctagtgttctatttcataaccatagttcaattatgcagtttgcagtgctgttggtgttctgccattatctcttcagtatggttttccaattgtccagaagtatgctctctgaacttatatttagttattacaccctacttcggtaaattatagtacgatgccactcaatttgaattggtaattcttttatgcttttgagataagaacacggatcttaaatttgaagtagagtgatagcgttattaaatattattgccagtttgccacctctaaacaaaactagaagaaatattgaggtaaaaatgctgtggtcaatgtctatcagagtcgactgcaagttaaaaataagatgagtagacatttgtgacaagcaaatacgagaatactttgggaaatgcgttcaaaaggatcttgctctttgattcctcaaaacaaaggaacatgctctttctgtaacttctatgatggtagatgaagatctgatctcattccatgtggcaaaatgctaaatatgttggcgtagcgcagtattgtttcaggatgtgggaattaatgtagggtctgaaatcaatgtttggtgttggatttatttttgtgtttgtaacaactaaaccctcgaaccaaaccatccgaaaggtgtggtttggacagctggtccttaaatttgacctcaagtggaccatatcttctttaaattttctttagtgttttaaggataatttaagaaccccaaatagggcctggactaaatcatcaaataccacaaagtctaataactatgtcttatttgaagtattgatgaaaatgttggaagccagaaaaaaacatttccatagtaagatcagagattaccagtactctcttgacatttcttgtttaccgtttgaagatttttggagggagcttccagcattgacaaccacttcaactcatcttcatttgagaaaaatatacctgtaagtgggtttcatacagtagtcaatgattttagatactcagaaaaatcagtgtcacatgttctatcgattatgtgcaggtactccttggtttgttgagtgtgtggaatgtttcatttcttggttatccagctagagtaagcaactattccgttgctgtgttatttgcagttacagattagttgttattatgcatcctgagtaattactttttttttctgttgaatgtgtattctaggcaatattgccatattcccaggcacttgagaaattggcaccacatatacaacaggtaactatgtttttgttttagtaccatctggacattctcttttggttattttttagtcatgacatgctgacatttgattattatatataaagcttagcatggagagcaacgggaagggtgtttccattgatggcattccactccccttcgagacgggtgaaattgattttggtgaacctggaactaatggccagcacagcttctatcaattaatccatcaggtaataatatttctcccatttatttggcaatgttatcaagttgttgcagtttttagttaactagtttgtactgcttgatgtacattatgatagagagtctccctaagatgaattggccaaccagtgtttgattttcaccttctacctattaaaatgctaggggtggatacctctcgcacggtcccgcctagtcgagttttttttaatctacattatgctgtggcagacagtctttacttatatcatatatgatgagagtatgccataggaaaattttacttcatgttcatagcctcagaactgctgaaatgaactgtcagttagatcttgatgacattcaacaataaccttcatttcctgatttgtcatatgtttgacttattgtgttaccatcctgtctatatatattgatatttttgtaacttttgcttgcttgcacttcacatgtgtctgtgctaggattcttgattacttttaagttagccagcatgtttttttcaaccagtattgctgtcttgttgataatgataatttctcggagtaatgttgaagactgccaaatttgttcaggcttctaaaacatgtgaaacaaaatttgaggataggtctttccatgtattgtcaatatgtatatttattgactattatgtgttgaaacatacagggaagggtcatcccttgcgattttattggtgttgttaaaagtcagcagcctgtttacttgaaaggtatgcccctagtacatctgtaactttcgatgttcttgttggcattgtaataatgtaactctacaaatttcttttaaaacacttaccatatacatctcttataggggaaactgtgagtaatcatgatgagcttatgtccaatttctttgcccagcctgatgcacttgcttatggaaaggtacaatattgaatggctagaacaaaagttttgtgcatgcatgtgtttcatacagtttcttgctttctttaccgaaactaactacttcttttcagactcctgaacaattgcacagtgagaaagttccggaaaatcttatccctcataaggtgatgacagttcactcattacttaaattaaactgatgcataagtattacacttagagatatgtttatgtatagaggctgggacctttttcattcacttaatgaatttttcccttgttctaaaaaaaagagagatatgtatatgtgtgttttctgattgaaccctctgggctatcctttttaacagacttttaagggcaaccggccatcactaagtttgcttttgcctacactatccgcatatgaggttggacaggttagtcacaagaacatcatcaatacattaatccagttgttcaatcttcaataggattttgtgctcatttgtggaattaacaattcccatactgttcagcttttatccatctatgagcaccgggttgcagttcagggcttcatatggggaattaactcgtttgatcagtggggagtggagctagggaaggtatgtgcatgatgttcatctttctcccatatttttcttttattcaaatgtccagtttgttttgggagtgccacataattttcttcctgtgctcacatgtttgaacgtgttcttgagtcctgatttaatttattttgtctctggaatttgatgtttcagtcgcttgcttcccaagtgaggaaacagctgcatgaatcccgaatggaaggaaagcctgttgatggctttaaccacagtacttcaagtttgcttgcacgatatcttgctgtacgctccactttggtcatttcataataaaatccttaaaacttttaacatgaccgtatctaaagtaaaattgggaacacttaaactccctttcctttttgtaggtcaagccacccactccatatgacactaccgtgctaccgaaggtgtaatgtctcagatgtttgacatgctaattgctgagttctgacttggcaaggttgagcattaagtcttccttttgggagttgttacagccattttggcagtgctttagttttgaggttttgtatactccttgtaaaagaagagaaacaaatttttgggtgctttaccacatacccgtggaataaaacggatgttaaactcaactgcagttacaacaccctaatttggcttttgtctgtagttggatagcattatgctgtcgctgccgtgatttatgtgcttggtggcccgagtaccaacctcggttcttactctgtatgcaattcgcatcatgtacaactgatccgcgtgctcagatgtgctttgcaatacacaaacgtatgggtatctgttcatctacagattttccgtgtggttgatgtcgatgtcgatatgtacaggtacagcagctcgcaggctgcgttacaagcaacagctgggataagcagctcacggacgccaaagcaggactgtcgcgcaatcaacaacggcgcggcgagcatgaactgcaactgcccagcatcacagacgtacacggcgtagcaactcacagctcacagctgctgcctgctaccggtgcggctgacccttcaccggactcaaatcgtcggagaaggacccctcgctggcgatcgtagaaggacggccgaactcgatggccgcgccgctgtacaccgggctcgccatgggcgcctgcctgatccgctccatgtcggacgtgtacggccctggagccttggccttgtacgaggccgccaccgccgtgccgaacgccatgctctgcccgggccgcaccccctcgttgaggtcctccagcgagatgtccccctccagcgccctcacgatctgcaccaaaaac

SEQ ID NO: 3822 - DNA, 20116 bp, Sorghum bicolor
aaggtctaagagcgctccgccctccgctccatgagttcttcgtcatcctaatcgatcgaatcggttgccaacgtggaatcctgcggggcccaggatggcaatgggaggattagatccacggccaagatgcgtgccatgctatcgcccgttatccgccttgagaacaactaatttttgctactcgcccacctaaaaggtacacaacattttgaaatatgagcaacctaacttttttttctactaccacgtgttatgacaaaacattgttttcaaatcaactacaatagtagccaggtatttttttctgacaaatgggagggattttattcgttataagcaaagtatagagattggatggagtatcccccaattacatttgtggacgatgtgctaagactcataacagtaaactgcccgtgtctaataattgcttcaatgtcagcagtggttgatctaagagaccaacgacccgggctgtgactgtaacgatatgataagcttcaactggtgagacaaaaacctgacaattagtgagtatatttgtcatctgttagtttgaagcatcaacaatttttggtgcccaacaatagggtttgggcttacgggcagagccaagggggcactagcacggcccatggccctcctaacagcacaacatatttttttactcaatatttatactaataaatatataataaaaattcttaccatatatatttcttggctatatgatactttaatcaattagttaataatgttagttgtactatgatttcttgtcctctactatattaatctcttatagtagcttctataattgacaagtagtctttttctaatattcatgtccatctcttttgttcccacaataaccatctaattagctagttaaatttaattggtgctttattgtttactctccttttcaattgatctccattaatacctatattatttgggattggtctttctgttattattctgattcttttttctagcccaataattagattattcgtcatatgagcgttagagaccttgggctgattaactttattctttttttctctaaaatattttgagttttttgttttattttgtattataataagtttataacacaaaacatgtacttggttgttatgtatacattgactgtatatgtatttgtcatgtgtgattgttatcggtgtgaacaatccctctatattcaaatcctggcttcgtcactgtctaggcttcaacttgcaattttttcatcttatcatcggagcttaattaaacaagtgccctttgtatcgactatgcactcttgtcgcctttttgtatttattgtcaaccaattgattttagcggtagacgtacaaaagcacgctaaaaactgaagataacaacgacaatgcccatcttaattatttcttggcatcttcttccatctgcccattggtttgtaccgatctttttgctattaatacatatccgtagtttggcatctttcacgcattgcaggtcagaaaacaacatcatttagctgataaactagctcatagggtttatgtaagacactttcttccacctccaaatttaccatgcatggcgctccctcattcttcttcatcgccggcaccccttctgtctttatcctattcaagctttagctactactccgtatattgtatggtcatgattgtcttctttatcgcttgtagagataaactctccacactaaccctatgtgttataccactacacaatttcctattttatcaagattttcatatataactagctcaaagattcacttagcaaaaatccatcctccattttctttccgatttgcgtcaaaccatggtagcatgccctctcctgccctacttttcgttttgggtacgggcgcgtgtggccggagccaagccgcgggagggaaagcggcgccgcgtcatccgttaccagcggccagcggggcaacatcaccacaagcgccaactcaaacgcatccagccagagcgagcaggagttcctccaccaccagcccagccctcccctgtccggccgcccgcgcccgcgcccgcgcccgctgctgcttccaacgcacgcgagctccgttccgctccgcagcatccgcatccgaatccgcacacgatccccgcgccacttgcctcgtcaccccatcgcggcccgcgcctccgcccgctcgtcggccaatgcccgctgctcggcgcaggccagcgcgatgagatgagatgacgccgccgcgcggcggtgcccggcctcccgtccctcacgcgcaccaccaccaccaccaccacccggccccatcgggattcctcctcccatcctcccacctagcgccgcatttattccctcccccgcacgacagcggtcacgcttccgtcgcgcggtcttctctccctcgtcgcatccggcgctcctcctcgccgcctatttaaagcgcgcccggctgggagccagcgataatgctcttctccaggaggcctctcgccgccgctctccacctcgcgcccctctcgcctccgctgctgctcctcttcgcgtccgcgtcctcctcctgctcgcccgccgccgccgcttcggcctccggctccagaggtacgtacgcgcttcttccgtgcattcgtgaagattttctcggtgggatgagaattttgcccgttcttctagtgctgttttgtgcgccgtgcggttcctgtgctatttgaccggtttgactgtcgcgagatgttctatctaactgtcttgtatatctccgatttcactcagacttcgatggttgtttccaagggatttcgtggctccactcctttcccgagcagagtttgtggatttcatcaggttgctcggatcactttggcgagtcgtgatggcatgcagagattgtggatttttgttggaatttgatggattctgcattttgtatcatcgttctgtgattcagccttaagtgtgttttatttattctcatgagatgcaggaatttcggttttacttgttctacttctggaactttgctcatatgtccttgtaatacgttgatcatctaacgttttaaccaactctgacataattcctgattgaaacgacgtgcttctccacctatcgtgaagtacggttagcatttttaagtttattagcttgtatgctcttacaatacagatgtgttggtctcctatcaggttgcactgctgtaaggatggacagtggcgcggtggagacagcgtccactggggcagtatggtcaacaccttcggcagaaccgagaagcatttctgtcgggaaggaggtattctgcaataggtcactcaacatgaggaacattacagcagtgggatttgatatggactacactctggcacagtacaagcctgagaccttcgaggcccttgcttactatggtacaatagagaagcttgtgaaggatctgcgctaccctgaagaggttagtgctaaggaatgcaaatttgcttaatacaccaagataaaatatccatgttgattactttcatactagatgtgttggttttgaatctacttgtacattgacctttcaatgcatgcaggaaagagagttaatggacataaattccatatagttgctttaactgttttccaatgtgtctatgattgtaccgtttggatgtcccagaagttagggtagcccttatgcttcatttttatacttttagtctatcatatactatgcttttagaggctgggcttctacttattgagtttagcatgcgatttgatagtgtgtggcaacatttctataccgatggcaaggaagcacattggcttctggttatgacagcatagatgaattagtacactctatacttgtttttacttttatggagtttggctgcataatgttggtgctgttcttgactaaattccttgttggagttattgctatttatcttagtggggcctcactgagtgttgcactcataaagtcaaacacattggagaatgaaatttgctatccacttattgagcagaaatattttctgttggagtgcatttgccttgatttcagaattcacctttatgtactgaacctttatgaaagcaacaaaacatattccatgttggcttgtttaggttcagatttcgattttactattctttgctcatgcagttgctgacttgggagtttgattggaaatatatggtcagaggactagttcttgataagaagagaggaaatatcttgaaggtaagttattatttcttaaatttgcccctcgtttttttggaaataaaaataatatattactattacactgtcacttagtaaacaagaccaagttgctggaagttttctgttgtaattgtccaaaacataaaagaatttatcttgttatcaatgaagggcccaacctgcttggaaacaaaaggctcttttgtaggagtattatcagcaaagtgcctagccacaatatttttacaataatcagatctccacattttttcatattcatatttgaaacgtgatgttggtggttacatgattgtgaatcagtaggaggtgtcttgtcaaactaattgatgcattttttttgttaattactctacctattcttatttattatatattatagtttgaaccataatcactctttttgagctagcatttgtacttcctcaatattaatattaattgctcgctgagcatcttcatcattttggaagtatcaagtgtttgttttcaacgtgaaaagttttactggttagtgggaatggcaaaaacaggtctaggcctcatcataaattttgatgtgatctgtattgtaaaatttaaatgaaatatttggtcctgttctcaatttgttttatagctcattgtttcattgcacttttgtgctggattttcaatacttgtactccttctgtccacaaaaggatgcaattctcattttttgaggagtcaaacaattgaagtttgaccaaagttatataaaaacatctatgatacaaaataagtaacattaaattaatgaagaaatatatttttgtagtaaacctagttgtagacataaatgttaatattgttcactataaacttggtcaaagttaagctagtttgacttgcacaaaccccatagttgcaaccttttttgtggatggagggagtaattttgaactaaattaactccttttaactattttggttttgaattatcagatggatcgacacaagtatgtaaaagttgcataccatggttttaaggaactgtcgaaagaagaaaaagttgctgcttatgggagtacattgataagagattcatttgatgaacctgattatgcccttatagatacgcttttctcactgggtgaagcttatctatttgctcagcttgttgatttcatggacaagaatcctggaaaagtacctgcaggcacagagtatgattattcccatcttacatgtgtaccatacagatggggcttgaaattttttggacatcatttaaatataagttgattgagacaaattattagaaattattttacgttttgaagagcatatccattctgaatgattcttgattcttatttttgataattaaccaatatgtagccaacactacacaactgtctatcaccacaagtccacaataatccaaatttctttcgtttctttattccttcataaatttaaatttactatcttgaatcacctaagcaatcaccttttcctttgttcatttcatgtcggcctgtttttcatcagtattacatttagtctacatgcaatttgatccatgtcaatacctcttcgaccttttatcgctggaccatgcttgtatattcattaactcactgtagtttggacacccatgtcgattctttgtcaaatcagacattcaaacttggtctagattctgacaccatgttcatgttcgagtcacagttcctatgttcctgccaaaaataaggttcaagggcacgcagatgttgggatgattggatgttattaattatcatgacatgccttattgataccctctgtactgtaccatgatatactatctcttgacttttgacaccaattatggtaatttaaattctaggtttttgtgggaactcgttaagttttatgtttttcccttattttgaactaggacttgcacacaatttggaaattttgaggttattgtgtttgttctcataaatcaacaggtctcatgcatataggccccatcaaatttaattgcgtcaatgagtgaattgttcaataaaaatgccaggactttttgtaagttctagtggtaggcatttttttttgggttaaatcaggcatccaaacctgagctatattctgacacccacgcccatgttggttacagttcctgtgttcctgccaaaagtgaggttcaaagttacctatatgttgggatgattgaatgagtcatactatattattattatgccatgccttgttggtatcctttctgcgctgtaccatggcatatatcccttgtcttttgacaccaatcatgataatttagtttacgtttttctgggcactcgttaaatttttctctttttttgcactaggacttgcatacaatttggacaatttgaggttgttgtgctggctgttttcataaatccacacgcctcgtgcatatagtcccaccaaactttacttgtgtcaattaatgaattgttcaataaaatgccaggactttttgtaagttccagttgtaattatttcatattaagttgcctgcgatcttttgatgcacgctgacactattatggatggccaggttaacttttccatttttgctctcatatggccaacaaaatcacacctgtctgcacatgaccgtgtgtcattacacaataaaagcataagcatgtaaatgagcactatctttttttagcagcatgacagtagagccttactattacaaagagaaaacaaatttgttgtttacttgttgctctctagttttttctttcattgttccacctggacttctggagtttactggagtttttttgagcttgctttactatgttggtacagctatccacttatgtacagagatgtgaggtctgcggttgatttgtgtcatcgtgatggaactttaaagcgcatggtggcgaaggatcctgccaggtaactcagtttcatatttcatggttaactatttaataccagtcacctgacatgattcagtgctagatactattcataaagacatacttcctatttcatggttaactatttaataccagtcacctgacacgattcagtgctaggtactattcataaagacatacttacttttgctatagagaccttggtttttactttggggtctacatgcaaattggcagccttgtgttatttccacttctacgttctagaggatcctgctaccatttccacttttacagtgctatatacttgtgcttataattatgttatagaaaatcctgctaatttgtgtaatttgaaattgcaggtacatcaatgaggacttggcaattgtaccaatgcttgaaatgatcaggaaatctggacgctcaacattcttagtgacgaataggtatgtggttggtggtgcctttataattttaggcttcttgagacttgtgtgaggacatatttctcaatttctgtaatgtgtcctttgtagtttctcctaaaatgaacccaatgttaaaactaaggtttttcatcttgatgcattctgcatttttgagcttcttgttacaatctatttactatttggacaagtactcttcatgcagtttgtgggactacactgatgttgtcatgaactacctttgtgggccatacacttcggatgtaggctctggtctcaaccacaaatggcttcaatattttgatattgtaataacaggcaggttagtgtcttatgttccctggttcctgattcttttgttgctatttattattagtgaaagtatcagctccctcaacttagtagccagtccttaatgaactttctttcagttcgaagccaagtttcttccatgatgataaccgtgcaggcctctttgaagttgagcctgattctggaaagcttctgaatgctgatattcaggctagtaaatttgtcaattctaatctatcttaatggcatatgtttttccctaatatatgcaatccttcgtgaagattggaagcccaagatcaagtcatcaacactcaacaccagttcagaaagtttaccaggtacttgttttcctgatatataatgtaaatgcaactttctaccattgctatatcccatttattgctatatcttttccagggaggcaatgttggtcatctccacagattactttctgttgcttctagttcacaggtaatgggctacatacacttagcagagattcactagcactaaattgcacatgtgaatggacggacatccaaatccagttagaggctattggatacaatggctttagtccaatacagcgcaggactagcagagccggccgcaagacctgcacggctgcaccaccgccgttgctgccacctccactgtgaccagtttcctgctaccaattatgagtccaatagaatttgaattgtccatttttttatcctacagaatccaaagctattggatccatatagaagtgccgaaatcccatcggatattggactaaacccaatccaatactctacactgaatgtatctgagcgtatgaatcacacataatatttccgtaccttacaattttgtagattctctatgttggtgatcacatatatggagatattctgcggagcaagaaagttctgggtatgttttatttatcttcaactcattagttgtattgtgatctgatataaatctgtgattaagaatgacagttttaattgtgcagacaacttttaatgtgtccccatttcattaagttcatacgagcccgcacctaatagtagatacatataatatgacatatatggacgccggatgattgtatggaggctttagggccggaaaaaataatcctctggcctcagttagggcactactgtctgagcagacagagcggcgcagcagccttcgcagttgacctattcgagcgattgcagcggggacgctgagcccgttcagcagctctagctccactaatgctgctcgctgccggccatgaagcttgaggtggaggcagctcctcgtgccagcagaaagaggaggtcagaggcacccgacaccgatggctagcaatcggaggagatttggaagcatcttgccactcttggcgacgacagatgtgcttgatcccaaacctttcggggccttagagggcacaaatcctggagtcgccaagaagcaccaccatatggaggtaaaggagctaggagacgataacaaggaaagggcgctgattactccccgactgtgttctcggtgacgtcatctccctcctgtcaaccaaggacgctagtcgtgtcctaatcctagccaaatgatagaagcactgatggtgctctgcctcgctcaactcgattgccatgacctctctggcttccttgcagactcctcgcagacgacgacgctctcgcctccgccatctcccaaatcctctctagttcgtccgttgcttcttcgtcagcacgagtctcctaaattctcatcctgacaccggcaccggcaccggggaagcttggctccagtcacctgccctcgacaatctcgaggaggcatcttagcctacctaatggatggaccatggttccttccacttacaacgctgccggcgccaattttttgcgtcgcgcctagcctcggcatcgcctctctcatcgacaacagctgtccagacactccactcccccaagctaaagaagctcacacttgaacttgtcagcattttgaagggctagttgcacagggtggttgctagctaccctatcgtcgagtgcttgctgcttgtccacaatttcggcttttgtcgtgtctgcatcaaatcttctagactcagaagcattggcgtgtctaatcacgatgcttatgaaatactccttccattccaaattataagacatttcaagaaccttggagagtcaaagcatctcaagtttgaccaaaattatagagagaatcacaaagatttatgacattaattaaatacactatgaaaatatatcaatgaagaatctaatgatacttagttggtataataaatattattatcttattatataattttggtcaaatttgagatgctttgactccaagattcttgaaatgtcttataatttgggatggaaggagtaatcattaaggaaaccctagattggcgctgatccatccaaacacacacatggacgccattgcactgtgtcagatgtaaagcatgtaacataacacaaacacaaaaggtgaatgtgtgtcacacacacacataatcacacttgcactaccctttttgaagtcggtatctaagaacatatgtatcaggttaatctcatacaagagtgactatgacatatgttgttgtccactgttcctcaagagcagcaaggcttccttagtcccaaggttgagctggacgagcccaatcctttccatccagaagttccactcctcttccaaaacaaactgaatcagattggctgatatgcgtcgagaacactggccaacggcctgtcaatatccctctttcggaacaccccctgtcaacaccaactgtcggcacaagcgtccacgtcgatatcacaagtgcctccgcagcagtggcagccacgatgaggctctccacagagtttgatgacctcgatctaaggcttcacaacaattcttgtgacagttctatgatagtagcatgtactgattcggtgttaagagcaaggatgatctggtctgtcgttgaatgattagggtccctcatgttgggtgtagcagagccaatgatcgcggcggccaaccatagctgcgcagtagtctctacctctttcaggcgctagatcagtagtacttgcttgttttaggcaccgatccatccaaatgcacacatggacgccattgcaccgtgtcatacgtaaagcatgtaacataacacaaacacgaaaggtgaacatgtcacacacacaatcacactcacactacccattttcaagtctatctatacccgcaccacccactccgaggaagggaaaactagaaactaatacccacccagctcatgctcactgccggaaccggggtgggagggggctagcaggggcagtgccccccccaagcacagtgatttacttaaagtaccaatttatagcacaaaaaatacgaatttcacctttttttgttaaaatatgatgattttggtaagaaatagtgtaatattttttgaaaaagttcttcaaacatataattacgtatattttatcacactaaaaatacaatcatatttgtttggcccccccttaattaaaatcattggttccgccactgctcacgctccattgctcgcgtgctccctccaccatggcctccttggtcagcatccctatagagatcctcgtcctcatcttcatctacttgtagtgcttcgctgacctcacgagcgttggaggcgtctgcaaagactggtgcaacgtcgtgcatgtgccaacaagtactttaacaagttcatgatcatagcaactaaccagttaagcacaagcaaaaaaactcaagtgacatatcatgagaaaaggaacaagcattcgcaaaaaaaaaaaagaaaaggaacaagcaatgccacgctccaacaaaagagtcaataaagtacaacgcattagctcctgatacttaataatagctagctagagaacttagctaaggtgtatgaagtgaagttatatacactgacttgagcaaggaagagccggagcttttatatgtcattcacagtcttgagcagctccaacaaaagtgttccaaaagctaaagcacaccggtcctccactcggagatgaagaagaaaaaaagaaaaattgttttctagaaggcgtattatttcttttggaaagctccatcttgcttctacagacttaccttaaaacatgtgattagcatatgttgtgcaaataaaaatgacgtgatcaaatcacggttcccactggattgcggcctaaatttgttgagctcagctgctaggacgttgagacactatggtgtgacatccacaacaggaacaaccacgaccctcaacattatctccttgagtgaccccgagctaataacacaaacacaaaaggtgaacgtgtgtcacacacacataatcacactcacactacccttttggatgtctatatctaagaacatatattaggttcatctcatacaagagtgcctgtgatgtatgttgttgttcactgttcctcaagagcaccaaggccttcttagtcccaaggttgagttggatgagcgcaatcctctccatctagaagttccatttgtctccccatcggattgactagtatgtgtcgagaacactgtcaagcgacttgtcaacgtccctcctttggatcacctcttgacaccaagtatcgacacaagcgtccacgtcgatatcacaagtgcctccgcaacaataagcttagtcgcctttccctttgcgttgtggtggcagtggttgccacgatgaggctctctgcagagtttgatgactttgatctaagtctccccaacaactcttgtggcagttctatgacaatagcatgtgctgattcggtgtctagagcaaggatgatctggtctttgtcgatgaatgtgtagggcccctcgtgctaggtgtagcagagccagtgatcgtagcggcccaccatagctgggcagtagtcgctgcctctttcaggcgctggatcaatagccgctgcctgtttctggcgccgatccatctaaatggacacttggacgtcatttcactgtgtcatatgtaaagcatgtaacataacaaaacacaaaaggtgaacatgtcacacacacacacaatcacactcacactacccattttcaagtttatttatactcgcacccgcccacaccgaggaagggagaaccagaaactcatcctcacccacctcacgctccattgcctgcgcgctccctccaccatagcctcgttggccagcgtttcgatagagatcctcgtcctcatctttatctacctctagtgcttcgctgacctcacgagcgttgcaggcgtctacaaagactggtgcaacgcgtgcatgtgccaacaagtactttaacaagttcatgacaaaattatttaaggttgggaaattaaattgtgtagtagatcagcacagccgttgccaagtatcaccatgcatagcgcacggatgcgtaagccgacaggattattgagctatgtgtatttgctgctctatggaggtggacaaacttagaaggtgcaaatcgaagccagatccaatgaaacgagacaatgtggagaaatacgagaacttgagcgaatcgaccatgggcgcctcaaacgatgtgatcaagtcacgattcccactgaattgcagcctgaatttgttgagctcggctgcttggacgttgtgacgatgtggcatgacatccataacaggaacatgcatgaccctgaacatggtctccttgagcgatcctgagctaataacacaaacacaaaaggtgaaagtgtgtcacacacacacataatgacactcacactacccttgttcatgtctgtatctatgatataacacaaaaggtgaatgtgtgtcacacacaatcacactcacactcacactaccctttttcaagtctctatctatagccccactgcccacactgaggatgggagaaatggaaactgatccctacccacctcacgctcaattgcccgcgcgcttgctctgccatggcctccttgtccagcgtccctatagagatcctcgtcctcatcttcatgtacttgtagtgcttcgttgacctcacaagcgttgtgggcgtctgcaaagactggcacaacgcggtgcatgtgccaacaagttctttaacaggttcatcgtcatagcaactaaccaggtaagcacaagcaaaaaaaaaacctcaagtgagatatcatgagaaaaggaacaagcaaatttaggaagatcggatacatctaagaacagatatcaggttaatctcataggagagtgcccatgatgtatgttgttgtgctcactgtttctcaagagcaccaagtccttagtcccaatgttgagctagacgagcccgatcctctccatccagaagttctaatcctctctccaaacaaacagaaccgaattggctggtatgtgtcgagaaaactggcaagtcgcctgtcaatgtccctccacaccaactatcaccacaagcatccacgtcgatatcacaagtgcctctgcaacaactaagcttacccttctttccccttgcgttgtaatagcagtcccaaccctagctaagcgatgtcggttacatcacctccttcctgcacaccaaggacgccagtcacgtcccgaccctagccaaatgatggaagcaccatcggtgctctgcctcactcaacctcgacttccatgacctccctagcttcctcacagacaacaacactctcgcctccgccattgcctagatcctctctagcctggcttggctccagtcgctttccctcgataatctcaaggaggcatctcagcctacctaatggatggaccatggttcctgttagctcgaacgttgccaaggcccattttttgcttcgtgcccagcctcggcgtcgcctctcaccgactgcagccttccgaatagcaccgtctagacactccacaatgcttctgaatagcgttcttgctagctgccctatccttgagtgtttgcttcttgtccacagttttcgcttccgtcgtgtctgcattggcgtgtctaatcacgatgcttgtgaaataatcattaaagaaaccttagattggcgtcgatccatccacacacatggatgccattgcactgtgtcagatgtaaaataacacaaacacaaaaggtgaacgtgtgtcacacacacacaatcacactcccactacccttttttgaaatatgtatctaggaacatatatcaaattaatctcatacaatagtgcttgtgatgtacgttgttgtccattgttccttaagagcaccaaggccttctcagtcccaaggttgagttggacgagcccaatcctctccatccagaagttccactctccccaaataaacataactggattgactgcctgtcaatgtccctccttcggctcacctcctgttgacaccaactgtcggcacaagcatccacatcgatatcataagtgcctccgcaaccataagcttagccaccttttcccttgcattgtggtagcagtggtagccacgatgagggtctctgcaaggtttgatgaccttgatttaaggctccccaacaactcttgtggttgttctatgatagtagcatgtgctgatttggtgtctagggcaaggatgatcaagtctttgtcaacgaatgagtagggtccctcttgctgggtgtagcagagcatgtgatcgcggcgacccaccataggtggggcagtagttgctgcctacttcagtgaatgggtggaggcaagtggtagatatggatcctataggcagcaccccactcattttcttgtgtatggagattgcaaaccaacgggaagatggagacaagttgatacggtcaattttttttcccaaggtttggtggtttgccaaccacgtaatccccgttgaggcaagtcaaggttgtcaccgatcctcttgctagtggtgacccactggtcatactctcccacctggagtgctcaccatgagctctagcactcgatctggccggaccacttgacgctcttcacgccttgctcaactagagttgttcttcgcgtctcccgcagtgcgagcacaacacccctcacaaatccttctccgaagccacgcacaatcactgtgcggagttgaccacaatccaccaagccatctagatgatggcaatcaccaagagtaataagaaatccccaaatcacaaagatttcctagtgccgcaatctaccaagccatctagatgatgacaatcaccatgctggcttacctggatcgatcgctgctgctccgaagctcctcttgcttctcagctccctttcccttacggagcgcaccggccgtctcgctatacaaccagggcactggtgactgccccagactggtgggctgctccatctgtgatgtgagggatagagagactgagctagtgaaggaatgtcggtttgggaatggggaattgttcggcggccgttacaagtgtaaccccacagcggcgcagccccagctggctctgatggacagccccagagagacgtttccgagagtagcgttctcagctttcaggcccaaaccaagagagtgagtgttaggctcgaatcttaataggatttgatccatcatacattgcataacacatgtccaaacttcatcctcagatattgcaattgagttcataaacaacaagacaccttatacaatacagtactagtatatgatacagacaaatagtaaagctcgtttttacgggcacgggatttgatgtgctgctgctgctgctggcgtccctctccttttgcgcgtccaaaccacctccaactagtgcggtgccgatccatccaaatgcatgcattgacgccatgcactgcgtgacatgtaaagcatgtaatgtaacagacagacaaaaaaacatcaaaacgtaacacacacacacactttttactagttatgtttttgttatagttttacaaattatctatatttcctgtggggcacttcccttattgcatttgtccactatatttcatccatttcttaaaggttggcggactatgctagtaattccagaactagaacaagaggtgaagcttctctcagaatcaaagtctacaaggaaggtatgaatgacgctcagttgcttgtaacaaattgattcctaacagttcgatattatttatcaactgggctcaggctttgaggttcgcatcctatgttaccacatagccctgtgcatgatctgcacttccctagaaccaataattttcatggttgttttctattgagatttgttctctaggattagttatactgaaggtaaacccctcttacattttcatttcatagcaatgttgtagcagaagacacacacacacctctactcaacttgaggccatgcaagtagaaactatcctgaccaaaaaagtatcagcggcttgttcatatccctttcattttgtgctattgttctcagacttggacatcccgatgtagccaacttcatgtgcagtctatagtgaatagtcactaacatgctcgtggacttttttttatgtgctatctatttcaggagcttagacatcttagaatgaagcgtgattcaattgaagacagaatccatcatcttgaatggtctcttaagtaagttgagaaagtttatttaagttaaattctatttttactgttatgcagttactccacattctatttctttagcttccaagaactaacttgaatctcctaacataattgtacttttgtatcaaagtagccttggatctttctaaagagagtttccaggaagattttatactaataaatttgctcagccacatttgctgtgattccaatggtcctgcaaaatgctgctgatcaaacacattcttatgctttggttttgtgttccatccactactattcgccatgtggtatataaaacaagtgttgttttccttgatggctgtagttttctaatttatttgtcctctcctctttgttcagacttgatgatgtcacagaaaatcagaaggagaagttgttctctgaacatgacaatctgctggttagtccttatttcgatccattttgttgtcaattccctccattccaaagtgtcgaattacaagttataacccagctgctctaggctttgattacctgatgggcaacatcccagccacccacagagagttgggaggagggtgtgtcagggagagaggagagttctcagctttcaggcccaaactgagagagtgcggttgacttgaatcttaataggatttaggtccggttagagtgtctaatttcttttatcttctattaatttaatatttataggcctgtttgttttcgcttataattggttcaccatggccctgtttggtagggcaatcacaagcagaggaaaagtacgattatgataagttgttttgatctagcttctgctttttagtacaaacaaagacgggaacaattaagctatactagcagaacaacaaaaatgtcacaaacgggggatagtcaagaatataacatggaggctattttttcacttgagctaaatagcaaagaattcggaagatagaaaaataacatagcaatcaggataaaataagcctttgtgcacgaataacatagtaaacgtgctctatgtgtttcaaaggtatgatggtcatggattggttatgcgtgtgcgtgtgtgtttgtaaatgtctatgtatattgtcggcatagatgtctgcaacacaatatgaaagtgaagggtatgtgtagaaggaatcataggtgaaagcaaagattaccaaaagagataaatgcaagaagcaattgtattcaaatgggctggtgggagtcattatgggaaagttagggtcgaattgaacaaataacattggatgtttcaacaagtggaagtaacaaacacaaaggtgtgctccataatgttaaagcattcacatatacactagattaaaaaaatgattcatggtccttgaaacaattggtacatgttggtaaaagtttgtttttctttgatggggacactttattttcattgcagaaacagagagagcatgttcgccgccttcatcaagaggctcagaggcaacatcatcagaaggtaatgttcttagttacacgactgcagaatttgctttttttatttttctaattgtttggtttctgttcgagttcagtttcataaggtgtggggacagctcatgaagactgggtaccaaaattccagatttgctcatcaggtgcagaatgttcaaccacacttagtgcttagaatgttacgggttgcaatgtgtgactgacacaagattttgttttcacttgtttccgcaggttgagagatttgcatgcttgtacagcagccaggttacaaacttcggtttgtattcccccaacaagtactatcgtccgagcgaagattacatgccccatgagtttgatgtgcttgggctgtaggagcagtctctgctgctgctcggagttccccgttgtaattgacctacagcaggataggagggtgattttagttgtgacattatagtttctgtatttatagacagaaagcttcgcccattgtgaaggagcaaggtataactatagtaaccacagttctacattataaccgtaacattacctgtatataaatatgtgcataataactagttttaggatgcaaaggaaagcagtgccgatcatgcctggattgaacattgagaattcagcattttgttaagtgtcccaaccacaaccatggttagcatgctcaagtcaggctgacgtctctctgaaaacagtttgtttcgtctgacttaatctttcagcttcaaaggttagcgatgcaaagtcggcagcgtttcaacccgacgcaatggaccccctccttgtgtgcttgtcccgacgatcttggtgtgcttgagaagacactgatttaaatcttcacccccgtaactgatataaactcaagtgatgcatatatttgtgggcacgtgataagtagttggcttatggcatcatgtgcaaatgtgcacgtcatccttgtaatcgaaaacagaccaagccacgtaaaagggagaggcgcgcaacggtccagagcggaagcctattttcatgaacacgatgcgtaaactacatattatttgcaagcgcgcgataagtagtagacatctgcggttgggagtgtgttgtgtgttcgtgatggtgttcaaacgtgtgcgtatccttgt

SEQ ID NO: 3823 - DNA, 5541 bp, Sorghum bicolor
ggtttcctagctaaccgatcccttcactccctccctccccagccacctcactccccaaccgagagcggttgctctcctagccatcctttggtggcgtcgtggggggtgtggccctccccactccggcggcagcgcatgggaacacgaccccctcctctagcggtgacgtggcgcgggtggtgcggcctctcctccgatggcgtcctgagaccctacttcggctcctcaccagccccatagccctggccaccccgacactctccagcagcggcgttgcacgagaaccgacgtgaggctatgaggatggcggcgtcggagcccgtgcgtcagcagcagggtggcgacaatggtggactgggcttggtgggcccgtcgatgatttaaatgggctcgtcgatgggctttttttaattattttttttctgatttatttatcgagacgggtaagcaatcgcctccgttaatgcttgattaaccgtgaccttttgttggagacatttatcttgcccgtatcggaaaatcctttttgcccgcttcagataaggatggagatgaccttacgagtggcccgtggtttttctctagtataactaaatgaactaaataaaaaaataagggaagaagttgtttatttagttcattaaattagactagagaaaaaccacacgtactggagcagcgtccccatagcttcagaaaaagaattttgtagtagtgcacaatgcagattcaaatagcgatggcatgagcaacacagattctcgacaaatagcaagaagcaccgacacacgactctctagcatcactctctggatgtttgatcgaatgagaaaataggatcaagatcaatgtggttgcaaaagatattcgatttctcaccggtctatagcggaaacaaccatcaacgattgcagacctaacttatgagctgtcttgcatggactatcagaaatcgaacaaaaagaatggagctgcgtgtgagaaagacaagcggaatttagttatttcactttgttttctttttatcatgtcacatatgggcagctagtgatgccttcgcatcacagcacttgaagtgagattctattttgtttttgttaccatgggacctgattttcttttggctcccacactctaggggcttgtttagttcctaaaatattttgcaaattttttcacatttctcgtcacatcgaatcttgtgacacatgcatgaagcactaaatatagataaaagaaataactaattacacagtttacttgtaatttgcgagacgaatctttaagcctagttagtctatgattaaatagtatttgttaaatacaaacgaaagtaacactatttatattttgtaattttttttaaagtaaacaaggcctagaatcagacacttggccgttacggttgcaactgaccggccattccataggggccgagtcagcaggtccaagcgcccaagggtaaccctgtactttcccgcgacggtacgatacaaagtttcaaatttcaaaatttgaaacggctggccaacagaacccgccggcggccgctcccctccattcccctgacgtcgtcccataggctccccagcctcacacatactacaaatctcacccgcatcaatgctccagggggctcaaatatttgtgcccatcagttggtcccacatgtccgtgtcacaacatccacgaccgggtaaatgtcgccgagaccccgagcgcgccggctccgcgggacccgcccgccacagctcattcccaccgttgccggccgccgatcacgcaagcctcagagccgttcgaatccaaacggtcgttaacccctcgttgcctccgccccgcccaccacccagagactgatccgtgggccacaccatcacaccgtcagtcccgaaccagacggcggctaggtctaccgcgccgcgccacaccatcacgggccggccgcggccgcctctccactctgcctataaaagccgccgcggggctgggcggcatttatcgttcacctcggcgtcttcacaaacgccggcgcttccactctcgatcgatcgatcctcgaccattccccattccgtcctcccccgatcgatcctcgaccattccccttcccgtcctcccccgatcgacgagcggttgtctgagagaagaggaggaagatgagggagtgcatctccgtccacatcgggcaggccggcatccaagtcggcaacgcgtgctgggaactttactgcctcgagcacggcatccaggttcgatcgcgtcatgttgtcctcctcgctatgcattcccatcatcgtcttcgattgatttctgatatgttgtcgaggagctctacgatttgcagttgcagggcgttagtactcgaatcggggtgaagtggttaggttattttttcgtcagatctgttggtagtactggtagctctagggtttgaaatttcctgcgcgatttaaactgcgatcatcatgtgtttgggtgtattgtggattttgtttgcgattaatactttgcggcggaaataacatgctgttccgatcgaattttatatctcgtattctcccgtttgttggtggtcacgcctattctcagtcggattgcgatgtcgtaattagtcatcggccgttccgtggtcggtttggatctgttttgtgcgtggatgaactgcactatctctgtatctgttattgtcgactaggagttgattgaattctcattatcatttcgtgaatcaagctttgattctgtaagttttactcatgttgttttcatttcttcgatctgattccaaattggtctaggggaatgatgctttagtttgtgctgtttaattgtaataaaataaaatttctctctgaactgcgcgatttctgtatctgttattgtcgatttctgattctgtaaattttagtcatattgttttcatttctgcgatctgattgcaaattggtctaagggagtgatgctttagtttgttatgtgcaactgtaatttaactgtaatgaaatttctttttcctatgaactgcgaaatctctgtttgtcgtctaggagttgattgaattgtacttttatttcgtgaatcaagctctgattctgtaaaattgcctacgttctttccatttcttagatctgatcccaaatgagaatataggaatgccgctttaggttgtgctgtgcaactatggcggaattgaaatttccatttcctattaatttgagttgccactttgttcctctgaactgaatctaatactaattaaatcgatggtatgctggacccttgcaacgcaactttgatccttcacgatatgatctgaattgcatttaatacctttctgatcttcgcagcctgatggccaagtgcctggagacaagactgcgggacaccacgatgatgccttcagcaccttcttcagccagactggtgcagggaagcatgtgccccgtgcaatcttcgttgatcttgagcccactgtgatcgacgaggtgcgcactggcacttaccgtcagctcttccaccctgagcagctcatcagcggcaaggaggatgctgctaacaactttgcccgtggccactacacaagtaattgaccatctaaaaactttgcctgttccacagaattagctcatctcaactcatttatggttgattgattactgatgcatcatgctctttttcctgcagttggaaaggaaattgttgatctgtgccttgaccgcatccgcaagctcgctgacaactgcactggccttcagggcttcctagtcttcaatgctgttggtggtggcaccggctctggacttggttcactcctccttgagcgcctgtctgtggagtacggcaagaaatccaagctgggcttcactgtgtacccatctccccaggtgtcaacctctgttgtggagccctacaacagcgtgctctccacccactccctcctggagcacactgatgtctccatcctgctcgacaacgaggccatctacgacatctgtaggcgctccctggacattgagaggcccaactactccaacctgaatcgccttgtgtctcaggtagaacaattgctttatactgggggatgtgctggttttgttcatacatatgtgctctgattttgttcatacatccttgaaaccgatgctaaaatgtatgccttaaactgttttggtgtgcaggtgatctcatcacttactgcttccctgaggttcgatggtgccctcaatgtggatgtgaatgagttccagaccaacctggttccttacccgaggatccacttcatgctctcctcatacgcgccggtgatctcttcggcgaaggccttccacgagcagctgtcggtggcggagatcacaagcagcgcgttcgagccggcttccatgatggtcaagtgtgacccacggcacgggaagtacatggcgtgctgcctgatgtaccgtggcgacgtggtgcccaaggacgtgaatgctgcggtggccatcatcaagacgaagcgcaccatccagttcgtggactggtgcccgacggggttcaagtgcggcatcaactaccaggcgccgacggtggtgccgggggctgacctcgccaaggtgcagcgcgccgtgtgcatgatctccaactccaccagcgtcgtcgaggtgttctcccgcatcaacagcaagttcgacctcatgtatgccaagcgcgcgttcgtccactggtacgtcggcgagggtatggaggagggggagttctccgaggcacgcgaggacctggctgccctggagaaggactacgaggaggttgctgcagagggcggtggtgatgacggtgaggaagacgaggagtactgatctgcttgcatgaatctctttggctgtcgagcgaggttgcggtgtcgaaaaactttttccgtttgcgtcctgggtagtgttgttttttgctttcatgtcacttgctgaactgctgtagtagttgcatgtcataattgaagtatgtcgcttaagcactgttggttccgaagatatgtgtgtacttttggggtgtgcttgttcgtggtcgtggacgggatgggacgatctcctctttcatgagttgaactcaacaaatggaaacgagcggacctgcgacgcccgtcgccgcgctgccctactactacaagcgcaccaccaaaatcccgcaactctgtcatgggctcatcggagcgaagcgcgcggcgactgtacgtgcgcgggcgcttcgtcgagcggaggagacacccgtgcgagcggaggctgtggggttggagaagcatgtgattaaagagagaggtggtcaccaggacagatggggccaaaagctgatttatcttagtttttccaaaaaaaaaatgttacctaaaatatggtttattttaagacctgttcgatacaagagctaattgctaatagctagctaagaatttgcttaaattctagcgcatcttgaaaggagggcttatagacggattaattttttagataagtcttcaactaggtgttagccaagcgtaactaatttagattaatttttagctctaat

SEQ ID NO: 3824 - DNA, 4024 bp, Sorghum bicolor
gtaattgacagcttttccattggaatccgtttagggcctcaaataatcaatatatgcttggtttgggataatatgtggggaactaaactataatatagacacaagtgagtaatatgtggagtggtagaagaggctatccgcaagggcaaggtctcaggtttgaatcccaaaaacgccagtagaaataggttatcagccgcatgtaaagtatgcctctgtgacattgagacatcttgctcgttttctctcaaaatattatgtatttgtttaagagtttgttgcttgtcgttaataacaaagcaaactttaacacggggtaacccaccctataatctagtctatttagatcagccgcatgtaaagtatgcctctgtgacattaagacatcttgctcgttttctctcaaaatattatgtatttgtttaagagtttgttgcttgtcgttaataacaaagcaaactttaacacggggtaacccaccctataatctagtctatttagatcacaattagattatcacctttcttacttccacttcaaaactcaaatttttcaagattctccgtcacatcaaatatttagacacatgcatggagtattaaatatagagaaaaataaaaactaattgtacagtttgatcagaatttacgagacgaatcttttgagcctagttagtctatggttggataataattatgacaaacaaacgaaattgctacagtatcgcaaaaattttcccttcgggaactatgccttgtttacttccaaaaatttttgcaaaataggaatagtagcactttcgtttatatttgatagatattatccaattatagaataactagactcaaaagattcgtctcgtcaattccgaccaaactgtgcaattagtttttatttttatctatatttaatactacatgcatacgtctaaagattcgatgtgacagggaatctgaaaaattttgcaaaacttttgggaactaaacaagacataaatatggccttggttacgatggtccgaaagacccaaacaaaattagctcatgatatgttgatgatatttttattgggaaaatttattgtgggacattactgaaacatgtaattggctaatgaacgatgtcaacatcgcaattcaacaaatctgctgttggcattctaaaaaattaattaaagatggtaactagaattcacggtggcttgtccgatgtggtagcgactagtccaaagctcaatactttcatcgtcagactgaaacatcatatcgtcagggtgactgttgccaacaagctatatgcttcacacattttcgatctgaaattttgctctaacacgctctgaccatgtcggaactcggaagtcggaacttcgaagtggcgccaaaaagcttgcaaaaatgtgcatgtttacgcttagcgaataaataaacatttgaaacgatacgatgctctgtcgtgcttatgttctgaagagattataaatctggattctggataaaaatgttaactctgaggtattttcgactactacgtgtccgtgtgtaagaattctctagaatcatatggtgtttggattctgacaattcttggaatccattggtatacaaactcaatgaaaagacataaacatttgatttggacagtgaagcagcattgtagccggcatgatatttggccgtgcgccgcgtttgaccctctctttgccaagaaaaccccgcccagtccactgtccacgcgaatccctgtgcctcgctcgctccttgcaaaccttccagcctgtcttgcctccgctcgaggctacaggacacttcaccctctgccgccccgcctcgtgccctcctcccgctatatatacccgccctcttcgactcctcctccctcatcggccatcgccatctccagcggagaagagaagcagctcaaggacagcgccgcccgcaagccacaccgaccggccggccggaccgaagcagcagcatacactgatacactcactgcacaatgggcatctgcatgtcgtccgacgcggcggacgagggcgcggcgacggcgagggtggtgctccccagcggcgagctccgggagtacgccccaccggccaccgccgcgacggcgctgcaagcggcctccggcggcgacggcgaggggtcgtcgtggttcctctgcgacgccgacgggatcgcgttcgaggggggccccgtggccgtggccgcggtcgcgcccggggaggagctccaggcggggcagatctacttcgtgctccccgccgagatgcagcgccgccgcctcacccgcgacgaggtcgccgcgctcgccgtcagggccagctcggcgctcgtcaaggccgcagccgcccagccgtcctccccgtgccgccggcgccggcgcggcgcggtggcgccgctcgtgttcccggtccccgaggaggagtacgcggcggcggaaccggtttcgcccgtcgcggcgaagtctgccgtggcggcggcgcagaagcggagggtggcgtaccggggcggcagggcgtcgaggttctcccccgacctgaccgctatcccggagaccgagtagaccaagcctccactccacccggcatatgtgtctctctggtggtgacgagtcgctcgccggcgcttggtcggaccccggccgcgcgcgccggagatcgatggagcagggaagtgttctagacgcgacgcagagctcagaaatgagaaatgtgagtagtgtttttttggcgccgttggtttacgcggcaggcaacagagagtgtacgttacgtgtaggttttagatgcaagtgtaaatacacggaatctccgtacggtgtgcccagtcacagtttggaactcaagcttttattagtgctcgtgttcaggctctgtgtcgtggatcatcaatcatcatggaataaatctctcgttgtttgtgaaaaatgaaatctctcgttgtgacttgtgaccggtgaaaagaagttgagaaccccttttcatcctcttgatgagaaagtaacttaccgtatgacgtgattcaagcccaggtacccaatttttcagctgatagatgagaactcaacggttgccgtgcttcttctacaattagctagctcctttctcaatcccccgagctaattaatccatgccatctcatcatggcacccatcccgccatccttgagagaactcctttgatagacccaccccccatgggaattgtactgattggggcatgttaaatcaagggaatggagagggactaagggggtgtttgggactgctccacaaactccaccatggagcagctccataaaaaactggagtttgtggagtacctctttaggtgatctcacaactccactctttttcctcgaactgagtgcgtggagctgaaaccgtttggctaaaaaacgtggagcggagttgaaaaacgtgaagcagagcagtcccaaacaccgcctaaatcctctgtagatcaaaatcctccttatcccctccaaccccttcaatcaatctgattttaacaaggcctaagggggggggggaccaaacttaatagcttcacgtgtatctcataaatataaacgtttccaagctaaccattgctcctacgcccttgcctgaaccttgctagctgaccatccttcaccgtcagtggcagatctaagatgatcccatggtgtggatctaacatgatccattgttcagatggaggtaattaagggccggggctcgagggcctctctcagcctaatgttgcattcaggggagcctcaggttatattcaccgctcaccgcatcgtcgtcacatgtccttcacacttctagggtttggcaaataggcaatgagatctactcataatcccggccaaaaaataaagaattgtttcattgtattccaatccaccttaatcctcatgtatcatttttcaccctagaacttgtttggctacatacactattatccatctcaattcgaaatgaatacaaatgcatccaaataagcctttaaaatctctcctaacccacgtgaa

SEQ ID NO: 3825 - DNA, 3939 bp, Sorghum bicolor
aaaactggtcaaataatccccttgagtggttctagagggtggttttgtctttttcttttttatttatttccgtttaatctttaaaaaatcataataaatcaaaaaagtcataaaataaaagattcaattttgttggactactgagtaggtctaaatagtgaatatataatatgatatactttagtacaaagttttttttagctttaaatctatgtttttatgtaattaattagaataattcatatatgtagttcctatggtccaattgtggtaaaatttttatggtaggctcattatcgtatgcttgaactatggtaaaaattttatactcattggatcacatataacttagttatagttatagataaagcatagatttaacaagaataaagttaaataaatctataactaaattatacttgatccaatggatacaaaaattttaccatagttcagacatacaataatgagcccaccataaaaaatttaccacaattgaaccataggaactacatatatgaattattctttttaattatagaaaaatatagatttaaatatacaacaaaaactttgtactaaagtataccatattatatattcattgtgtagatctactcatcataagtccaacaaaattgaatttttcattttatgatttttctgtgatttattatgttttttcaaagattcagcggaaataaataaaaaagaaaaagacaaaatcatcctctaaaaccactttagggggttatttgatcggttttgaaagttcaggggtagaatatccgtttttatactttggaggatgaagtattccaccttagatagtttggaggattatgtagaccttttcttttatataattactagagactaaaagaaggttttgggactgttcctattatgatacaaaatgtctagtataaaagaatatcaactggacactaggcccaactcaaacaggcccaattcggctagaggcccacagctccaaaacaatagtacagacacctctttaaacgcacgtctgaggaaagaatattgcagacgtgtacaccaaacaaacgtctgtattttcgcctgtgcaatgcgcgtctgtgttcatgataatcagagacgggtgtttattgagactcttattacagatgcttgtgattcaacagacgtctgtgttaattcttattacatacgcatgtttaacagttcttatacatgacatgcagatttaagcttttttcacatagtgcgattattgcttgctttctgtgttgtgtagagcgatatcctatagttgttgcatacgaggatcattgggttttgtgtttcttgcgacaatagttttattttattttctaaaatgcttctctctattaatatatatatgtccgcatatttatatcggtggctcttaaaaaaaataagaaaatctccttttgacttgaaacagtgagagccatcggtcgccattctcaatcggttgtgtctaagctcgcacttgctctggaagcaacttagccagagactgacatttggttcgttccttactggtaagtggcgtaactaatcagatccttccacaatggaaaaaagaaagtgaagaaactaatcagttatcgcgcgttattcctcgcatgagctaagcagcaagcaccacacacggcctatatatttccaaccatgcatgtctcattcaaggaagtcgtccatgttccacgagcatccattttaacacatcgagaatcagtccttaagagagcacagtgcaaaacacacgaacaatagactatcgtggtcggaccatgacatagctctgtgccgtgtcacaaatgtcaacccttctcggtttcgtgccagtgtccgtcagagtcttgtatttcacgatcgacacttcatcacttcacaaaattcacgtcacatcgatccttgggtgtacacggtcacacggacaccccataatatatataaccaccagttttgcaccatctagtagtagatagtacacatagctagaacacgagcagcaaattaaggcaaccaattaaagatggctaggccgtcggcaagcagcaaggcgtcgtcgtcgtcgctggtgatcctcgcgatcgtcgtcgccgccgcgtccctcgcgcagcccggcgcggccgacctgaagctgaactactacgcgagcacctgccccaacgtggagaccatcgtgcgcggcgcggtgcagcagagggtgcaggccaccatccgcaccgtcggctccaccgtccgcctcttcttccacgactgcttcgtcgagggctgcgacgcctcggtgctcatcgactccacgcccggcaaccaggccgagaaggacgcctccgacaacaagtccctcgcgcccgaaggcttcgacaccgtgcgcagcgccaaggccgccgtcgaggccgcctgccctggcacggtctcctgcgccgacgtgctcgccctcgccactcgggacgccatctccatggtatatatatggcatatctaactatatagttccaggcccgatacagcataatcgtactagtatataacctatcgtgcatgtgcatgcagagtggcgggcctttcttccaagtggagctgggcaggctggacggcctgagctccagggccagcagcgtgccaggccagctgcccgagccgaaccagaccatggaccagctgctggcggtcttcaaggcacacgggctcgacatgtccgacctcgtcgcgctctcagcggcgcacagcgtgggtctggcgcactgcagcaagttcgcgaaccggctgtacagcttccagccggggcagccgacggacccgacgctgaaccccaagtacgcgcagttcctgcagagcaagtgccccaacggcggcgccgacaacctggtgctcatggaccaggcctcgccggcacagttcgacaaccagtactaccggaacctccaggacggcggcggcctgctgggctccgacgagctgctctacaccgacaaccgcacgcgccccatggtggactcgctggccaacagcaccgccgccttcaaccaggccttcgccgacgccatcgtcaggctcggccgcgtcggggtcaagtccggcaggcggggcaacatccgcaagcagtgccacgtcttcaactgatggcacaaaaattgcatttgcatcgttgcatgagtgcacgcgcacgaaattgtgtgcgcgttgacatgcatatatattcgttcctgggagagggagaagattcatttcatttgggtgtattgttctgttttgtttgtagttgattgtcctgtttgattcgttgcatgcatgcgttgattgttgaagatgtgtgtaatagtaaattagtaatgcacataggatgttcggtgttccgcaatgcaattagttgtacaaagtacgtgacgaataaaacattctccagaataagcgctccgtattgattatttaggcacgttgttgtcacagtgtcggtttttttttgtgtgccaactgtcaactgaattacctgaaatttgccgcacacagatactgtaggcggtaccatatatactcctagttttttgtccatacatgcagcactccggcaggcggcaccgcagtttgactgtgtaatttgtgttagattatctaggcagtttggtgatggaaccatgatcgatcgctcccaagtctcaaacattccttcgaaaccacttgcggtcacagtaacctccgtgctgaaccttctatcttcgagaggaattattggtaggggcctggatttgtcaaacttatgagcaattattgtgccgaaagtcgatgtccaacaacacggtgtttcgtcatcataggtaaatcgccctaaaatatactatagtactcaacacttgttggtgtctttttctttaggtagtctcaatgcatgtttcataagagtatcgtacatattaaataggg

SEQ ID NO: 3826 - DNA, 5178 bp, Sorghum bicolor
ctaaaattcttcattcaacttttaaaaccattcattttatctttttaatatttcgttcaacttttaaaaccatttactttatctccctaatttataagcgactttgaagacaattttatctttttccattttattttatcagttgaatgtttgaaaaaaatcatagtaaaacatagaaaaataataaatagaaaatctaattttattgaactgtacatgagtagatatatacagtgaacatataatatgatatgttttagtacatgttttttgttgtagttttagatatatgcttttctataataaaacagaaatataatattttatagatgcagttgctatagtccaattgtgatgaaatctttacagtgaactagttattgtatgtataaactgtggtaaaaatttcatactcattggatcatgtatcacttagttatatattttatttaagtttatgcttgttagatataaataaaattataagtaagctatatatgatccaatgagtatgagatttttactacagtttaatcatatattaattagcccattataaaaattttgctacaattgaatcatagaaactacaactatgaattattccaactaattataggaaaacatatatttaaagccacaacaaaaactttgtactaaggtcttgtttagtttcgatttttttttggttttgggtactatagtattttcatttttatttggcaattattgtctaatcatgaataaactaggcttaaaagattcatctcatgatttacaggtaaattgtgtaattagtttttgtttttgtctatatttaatgcttcatgtatgtgccacaagattcgatgtgacatggaatcttgaaaagtttttgatttttggggtgaactaaacaaggcctaaaacatacttcattcatcccagattataagtcattccaagaatcttgtagagtcaaagaatctcaagtttaaccaaatttatatgataggataataatatttacgatacaaactaaatatcattaggttcttcattaattatattttcataatatatttatttgatgtaacaaaacttttttctatagttttagtcaaactcgacatgctttaactttctaagatttttagaatgacttataatttaggatggagggaatactatattatatgttcacttataaatctacttatgtgaagttcaacaaaattagattttttatttttttataatttacatttttttcaaagattcgattgaaataaatttaaaaggaaaaattaaaatcttcaaaactgcttataaagggtcatatagagattagagcaagtattatagcaggctgtaagtcagctaaatactgaggtagagaaaagagaagaggagagagtaaaagcgggctctaagattacaggctgctcagacacaaaaataaaaaaaaaatctgtgagacagataagtgtgctatatattaatagtgatgagctaactattatattagtggcctgcaaaaaaactgtaaagaaatcttacagccaacaactaactgtattataatacttgctcttaaaatgaacagttattttgccacgacagatttcttctgcgcgcatagaccacaatcatgcgtgcgagagcgagagagctcgggattagcacatcgtcgagtcggggcgacagccatacaatgctgctggagccgtctctcacctcggagcacgagtcttccccctgcaagcttggccgggatgttttttacaaaaacgcttgtggcggggtgttcttttacaaaaacgcttgggcggggtgttttctaaaaaaacagcaacgaagagacgggctgaaaggacccgagtacgtggcgtctccctcccggggctccccgcccagtcgccctcttccatccaccaccgcattgttgcatcagtggctacgtcactcgggcccactccgcaaaaccacggaagcagcagcggcagtcggcagcaaactcaatggcgcttcgcgccgtggagctccggcgattcctcctctcgcgcatcggcggcggcgaggcggcccttcctcctcttgcgtggcgcggccggccggtgagcacctccgccccggcggacgacgagctcgcggggaagagtgcctacgaggttctcggggttggggagtccagttccagcgccgagatcaaggcctccttccatcgcctagccaaagagacccacccagacgtcgccgcggctgctggttcccgacggttccttcagatcctcgctgcctcgaggtatctaattaaactaagctgacaggctttttctccgatgatgggcattctaattttaacatgaacccgctgattagtgattatgagtgaagcaatggataattgtctgagttttaattattgaggatgcgattgattttttttaatgttcacacacctgggtggaaaaaaaaaattgctcgtacttaattagcaggcttttgtattacagatcctatcagattcacagagaagagttcactatgatagctacctgcgatcacagaggcgagttgtgcagaaacatcccaggccatctcagttcgtgtacccaagtggttcaggctcaggcattgtggtacctcgagagagcaatgttgttgaatggctgaaatggtacaggcttaccattgatgacatagttaccaagaagagggttgccactggctctggttattttgataggctcgaaagtgaactgtacacagcaatccatgctgcatactatggccctgatgtcgactccatggatgtccttcctgattgctttgaagctgaggagaggtccgtgtatgaaacctctgagctattacaccttgtatcaggccgtgatctatttggtattgttagtgtagctgatagtgtcaaagagctgtcagatgtttgtcgtgaaaaactggcaccctctgggtttagatcttctgaatttactccaaaagtttcaagaaatgtgaataaggattcaatatctatgaattttatatctatgaattttgttgatatgaacaagcaagggatgcggcatgaaaattatattccttcatcagatgccttcaaggatatcgagttgcggatatttgggaaattagttgctactgcaactaggagccccaaatgcgattgcattgacaaatcggatgtggaagatcacattcatgtgtatcttgttccgaacgcagatctatctgatttaacgcaagggaatcttctcctgggcacaattactggattagccaccactggtgaggaaggatcttgctgtgtctatgatggtcacggaataaagacacatgtcattatgaagcaccggacgttgatggtatgaactatgaaaacattcctgtactatgcacattgttttttctacaaagtttgcgtacatcattcaaatactcatgcaaaataaatggttccttttgttatgtgaccgcatgatggtgcaaaagtaatctttgggcttctaaaggattgaatgttggctgcatgcatatgttgcacaggttaaacacatgcactggtatcaggttggagataaagtttcaccctgcgagtgtcgatgtagtagggctcgattgccacctagcaggtatgcataatttactatgctgcttgtgcgcccatgttgcactcctgttggatatgtatatatttttctctatcaatcgaaccacgcaaattagtcattccaaacatgattgaaatgctgatgaggtaatggtgtgagcacaagccttaaatttgaaacctttaggttaaacaatttagaagatctaatgctgcccgacattacttttctgttcaacagaagtatagatgccctggaagaccatgttttgttcagctacatatatgattggtagggacatggaagtaaatctttggcttcctaaatctaactttctatgaagtgaaagcaaaatgacttatgatccgagacttccttgttataggtccggagagggtgtccttgtcatttgaaaaaatatgtataattgagtaatagatcaatcagaagtagtattccgaaccatggaaaacaacccccgttagttttccctagtcttgaagtaacccagcaagtaatgcatgctaaattgcatctgatacaaattcatttcaggacgaaagacattccaaatatgtatcattgttgaaggcaacagcaaccagtcctcttatataactcctctttcgcaggtattggctttttgagcctcgttgttacatgcatgatactggtggatggtatatcgaaacatttgggagagacaagaaagggaggacaattccatctcaaagacagtgggatggtttcagtgaacattctgaaaagtaagtttttttagggcttctgaaaagtaagtttcacaagtgttttattgactaaaattggttagtttggttgatacgcacaagatccacaatacttgttagctcagatcttcaatttggaattgcaggagattgcatccagcaatgtatcttgctgctctggcttacagatctttggatcttgaagatgctggaagaagacaatggaatgtgactagtttcctgcaattacccttatctcatatttgtcagctgttcaaaaaaattgttaatggggggaaggggattgacaggacacaatgacaataatgttctttcttgatatgatagctgataaggacatctttctgagactgttgactgttctgcctgtttgatatagagcatgatagcagtatttgcagagcgtgcgataaattatctgacactgttggtaagatagctagaaccctacattacaatgtctttgacttcagtttatgcatatttcttagctaacagtggcatgcaacttacacatagattggacatctggtatatgtttataagaaattaataataattcaatccaaaccaaccgaacaacaactgtgctctgtcatctaaaagtctgttgcaatgtgcagactaagggagtgtgtgaagaaccaattcgtactgattttacattggatcaataagaaggaggttacacctgctaaatttgggcatataggaaatgatggtgccaagctggcatcccgttttcaggtagtgtgcacttcaagttcaggactactttcatgttatctggtacttctttg

SEQ ID NO: 3827 - DNA, 5208 bp, Sorghum bicolor
ttttgggaactcgtcttgccatccgtttcgtatacaatggatgaaatttaggtttttaggattgcatgggtacctagtttgcacccaatatttaaagaaaataagccaccatatccgctctcaaagtctaaagccagaggaaaatgaatgcagattgaccatataactatatacaaaccacctataactactattatgaaagtaacctggaataatcctatgtctatttataaattactaaataggcatcaccaccactaacaaattaaaaaaatattttagtttatgtgccgccataattattaaaagtgcaatatatggcctaaatcaccattttttagtaaaatacaaaaaaaatattttctaatagaaaatacaataagaacgaaattttcaacctaatgtgtggataaaatcattataccaattaacatgggttaaattttaaaagtcaaaatttatattcacatcgtcaggagacataggctataacaaaaggcatcataacggttttaaagatgcatgcatcttgaagacacacatggagtgccatatgggggcgaaaacgctatagatatgaatggataaaacatataaagtaactgataattagacacaacacacatatattatattgctctgcattagaaaatgcacaaagcagctttgcacaaagaaagtaatttagattaaaaatatatgggtagtacctaaagtttttttgggtgtaaagtccaaaatgttaaaataccatttcaggtcacgcaacttgtttcatggtgtcatccaggtccaaataagccccactaagactatctccaacagagctgaccaaaacacaagacctattttaccatttgggttacgcacagtgagagaagacagcaccaaaaacaatcgaactccaacagcgaacgcaaacaaacagaggccctctgccgacaaggtcctggccggtcagtcactccacccagagatttgcgtcatggattccatgcgacgcatatttgccttctcgttcatccggtacccaaaatggctgctcggtttgcgtatgctgttggagcgtgtttctttccgcaaaaacactatgcagaacgcaaaatgcgtttgggtagcgttttgcggaatctgttggagacagcctaaagctccatctttgctctctctatctctctacactccaatccaatgtggcaccacatcaatgtctatttccaccccttcccccaaccttcatcgttctcgttatcaaatgccatgatgtccttatagtgctgaaggtgatgaggccaaagatggtgctatccctaggtggaagatataggttgatgactcctttactagtgttttcccactgcgatcaagaatgagtgtggataagttcatagagctgaatagcactctaagataagtgtgagatctaaacagagcaatttaagagcatgtggcctagattacacataaggacaagttcaaagacctgaaaatgtgttctgagagtttagaggtttgaataatacaccacgttaagttcatagactgctcatgttcgtgtttaactcttattagattattagttgtggtactaaagacaaacttacaagtgtaaatacttatgtatcataaatttctgatccgtcggttgatggactggtatatggaaaaataggtatcaaatttagtggaacttgatatgacatacccttagatcatttttgttctagcattacatatatttgttattgcaattatcacaatatggtacatattctaatagaaaatctacagcttgtcagcttctagaagactataacgcgtggctaaatgacgaatttccactaacgtcaggggttgcgaactcaaaactaaatgccaaattatacagtgcgccagtgactcatccatcagatatgcaacacagcaagcacataaaaaagtttcggagaattgagcagaaagctcactcgttagtcgtttactcccaagaccaggaatccatggagccggcctatgtcgccatcctctccttcgtcttcctcttcttgctccaccgcctcttcggccgccatcgccgccggatcaatggcaagaacaacagagcgcagctgccaccgagccctcccgccatcccggtcttgggtcacctccacctcctagggaagaagccgatccacgcggcgctcgctcgcctcgcggagcgctacgggccggtgttctccctccggctcggctcgcgggaagccgtggtggtgtcctccgcggcatgcgccacggagtgcttcaccgagaacgacgtttgcttcgcgaaccggccgcggttccccacgctcctgcttgtttccttcggcggcgccactctcccgatgtgccgctacggcccgtactggcgcagcatccgccgcgtcgccacggtgcacctcctgtccgcgcaccgcgtgagctgcatgctccccgtcatatccgccgaggtgcgcgcgatggcgcggaggatgtatcgctccgccgccggcggcggcgccgcgagggtcgagctcaagcggaggctgttcgagctctccctcagcgccctgatggaaaccatcgcgcgaaccaagatgtcccgtgccgttgcggacgacgacacggacatgtctccggaggcccaggaattcatgaaggcgctggacgtgttgcttcgtcttctcagtgcggccaattcgtgggactacctgccggtgctacggtggctcgacatgttcggggtgaggaacaagatcctggccgcggtgagcgcaagggacgcgttcctacggcggctcatcgacgcggagcgccggaggctggaggagggggagggcggcgagaacgacgagaagaagagcatgattggggtcctcctctcattgcagaagtcagagccggaggtgtacacggataccacgatcatggctctgtgctcggtaagtgattcttcgtctttgttcttcttgcactggctattacaccactctcgtagctacagtttcagttcccacaattattgaaaatgggattgattgatgctggatcaaactgagaacattggcatagataaagattgttcacaccatcgaatgtttagacacataaatttaaatatagataaaaaataactaactgcacagtttgtatatattttgtgagataaatcttttaagtctagttaatcgataagtagacactgattactatagttatacatgtaccgcaactctaaaaacttttcggagtacgaactaaaaatttgggtcattgtagcactttcgtttgtatttgataattaattaattattatccaattatagactaattagaatcgaaagatttttcacataaattacagacaaattgtgcaattaattattttttatttatatttaatacttcatgcatatgtcatacgattcgatgtgacagaaaatcttaataattttttttttattttttggtggaagtaaacaaggcctaccttttgtaggaacgtttatccaaaaattggcagccaccagtaagctaatgtttatgtttctcacttggttgggacagcctagtatgtcatatctgtgggagcacgtgtgctgccatatctcgctcacgttgacgtgtctgtcgttattataggtttagtagtcaaacaattttatttttaactaaatttataaaagttaatataaaacatttatgaccgccaatagatatacatcacaaaatatatgagttactatgactctgatgagttgtttgcattaggctgtatctaggattatgcagtgtagtttgctcctaattggtttcgtgcataggctatgcaggcttgcacagtgccaacacatactcaatacagcattagctaatacgttagatctgggtgtgttagtagtactgttttatagattttttttactaaatttaagattgattaacttaaaactacgttagatttataccttcgtatgaaggtacaagtgacagcaacgctcctagtagcaaatagaaatgtgacggcaacagacgtatgctcacggcttgactacgccgttttgagttttgcccctctactaattcgcagagcatgttcgctgggggttccgaaacaacggcgacgacggcggaatgggcgatgtcactgctgctaagccacccggacgttctgaagaaagcgcaggcggaaatcgacgcgtccgtggggcactcccgcctgctcggcgccgacgacgtgccgcggctcggctacctccagtgcatcgtcaccgagaccctccggctgtacccggtggtgccgacgctggtgccgcacgagtccacggcggactgcacggtcggcggccaccacgtgccgagcgggacgatgctgctcgtcaacgtgtacgccatccacagggaccccgcgacctgggcggacccagccgcgttcaggccggagcggttcgaggacggcggccgagcccaagggctgttcatgatgccgttcgggatgggacggcgcaagtgccccggagaggccctcgcgctgcggacgctggggctggtcctgggcacgttgatccagtgcttcgactgggagaccgtcggcggcgccgaggtcgacatggccgaaggggtcggcatcacgctcccgagggctgtccctctcgaggccatctgcaagccgcgccatgctatgcttgaggtcctcaagggactgtgagcttgattgtcgttgataccgtgggataataatgtagtattaatgtgtgtgtgtgtgtgtgtgtaatactaactataagtaagctttcttcagtaaagcagttaaatatcttgcgtctgaactctgaagcaatagcttctttcttcattgtttgacactcacaatcttcctggagtatagtaggcaaacagagaagccatggagcatctttagcgcggggccggcgatagatgtgagcatgctaagcccacataaacaagctgagatgggccgtgagttgattcccaggccatgccgccagaatgagaggatttcggcgagatgggccggagttggaaacgcgtttgggctaaccgaacacaaaattttcattatggattgggagttcagtgtgcgtcagagtgacccccgtggatcgggccgcgactctgtccaatcccaggccgacctcaatctgtcctcgccgtttggatgatgatggcacttatttttagaatcat

SEQ ID NO: 3828 - DNA, 7700 bp, Sorghum bicolor
agacaatgtttcctagtgcacggacacccgatctattgtctatgtctagcatgattctgttgtttggtttctttgcagttgagtgtgtttggcatagggaggtaaaagggaagcgatcgagactccccaccatgacactcgtgatctcaactcctttagcgaccagtggtcttttccctcggtccacttatttgagggtcactactgaagtgtagcctagaaaacagggcctcaaagtggggaaccctcaaacgaaatgtaagggtttgtcttgagggttattattagagttgctctaagacaatcataacaatcattacagtgactatggcctttctatggtgactgttagcaacttagcaaccttttgtattctgtgtttaaaaaggcaggcggcagggcaagagtaaaaatgtaaagctgcagtgcactgctcccgagcaaacataaatagaaggactatactctctccgtctcaaaagaatgcaattataagtcgcgtgatagttaaagtggttcacatttaactaagtttctagtaaataatatttacatcagtggctccatcagtttattatgagaatacattttgtaattaatataatagcatttatttgatatcataaatattataatttttaagctgaaagctggtcaaccttaagatttctgtactggaattgtatttttttttgaatggatggagtattaaaaaaagataatagcagcttcatagacgacaaccatttcaggcccaggcaagctcccgagctaggccccaccgggcaccggcccaggctatggaccaagcatgcgaattcgtagcccaggctccaggcccacatgcacctcagcacctgtacgagagtatcccacctcgctcacatgaacccagcccatgcaccgcgggctcacgtccagccgcagagcaccgcgccaccagcgccgtcaccgccgggtcagtcacgctcgccgcctcatcccgccgcatataagaccaaaataaaaaaaaagaaatgcattggtacttgcaggcctagtacttggtcgtcgcggcgcggcgtcaccgtcgtacggagccggagccttgccacaagcccactccctccgccgcacaagagcaagaaaagtaaaacgcgggtgccccgcgtagttgcggaatcacgtccctgtttgtagccatctggtgcctggtgccaccacagaatgttcgtttcccgtaaatcgacgtgctgcttagctatggcctatgggggcctatggctactatctatcacggtccatctatctatcactactaggccatctcatgattcgtgttaggtataggccttgtttactttaaaaaaatttacaaaaattttcagattcctcgtcacatcgaatctttagacacatgcataaagtattaaatatagacaaaaataaaaactaattacacagtttggtcgaaattgacgagacgaatcttttaagcctagttagtccataattgaacaatatttatcaaatacaaacgaaaaagctacagtgtcgattttgcaaaatattttggaactaaacaatgccatacatacatggtagtatgtgttaacgagaggtgagacagccattcgttgttgacggagaagcttagccggttagcccattacttaaaccgggaaaatggcacacatatatcggcatcgggtacaaaatcggatcatcatcatcatcgaacccctagcgcgatcaatgattattcggtgatgtgctcggctcaccagtcacctgtgccatgaaccgggtgtccccactacgaacaattgctcccgtcaatccggtaggtgtaggcgtcccgaggcgaggacgggaggtccgaggggctcggccggccgctcggcatcgcacaaggacggtgcacgtacgcgccacgtcggcacgtccttgggccccgtcacacttgtaccctccaccactctcctctttatcccacgccgagcgccagcagcaggctagctagcagctcccgctccgccgctcgctagtcactagctactggaccgcgcgtctctggctccctccaccgcgccggcgcgcgcgggcagctgccggagccgccctttcatggtccccgccgtggtcgggacgagatgcctccgttcgcattcctccgccgctccctccccgcgaggttcatgctcgcctccacaacttcatcgcttgaaggaatcgagtttctgccaatggtttcgtctctggagtgcctgtctgtggcgatcctgaattgtgtctgtttgttttttttttcctgggcgaaggcttctcgcgggagcgtgcgacggtggagtctgggggagtccgggcgtggcgcgggacgaggaggcgggaggcagcggcagcggactgagcggccggtcgacggggggtccgtccggggagtgctacgcgtgcacgcagcccggggtgccggcgttccactccacgacgtgcgaccaggtgcacttgccggactgggacgccgacgcggggtcctcgctcgtgccggtccaggcgcagcaggtccagccggcatcgtcggcggcgcagcacgcgggcgccgcggcgcggtggctgttcgggcccgtgctggacccgcggagcaagcgcgtgcagcgctggaaccgctggatcctgctcggccgcgccgccgcgctggcggtggacccgctcttcttctacgcgctctccatcggccgcgcggggcagccctgcctctacatggacgcggggctcgccgccgcggtcaccgcgctccggacctgcgccgacgtcgcgcacctcgcgcacgtgctcctgcagttccgcctcgcctacgtctcccgcgagtccctcgtcgtcggctgcggcaagctcgtctgggacgcccgcgccatcgccgcgcactatgcccgatccgtcaagggcctctccttcgacctcttcgtcatcctccccatcccgcaggtcagcctgccccccgaacccagtctaccagtttcttctcactgaaaaaacgttccaagcatacacctgtagacgctgtagcactgtaggtgagggtgagatggatcaaacgccccaaaattatggacatgcctattgtcccgttctgagacagcgcacaacgcccttcagtccttgtcggaactctgcagcagtgtgtagggcaggagtacgttacaggtacaacagtgtccaacagtgagctgatgtgtagaaatgtgcatgtttcggccgctgcacactggacagtgatgctgggtaatgtgcaatgctggcattggcgcgcgcatgtgtgtggtggcagggaggctgcagtttcttgaaagatcatgacccgcagtgattgctgggatggagaattcaggtcggagtgtttggtggttagacgagataagagtctgatgggtttacggaactagtagtacagatcgataatggcgtaacgcaatgatggcggcggtagtatttgaatatgaccttggatgcaatcatgccaagtgaaaaaagaaacagcatcatggcaggactagatttgaaaatgaccatagttacaatgagataaccagcattgatggtagaaaactggatagaaaacgatttgctcatgcctcatggtagggcagcctattatgctcactgtttgtcccgcagcataatactatttcatagctgacactgctcgagagttaagactggactcttatgtggcttttgttctaggcacacttgtctgatttctgttcatgccattggattctttttcctaactatttagtagtctttgtcgttcagatggtcttgtaatttcttcaagtgacagctagtttttgtcgcataatataagaatgcaaattcgtttttgtttcgcatgattgtgcctgtcaattttacgtggggcatggctgcaaggtgtgtgtgtggacagtgcttatttggaccggttggtcaatgatagaaattattaattatatccttttcaaatcaatgaatgggttattgatattgtttatccttgcaaaaacaattcaagttattattgttctaaagggcctaactgattgatcaacagccgacagatctagttgtttagatctcagacattcccacatgttccttttgtcatacaagggtttctagccaccccagttcctttctctacaattttttcgatgctttgcctacgcagtggcggatccaggattcaaaacctgtggtgcgaagcttattggttttaagtcaattaacacaagcagtacacaatcaacatatgtaaacttgaaattttgtgaaggggattaactgtattttggctgtgggcccagcttattcatgtgctgccactgtccctatttatttatcttcaaagagaaagaagggaggcatctcaatgttataaaaaaatttgatagtagtatctataaaaaaaaaatggcaggcaccaattgaacaacacctttatgagagaaaaaaaaaacaggaactgtattgaggactttaatttcagacatgccaatcatctgcatgaagggcctcgaagatgaatataatagttgtctttatgtttttgtatgttctcgagatttcctttatgtcagggtttgcaaagaaacatatagttttgctttgctttactttatagcctttgttttctgaacaaggcgggcggtccatcaattctgcaggtcatcttctggctggttataccaaagttaattagggaagagcaagttaagcttatcatgacaatactgctgctcatgttcatatttcaatttctccccaaggtctaccattgtatacacatcatgaggaaaatgcagaaggtgacgggttacatctttggatcaatatggtggggatttggtttaaatctatttgcctatttcattgcttctcatgtgagtattcccttcctcattacttattgattaaatagtgtggacatggaatcccagagtcgctctcatagtatcatagattgcattgagagtagtaatcattgatttctgattgttgatgacttagtattgtcaatgttctgaaatttcaaaagagaaggtgggggttgtctaatgtccaccaataaacatgtgcaatgatttaaaatttcaaaaaaaaatgcctatataagaattcttggctgcaatttctggttcggccttcaacatataaaattggtattagacttaagaccaatgcatactgaataatatgggtaaattgttcatcaatgttctgccatttccagattgcaggtgggtgctggtatgttcttgcaatccagcgcattgcttcctgcctccaggaagaatgcaagagaaacaacagttgtgatctaatatcgctagcttgttccaaggagatatgttttcaccctccttggtcatcgaatgttaacggatttgcatgtgatacgaacatgacctcatttagtcaacgaaacgtttctacttgtttaagtggaaaaggatcctttgcttatggaatctatttgggggctcttcctgttatatcgagtaattcacttgctgtcaaaatactctatcctatattttggggcctcatgacactcaggtaaccacttttagagatttagtttaatttgtgtgcaacacagtgtctgctctctaggaaactattgtcttaataatctgctatatgttcagaatattctttctttcttatactgtttatcttctttttttgacatcaaactgataccccagttccactaaaaaaaattctagtcttgttacatgcatgtatttctttacatactactttttttaatgatgtttcatattgtgttcaacaactgcatattagtaaacttgtacaattccttgaattgtttggcagtacttttggtaacgatcttgccccaacaagcaatggtattgaggtgatattcagcataatcaatgtcctcagtggtctgatgctcttcacattgctgatcggaaacatacaggtacaacgggtgtcatttttggtccttctgtgtgattgtattgtataacaacgcttcactaactacaacttactgaatctgcaggtgtttctgcacgctgtcctggcaaggaagcggaagatgcagctgcggttccgggacatggaatggtggatgagacggaggcagctgccgtcccgactgaggcaaagggtccgcaaatacgagcgcgaacgctgggccgccgtcaccggagacgaggagatggagatgatcaaggacctgcctgaaggactcaggcgggacatcaagcgctacctctgcctcgagctggttaagcaggtacagtctctgtctctcagaaaagcctttctttagtcagtgaagtaactgaagttcaagttgttgtgatgtttttcagtttgtttttttataaaaaatgtgcagttcttcttacatgaatcatgcatgtgatatgagattgttacaaaatttccccttgccaggttccgctgttccatggcatggacgacctgatcctggacaacatctgcgaccggctgcggcctctggtgttctccagcggggagaaggtgatccgggagggcgaccccgtgcagcgcatggtgttcatcctgcagggcaagctccggagcacgcagccgctgaccaagggcgtggtggcgacgtgcatgctgggcgcgggcaacttcctgggcgacgagctgctgtcgtggtgcctccgccgccccttcgtggaccggctcccggcgtcgtcggccacgttcgagtgcgtggaggcggcgcaggcgttctgcctcgacgcgccggaccttcggttcatcaccgagcacttccggtacaagttcgccaacgagaagctcaagcgcacggcgcgctactactcgtccaactggcggacgtgggccgccgtaaacatccagctcgcgtggcgcaggtacagggcccggacgtcggcgacggacctggcggcgatggctgccccgccgttggcgggcgggcccgacgacggggaccggcggctcagacactacgcggccatgttcatgtcgctccggccgcatgaccacctagagtgagcattagggagggaccatcctagctgtccgctggtcgcgtcatggtgactgtacattgtagtacactgtaatatatggttgtcatcttctttgtaagtgaattagtggctccgaattgtcatcatttaaagaagatcaataataatggagaaataatttcttagtcagattcaattgtcgttttcctcaagaaagaatcaatgcttctgccgcgttcgtctggattgctgcttctgaaccgtcgagtcttgcatgttttgctggtaaaaatactattcgctgaaatattataagagaaaaatattgttcgctgacagaaaaaatacggcttataagataagcgaacgggtagctcaaccattgcggccttagctgcagctgttgagggcactcataagggtactccgaatgcagactctatcatggtttctatgtctatttactatccttgtatttattgaattttgctgatgtaacgctatatttattgatgagagagtaaaaaacaagaaacgacgtctaaacaagaaacgacgtctactcgcgcatcgaagccgaagaaactaacatcgaccgcgttgggaactcttcgctagtttctgtcgatccccttcagatcccctacgccctgtgcccctcctcttccc

SEQ ID NO: 3829 - DNA, 5918 bp, Sorghum bicolor
gtatgtgtatttgacacatatgcagtctgcggcaatgagttgtctcttcgactttgtgtgatggcgtcttgctgtggccgttccaacgttcctaattccgtccgtctctatctctgatcatatttggccagctagcggcaacaggcaggcggcgctatggtccctccatggctccgtacctgactccctgtggtctgtgcctctacggatgccagatggtgatcggtgaagattgaagcgtgaaggctgtactagacgataagtgattgtttgatatacaaaattattttgcttttccaccttgcaattggaatccaatccatacaagcaattaggtatcaagtgattgaagcgaatagttgaggtaaccataatagttattttaaaaagcgctaaactaaatatatgttgcaagttaaaaggaactaaatatacattgcaagttaactattattaatagtgctatatacctcaatcgttataataaaacattagattgttgggcttttactatattgtttgcacaagggccctaaaaatcattgagacggccctgcataaaggccatggcctgatggccatatacatgcacaggctatcatctcctgatacattcagccatgcagacgtttaaacaaccaagctaacctgtccaccggaatccttcccactcactgacacgcaggtcccacccatgcatcagtttccccatctacaaagctggactcgtttctcgctcccgttaggacagagggatatactacaacacatggaggagggaggttgttagagctggcccatagactacatacagctggagatcaattaaagaatgaaataaagtaaacataataatatagtgttgttaatgtctcgcatggtcgccacgggttgttggtacgtccaggttgcagcacctaccgtcgcgatggcgatggggtctacagcgttggttgatgcaccgggctcacgcgctcgcctcgtctcggcctctcagcctgcaatttgcgtggtgcgtcgctggtgatcgatcgatcagtggagcactggagctgctcgttttttttttcccctttctcttttggcacccccaccgacagaaagagggaggaagggctctgtcgtcccgcgtttctttattccttgcaagtgtcggctcgcatgtgtgcgtttagcctctccgcatggggtcatcgcccgctgtcattactcgtttcttaaactacatcgtaaagctttgccactgattgatcgttccggttttgcccctggtgactgggactcgctggctgcagctttcagtgatattactgacgaactagagggagaaaaatacatattacatttgttcgtttggctgataagtcatagtggaaaacatttttagctgattttttataaaaaagtattattgaatagctgatagattcggctgataagctcaaatgaataagctgatatatatggctccacaatcatagcagtatatgaaccaacaatgtgagtccggttgtccctcatgttttgttctatttattaaggattcaaacatttaaactaaggattcgaacgttaccgaacgtgctacttccaaaactcacgtgtcggtgttggatactccacggtagtatcaccacatcttgtaccacgattatcgcagtatcaccacatattgtaccagtatccgtatcctcgtatgccattttgatttgaacccactcctgctatccaaaggcagtcctgtgtgcatttcagtttcccacttaccgttaatcaccgtccctgcacatactagcagcaaaacaggtctagattctcagttttcacaaccgttaatcacctgtccttgtccctaagcgaacatcaccaacagctgtgtgtcaccaggggcattcccgtaaatgcacgccggaggttgaggcgtcacatctactccctcgcggcaagaaaccgttcccgatataaccccacgcccccgcaccgaggcgagctgcgctgcggagcagagtgaggggagtgtcgtgctgccgccgcagtaaaaaacaggggaggggaggcgagacgcggccgctgcctgccgcacatgctttaagtcccactccccaccgccccagatctccgacctcccccattcccccctcgcggccgcaaccgtcgccgccgcagtccggagcaagatcggcgggtagacggacagacgggccggcgggcgcggctctgtatcttatctgtcggtggagaccgcgtgtgtcggttaggcggcgggtggcaaggaagaatggcggcgggcggcagatccgtcgcgtgctgtgccgccgtgctgctcgcggccgcgctgctcctctccgcaccgactaccacaggttcggcacatccgtctctctatgcctgtcctgcttgtgctcgatttcgtgagctggtgagatccgccgcccgatcgccgttgcgtctgatgcaacggagctcggagagctgagatgatgcttccgttgcgcgctgacaaatgcggcccccgtttggttggtactgtcagcgtcggtggcttctagtttgaccccactgcactccaattcagttcgatctttcgagcttgcctcaactatgaatccaattaagtagacttagcttccttcaactatacatggagttgccatctcaggcttatttactagtgccgctgtctgctcaacctgtcgcgagctgctccatatcgagctccttggtagtagatctgctcaggaagtgaacaagctgtccaagatcttacttaattgtagtttgccattaagggatccagttacttttaattgtagttcaccattaggcaaagtgtgtgtgtggatcttcgaaagtgaactaacattgacttcatatattgtgtgaattcatttccatccttctataattgggatctgtgtttgatgtggaacctgtgtttactctctgcagaggcttatgattcgctggatccaaccggcaacatcactataaaatgggatattatgcagtggactcctgacggatatgtcgtaagtagaatgcccactccaacagctgtatctctttcatctccagcctagtaggctctggtcaaattctattgaataacccagtttgacctgtacaatataagtcatgtaacatggccaatggctgaactagaaacatatgtcacagacaacaagaacaacatcccaaatttatgtcagaagtatgctatgcatacgcggttcctgatttcccataaaatacctcctgcaggctgttgtcacaatgtataattttcaacaatttcggcacatcggcgcacctggttggcagcttgggtggacatgggcaaagaaggaggttatatggtcaatggttggggctcagaccactgaacagggtgactgctcaaagttcaagggcaacaccccccattgctgcaagaaagatccaacaattgtcgatttactaccaggcactccatacaacatgcaaattgccaattgctgcaaggcaggagtcataaatacctttaaccaggacccagcaaatgctgcttcctccttccagatcagtgttggtcttgccggaactaccaataaaactgttaaggtgccaaagaacttcactcttaagactccaggccctgggtacacatgtgggcgtgccattgttggcaggccgacaaagttttggagcgcagatgggcgcagggcaacccaagctctaagtaagttgcccatataccgaacttttacattttacttgctatcagttgcttatgtatgttctggagatgaggtacagctacatcatattattcagtgtgttcatattccttgatcatgattccaaatcttcaggttacattacttgctaggttagtaaaaatgaaaacaatctaacaagaggaatttgttcacaaaggaggaatgctaattgatatttgttgacaataagttactactaggctcaataaatgcagtctcttttctttctttttttgtttgttcttcacaaagtaatatattctaatcgcagatagtcataggaagaattccatacaagttgcagttttgtctagattttatagtagagagggttcttaacagagacattctttatctgcagtgacatggaatgtgacctgcacatattcccaatttcttgctcagaagactccatcctgctgtgtctctctctcatcgttttataatgacacaattgtgaactgcccaacatgctcatgtggctgccagaacccaagtgggtcaaactgtgtgaagtgagtttatctgccttttactcttaattcatgtcatattagggttctattttttatctgtaaagtttctaatgaattctattgcatgtcgcagtgaggattcacctaatctacaagctgcaattgatggtcctggcaaatggactggccagcctcttgtacaatgcacttcccacatgtgcccgataagaatccactggcatgtgaagctcaactacaaggaatactggagagtgaaaatcactatcacaaacttcaacttccgcatgaattacacgcagtggaacttagtagctcagcatccaaactttgataacatcactcagttgttcagcttcaactacaaaccacttactccatatgggggtggcataagtaagtaaacttgtcttccttgtagaaaagaataaaaataaaccaacctaccttccctacctctcctgatgtagtttgtctgtcccatttcagatgatacggcaatgttctggggtgtaaaattctacaatgatttgctgatgcaagccggcaaacttggaaatgtgcaatcggaactgcttctccgcaaggactcccggactttcaccttcgataaggggtgggccttcccacgccgggtgtacttcaatggtgataattgtgtcatgccatctcctgaaaattatccatggctgccgaatgcaagccctctaacaagacaaccattgacactcccactcttggtattctgggttgccttggctgctctgttggcttatgcatgatgagtgggatcaagaggtttagcaagcttcaagttgatgtcagattccatgaggtgcactgcaacaggtcatttattcattcaattccatggttgcacagaagagatgaggcgatgccaagaaaaaagttgatatgtgtgtgtgtgtttttgtaagttaaagggccaaaatgtatttcttgtttggtatatagcagccctacagcactttggtgaacttagttactgcaaattaggtaattacagttgcaccttttgtattttatagcaaacccagaatttttcattggattatatgactgctccacttcttgtagtaaatgcaaggcttccctgataatgttttaaagattggtcgaatagaagagacaatggtgattgagataactaaattctggcgtcttgatacattttgctgtagagattattgagctaaattgctaagctacaagcattcactgttcactgaaccaaaattacattactcaaaaacttagaacaagaatgagtgcagcactcgtttatgtgcaactggaaaccacaaactgcaatttgtatgtaataatcgggttacagagaaacaaacgttgccttgcagaatcaattaagattataatctgtcattaaccttggaataagaataattccgttgccttgcagaatcaattaagattataatctctagttcgctggctagagaactctaggagcctaattggttgcgtgttctcacataataaaagcttccggggcctctgagaacggcaaagggatgttttcctggttgttgtgggctactgcatcgttggaaaatgtcctgatgggtatatcctttaatgaaactagatcacagatgtaaacttcaatgaaactataccacagatt

SEQ ID NO: 3830 - DNA, 8796 bp, Sorghum bicolor
agggtggtttatgccccacgttgtaatcacaaccttctatattaattacatagatgcgcgaatctcttgcatattcgaggaaaaaaaaacaatcaacaatgtgccgtaatttgactcgtagttcctcagcctattatcaggcggtggggcgcagtgtatataaccaaagccacagcaatgtcaggcaacggccccagctgttatcattgacgattctactgggctggccggctggctctggctgtggctagttggcgcctgggccatcaggcgtgtcctactcctgtagctgtagacgagttgcatacgctcactgtgcgtaggcaggcgccctctccgctcccgccaccctgacacggtcacacggcgagaggccggccgggacccggcagggacgccaaggacgtcggtcacgtgagaagggacgacgacccgtcgtcggagccgacgggccgatagatgacacgatgaccccgcgacgcgacgtgcactgtgcgcatgcagatgcactggctcgctctcgtatcgtatgctacagtgcagttctccacttccgccagccgcgtccaatcccgcctacacgtacggtacggcgcgcgcgcgcgcgtcaggtcgaccggccggagcgacgaaaccgaggcgggagaggaacaccgcgcgctgcctcgcccgtgccgaccgcccggtcgggtcggtgggtgacggtggtggcgggagtactcctacctccaccgccaccggtaaacagagcttgcactactagcgacggtttggtttccggcggccgttccttcctgcgactgtgcgcagcgtgtgtgatgtgatggcgtggcgccgatctgaagccgcgccgtgccggccgggcgctagagggcgcacccacgcgttgcgtgagcagctctctctgctgctgctggccgggcggggtgtgggcggctttcaggcatctcgcgcggcaccaccgcgggctcgacacgtcctgattcgggccctgtgcgcggcagcgacccggatctccgcctcggattcgccgcccggcccgccttggtccacccgacccttccccgtctctcgccgcgctctcacacggccgaccacaccgtctcgccaccgaccggctttttggtgctcgccagcagcgcggaaccgccgcgtccatccgatccgggccccctctccggccgtgaggcgcggccagggcaaggcaaacgcatacgtacgcttcgagagcctacgacacgagtcagtgatcgacgacgacggtagctagcagctgtgttgtgtattggagggagtatatatgagtatagtagtacagtacttgtacaacagatctctaccggtccacctccacgctagtaaatgtggtatctgtcgtctgtcaagcaaacctatcagcgcccggccgccggtcgaaacctaggagtagctagctaggactagggagcctagtgaccagtgggcgccggtagagcctacctagctagggtgagcaactgaggacgacgcgcaaggcgagatccaatctgcaccccacgaaagaaaagattcttccccgccggcctcgctctcccatccgtctcgctcgttcctctcccagccagagcaagctagcaggcatatagcccaccaccacatgccgcaggggtccctcccccgcgtcgagctaattgagtgggagctagaaaaacccagaggacggacgagcagcgagcgactcggcagcgagcgccgcgcgagctccgtcctgtgtgcggcgtgtgtgtgtgtgtgtgtgtctgcgctagagggtgaacgggatggatcaccttcgtcaataattgcagtacgaacacgcaaatccctagcttattaagagctctcgctgtcgttagctactgcctactgctggtagcgagagaaatcagcacaagggtttgctgaggaggaatcgtcgatttggagaggaaagcagcctgctgcgtgggcgtgactgatcgatcgagagagatcagaccaccatgggccgcgggaaggtggtgctgcagcggatcgagaacaagatcagccggcaggtgaccttcgccaagcgccggaacggcctgctcaagaaggcctacgagctctccatcctctgcgacgccgaggtcgcgctcgtcctcttctcccacgccggccgcctctaccagttctcatcctcctccaagtaatcaaaccaaacccatatatatatatattcgtcgcttcaattcccctctcctctttgttacctaattatattctccatacgtaattcgatctggattttgttctgtccgtcctcacgcgtccttacatgaactcatgagaggtggcgctctttagtttgctggtttgcttttctttctctgttctattgggcaactggtacagtggtacagtactcctctctttcagaaggtttgcgtagaaagtctacaaatggatggggggccggggaaaagcgagcaggaggtcgacacatgtacgcgtgtacaccgtgtatgcatatctgtctgtgtgtgtgtcactcaaggggaaaataaaataaaaagggtttcatttgatgtgcacctcatcagtgtacctggccctgcaaatgtatcagttcatgtttgtgcacatatgcatacgcatagcctgattcaacgcagctgtacgttttagcacgcagttcgactagaatgtgaatatgggtctgttggtccttttgtgaactgtgccttcctggaggcatgttagtggatggtcttagcatatgcatgcacttttgtgagttttaattcggcaattacttcctctttatataacactcctcggcatatacttctctgcacagttaagtttgatatttggttataataacatgatatctagataatgggcaaacatatatagaacattttttgaacttaacatgaattggtttttaacatatgcatgcacttttcccaatagattgcttattgcaagcatctttctttttattataatcagaaatgaatattatttcttttagttgtgatgcattttgtaatttctagtactaatctctcttctcgcattatatgtgatagtaccaagtattatcgcattgttccaaaaaaggtactattgttgcaacaatgtaatgtacgttgagaagatatctatgtgcaatttctactctgtacaaaaacaaagacatctaaagtaccagctagctgtgcatacttttaaccggtcaagattaacggtatattcggataagagaattagttttgtttcttaattgctagaattggtagaatctgttccaaacgcaatgtagccagcatagaaccacttctatgtgaatcagggagaaattaaacgtttaaactttttgaactagaagagataattggagttgttttgcctgattttatttcttctgatcccaatctagctagctagtgaaccggcaaatggctcaataatctgattttgattcagtaagaaatgatttacagaatctgaattcaaaatatttctataaaaatctagaacctaccaaacacaacctactccgctgcgcatgattccataattcatcaccttggacaaaggcacattctctaaactatagctttggctacgattttttatgacatatacaaaaatgaataactatatattctatttaattatttttagactaatcttaggtcatcctaagtggaggggtttcatgactcatccatattttggaaactgtgtagaagagttttatctccataaaactctctctactcccataaaactcttatcatctctcttaattaacacggtgccgcatcagtatatttaatgcccatgaaaatctaataaaaccccattaagactggccttaatattttgtatttgtgttttcaaaattcaaactaaatattttaaaagttcctgatagtcaaagttgtataagtttgacctcaatcttatccaaaatgaaacaattgtggaaccacatggagtacttagtaaagcatgaaataagtatggaacttttgtagagagtacttagtaagtacttagtaaaaataattgtggaaccacctcgagatctatttgtagagagtgttgtcttttaggtcttattgttggagaagactaaaaataagtatggaactttttacctgtagcgctacccaaaggacaaatgagtcttgtattttgggtgacgattgttggagatagtcttagtgctcagattttcttctatatctttcttgaaattaatacttggttttataaaagtttaaaaataatctccatatatagtactctaatccatacatagtccaagctccaaatcatataacttcactggccttctctagtcttatataatcaacagtcgtctagatgatccaaagaactttgactggatcaagctctgacctacaatgccaagccatgcctttaactgagagaagctaataaattttacatagaaagttattaatagacctttaactaagtgttgctgatgcttaattcaaatttctttgaatcaattcttggaagatcctaacctccagagacaaaataatcaaattgtttaacgagaaaggcataatgaacatgtttaaataatgtttaccagcattgtctagctggtatggtttctagtctcttcataagtttttgtttctatatgtgcatgtatatatatttatatatatgaatggatcacttattcattattttattgccttaatatcagtctgcttaagactctagagcgataccagaggtacatctatgcttcagctgatgctgcagtgccatctagcgatgagatgcaggtgtgaggactatccattttactactattgcaacacttataggtgatactacttttatatcatgtgtccctctctacctgcttttactaacattgttcaagttctgaaactattcatatcaggctaacggtttcttcaaacatgatcaattgctaccgagaaataatacctttcataataagaaaactataggtttactattattcttattatttatcattcatttcttgtggaaacactttatcacatcaacctgtgcatttctatttcaatatttcatttttgaggcaatgatttccatgaaaatagattcacactaagcactattgaaaaccctagctctcaacttatttaatttgattgtacaagagcagctgttagtttggacactttttgctccattccttaggatggcaccaagtcaaatgcagtagaaaactgctattgttttaatgcataaaaggtcttcttggagatcaaccagtgcactgatcttctatcaattgacagactcatgaaaatttctgcctatagttgctaaatctgagtagtttcagtttgtttggattttggacagcaggtctagaacaatgtcctcacaaaaataaggacgaaaaccatgagaaacattgaaacaaattgcaatacttgatatagcaatagaagaaaaaaaatgagtatgtattgtatcagccatcaagtgcgatgtgcattggcctagttcatcagttgtatgctactgtcatggtagcagtacttgatcgactgttccggctcatcacaaacaattttgtgtaatgtttcttcatccatgctgtccatgttaacattttttttcgaaaacgcaggagaactgcacttcattctattgagaagactgtccatgttaacattcagtagtttggctagttgcaaatccaacgaagcatctaacacgtgcatggccaataataacttggctggatatatctgcatgtagtcacgcagggagaaatttattattttaataaattaaataaaaattaaagtgctaaactttatctgtatcagttttcaaaatacttttccaatatagatggccaatgctgtgcagctatcatatataggccccgtcatatagtaacatgcaattgtcagactcatagtgctcgttttatgatctagtaagataaatttctacatacagctattctactgtatgtatttaactaagaacagtatatggtactggcgaaattaataatgtcttacatcttttaatggtgatattacagcaattataaaatatttatgtaatccatctgttaaaacaccgaccactattttttattaaaaacattttatcatcaatagtgcacagcaaaaaaaaatattagggcacctttggaaattgcagtacagaaatttcacacgaatcagtttattttcacaggaagaaagcaggaaacaagaaaaaaaaatcctgcaatccaaagggccccttatatttctcatttatatgttctcattttcgctatcatataatataaacataaaaggatcatggtaaaaaaatttggtctgaaaggattagtatcaattaaagagagtagacatgtttaaaataatataatatgcatgttttgaatatcacctctaggatagtttagctgcggactgtatggttagttttgggatttctccatcgaatgtctgatatctgaaaatgcagaataactatcaagaatatgtgaacctgaaggcacgagttgaggttttacaacactcacaaaggtgtgatatttccatataagttcgttcttgtttttcctctatatggttgcactccaatatttgctttgttttggtaaagaaaatactggtgaacccactgcaggaatcttcttggtgaagatctggctccacttagccctagtgaacttgaccagcttgagagtcaagtagacaagaccttgaagcaaataagatcaagaaaggtaaactagctaattaaatgggaagggattcagattcaggatgaatgatgtcaatggtatttttgcgcacaacagaattatagtgaacaaacttttataatgcatgccttgccattttcctcctaccttatatctaaaccaatccatgatagtgcgattggacttgcattcattattcattcaattaactactagatgaatctcacttgaaaagaaaggatgcggtggataaatgttgatttgtgctactttcattttaatttaaatttgaaaattcaaaaataaaagttgaggttacaccatttaggagacatttaacaggtatttaaaacatagatagactgtcttaatgtagatttgtgctacttttattttacctgaaatttggaatgccccaccatgttgctatccaagtaactcttctatgcatgtcttcatttgcatttggcagactcaagtgttacttgatgaactttgcgacttaaagagaaaggtaatatcaccggagcaatgctactctgactctctgtttccatactgaaatccaatatatgcctgagcatccggccctcatctcttgcaggaacaaatgctgcaagatgcaaacagggttctgaaaaggaaggtaagtgacagttgaactggaaaactcgtagcacgcacggttggcactggcagtagtagcccatataaacaatggtccttcagctacctctgcatttgccaccacaactttgaagctgaacgcctgaaccgatgatgccatgtgtatatgcagttcatagctgcagtctctgctttgcaacattccaactctcttttgcattttttgctggatcgtttattgttgggccactatttgtttcagctggacgagtttgaggcagaggctgcttctcccccgcagctagcgtggcaagacgggggcggcatgttgtcccatgaccctccacagccagaacatttcttccaggctctggagagcaacccatctctgcaacctacgtaatctctctctctctctctctctctctctctctctctctctctctctctctctctctcacacacacacacacacacatacacaaagatgtctctgtgtactgaatcctgcactgcttccggccgttatgcagataccatacgatggacatgaaccagcagccagtgccatcgccgggcagctgctaccctcctgattggatggcttagccagtgcttgattccattgccttgagaagtgccgtgtccttcagagatcactacgagttctgttgctgcttttccctgccccttcgctgctatgcaatgcttaccgaactgtccaaatgaccacatggtcatatataggttattgtcgtctttatcttctgttgatcacgtcctgctcagctgctttggcgccgtgcaaaatggcttggcgatgcacgctggaatgggctgaattgattatgtttcgggagtataaatcgcttaacaataagcattggcatgcggcatgcccctctgtttcaaatacaagtatacaccttactattattattattactaactaaagacactgctagttctcacaaaatatactaaaaataattaaaaattctcataagaaattagaaacatcacttggggatccaacgccttctcttcatccaaaacctacaagattttggctggtcattcagaggttgatcgtactagggtggccctctaatttcaagggccctacagtgaacttatcgtcatggtcctagaagaccataaatattcatgtctaattatacttgcaaagagcaaaacaaatcaaacgatatcgtttcaatttaacatgtttaataatgataaataaacagtattaaggctaagacaataaacttatagctctcaaactaagatagttaccttaaatgaagaaaaaaaccatagcagatcagtagcggcaggcaggtaccatatgacgccacgtcgaggaacaagcgaggtagtctgattag

SEQ ID NO: 3831 - DNA, 7408 bp, Sorghum bicolor
ggaggatttaggaaaaaaaactacttgcatgacaacacaaaatgacaatattgggaaagttggatgatggtctaactagtatttcgaaacaaaatgacaaagtctttgtaatcaaatctgagaatgaactgattggaaaccacttttcctgaggcaatgtcgctagcagaaggcctgttccttggacctgttcagcttgtgggcgaggagaatcaacaagcaaagctaccagctgtgtatttgtgtaatgaatcaggtgggataagctcgagcttctgttgaccaatggcctgccagcagtggtttgcactttgtagactccggccaagcatgtcctcgtgtagagtggaagagaagggcgaaaagtcgaaggaacatgatgtgataccacacagctagtagcttggtgggtaggtataagattacgattcgcttaataatggatttttgtttcacgtgggaagagacttggttagtctcaatgtagaattttatagtattatttccaaaactatcatattacatagaatgaaataaaccttttttattagagagtttcattttatagttttatagacatttaattttataattgagatatatttgatattcgtgtcaaaagagttttatttttttatctttattttaaaaatctatattataaaaatacttatgtgacagctcatttgcaaataaaactttaataaaactgtctttatcaaaggatacgttcatcggcacttgagatcttaccactccaggcccgggatggcgaggaatggggttcccgggacggcgagaaatggggtagcaacgaatcctgaatttttcatttgctcttctgttgcacggtcgatctgggaaatgctccagttttggatcctacaacctgtgcaatttctggcgattgctgccgaaccctacttgtgagtcgtgaagccgagagtcgagacaaggcctcacaggagacgggctaaactaaacaagtgggactgatctaaccaagcgataaccactgcaataatataaggccagtcccaatgcatgtttcatgagagtgtcatacacattaaatagggtgccacataagcaaaattgctgacttgacagggtcattaaatgaagaagtttcatcagatgagagaggagtttcatccccatgaaactcatctggctcggttacctagtttagagtcttggtaactgtgtcatgaaactactccctccgtaccagcccatttaatttctcctcagaactttcgtggtccaccagcccatttaatttcttctagggagtagtactttgttgcatgataattggttgagtctgtttagttggcattaaatgcagctcgttggaaccagagaaccatgacttaacgtgcatgattaaatagtggaactcaaattaattgagggtagaatggtcttttgtttgccatactaatatgtctgaaatctgctagaaatagcagtatttggtgacggagggagtatgcattgagactggcctaatacaatctgatctaatctacgggaagtagcacagtaatcctccactaccaggatctatcgttacccgagatggaaatggcggcgattgctgcggagaagacgacccagatgacgccagacagcttaccactctcggagccttgactacacactcctcccaaactgcgtcggcgggtcttaaccccgtgaatcccccaattttcgccgctccaattcgcccatccgtccgcgcgcccctcgccgaccggccgccggcgtcctctcgccggggtagtcagtggcgcacggcgcatcgctgttgctccctccggccggttcctttcgtgtccctcgcttttgagcgggcaacgtccaagagatattatcgctgccgctccgctgccccgcgcaaggccgctcgctgtcccactcgcgcgccacgcctgacgcctcggacccggaggtgtattccctcttcttcccccgtgcttatccgcggcggaatccaatcccctccctcatcacgtccttctcccaggcaaagccccctctttttgggcgtatgcccccgctggcgcgcctatgattcccgccgattcatccgcccgctcggtccagcaacccttgctgctgcagtgctgcggctagttcggtggcggggaaggaggaggaggagggatcttgcagtggggcgaagcggagatgtcgtcgccgttgaacaaccgggggacgtgctcccggagcagctctgcgcggtccaggcacagcgcgcgggtggtggcgcagacgcccgtggacgcgcagctgcacgccgagttcgagagctcccagcgcaacttcgactactcctcgtcggtgagcgccgccatccgaccgtcggtcagcaccagcaccgtctccacctaccaccagaccatgcagcggggcctctacatccagcccttcggctgcctgctcgccgtccacccggacaccttcacgttgctcgcctacagcgagaacgcgcccgagatgctcgacctcacgccacacgcggtccccaccatcgaccagcgggacgcgctcgccgtcggcgccgacgtgcgcacgctcttccgctcgcagagctccgtcgcgctgcacaaggccgccaccttcggggaggtcaacctgctcaaccccatcctcgtgcatgccaggacgtcggggaagcccttctacgccatattgcaccggatcgacgtcggccttgtcatcgaccttgagccggtcaacccagttgacgtgccagtcactgctgcgggtgcgcttaagtcgtacaagctcgccgccaaggccatctccaggctgcagtcgctgcccagcgggaacctgtcgctgctgtgcgatgtgcttgtccgtgaggtgagcgagctcacgggctatgaccgggtcatggcgtacaagttccatgaggatgagcatggtgaggtcatttccgagtgcaggaggtctgatctggagccgtatcttggcctgcactacccagccaccgacatcccgcaggcgtccaggttcttgtttatgaagaacaaagtgaggatgatatgtgattgctctgccactctggtgaagatcattcaggatgatagcctagcacagcctctcagcctctgtggttccaccctcagggcttcccatggttgccatgcacagtacatggcaaacatgggttctgttgcatcgcttgtgatgtcagtgactataagcaatgatgaggaggaagatgttgataccgggagtgaccaacaaccgaaaggcaggaaactgtgggggctggtcgtctgccatcatacaagcccgaggttcgtccctttcccactaaggtacgcttgcgagtttctcttgcaagtatttggcatacagctaaacaaggaggtggaattggctgctcaggcaaaggagaggcacatcctcagaacgcaaacccttctttgtgatatgctcctgcgggatgctcctgttgggatatttacccagtcacctaatgtgatggatctagtaaagtgcgatggagctgcattgtattaccagaaccagcttttgttgctcggatcaacaccctccgagtcagagataaagagcattgccacatggctgcaggagaaccatgatggttcaactgggctgagtactgacagcttagtggaagcaggttatcctggtgctgctgcacttcgtgaagttgtgtgtggcatggcggctataaagatctcttccaaagattttatcttctggttccgatcgcacacaacaaaggagatcaagtggggtggggctaagcatgaaccggttgacgcagatgacaatggcaggaagatgcatccacgatcttcattcaaggccttcttggaggtggttaaatggagaagtgttccctgggaggatgttgaaatggatgctattcattctttgcagttaatattacgtggctccctgcaagatgaagatgccaacagaaacaatgtaaggtccattgtaaaagctccacctgatgatacgaagaagatacaggggctacttgaactaagaacagttacaaacgagatggtccgcttaattgagacagcaaccgcccctgtcttggctgtcgacattgccggtaacataaatggatggaacaataaagctgcagaactaacagggttacctgtaatggaagccatagggaggcctctgatagatcttgttgttgttgattctattgaagtggttaagcggattttggactcagctttacaaggtttgtcactatgctttcagtcaatctttttgtggtccccagcttagtttgaatgtgtccattttttctgtgacagcttaatgcctcctccttgtttcaggaattgaagagcaaaatctggaaatcaagcttaaagcattccatgaacaggaatgcaatggtccaataatcttgatggttaactcctgctgtagtcgggacctttcagagaaagtcattggagtttgctttgtaggacaagatttgaccacgcagaagatgattatggataagtatactaggatacaaggagactatgttgccatagtaaagaaccccagtgagctcatccctcccatatttatgatcaatgatcttggttcctgcttagagtggaataaagctatgcagaagattaccggtatacagagggaagatgtgatagataagttgttaattggggaggtcttcacccttcatgattatggctgtagggtgaaagatcatgctactctaacgaaacttagcatactgatgaatgcagtgatttctggtcaggatcctgagaagctcctttttggtttcttcgacacagatgggaagtatattgaatccttgctgacagtgaacaagagaataaatgctgagggtaagatcactggcgctatttgctttctgcatgtggccagtccagagcttcagcatgctctccaggtgcagaaaatgtctgaacaagctgccacaaacagttttaaggaattaacttacattcatcaagaattaaggaacccactcaatggcatgcaatttacttgcaacttattggagccttccgaattgacagaggagcagaggaaacttctttcatctaatattctctgtcaggaccagctgaaaaagattttacatgacactgatcttgaaagcattgaacagtggtaagtgagaatataaaaagcctatgtgcttctctctagttatctttactttgttaaagcttattccagcatcttatcttctaggcactttagtggttagaatatgccgtttagttgttgggcttgttatgcttttgctgtatcaagtactgctattgcctatatatggaactacaagcaaccagtgttatttctgccatctaaaccaattcccaattccccaattgtggttcttacctgtccaacagtaagttctgtattgtccgaatcatctgtagcaatgttgatttgattatttccattgtttttgtggcaattctagaagggatctatgaaacagcatacactatacataaagatatacttgctttcatattcacatgatgattagaattgctgagacgtgaaatttttgttcattgtactaatgctttgtagtgttaaagatgtatgcatatatgcatgacaatttttactattgataaacaaattcttgctgtcacagctatatggagatgaacacagtagagttcaaccttgaggaagctcttaatacggtcctaatgcaaggcattcctttgggcaaggaaaagcgaatttctattgaacgtgattggccggtggaaatatcacgcatgtacctttacggggacaatttaaggcttcagcaggtcctagcagactatctggcatgcgcccttcaattcacacaaccagctgaaggacctatcgtgctccaggtcattcccaagaaggaaaacattgggtctggcatgcagattgctcatttggagttcaggtaatatgccaatctcatcttggtctttcgatatcagaaaaagtacgcttataagacaagcgaacaatattttcagccatgacttttcagaccagcaaaaaggagtgtatgttgccggaacagataagacctaatgcgcaaatctacttctgaatatcttaactcctgatagttatgtttcctatcactgcaccagccaagatgcagtgatacatgttttttttaaaaaaacaaaatgtagtgatacatgtcacttcaggcatatagttacactttgcagtttgaaacagtggaaatgatccctgtgtaaagttgatgctgtccctgccattctatatacactgcagtgcggtgaatgtaagtaatggtggttaatgggagctgtgtaactgattgactcaatgtgcaggattgtccatccagctccaggcgtccccgaggccctgatacaggagatgttccggcacaacccagaggtgtccagggagggcctcggcctgtacatatgccagaagctggtgaaaacgatgagtggcacggtacagtacctacgagaagccgatacctcatcgttcatcatcctgatagagttcccagtcgcccagctcagcagcaagcggtccaagccttcgacgagtaaattctgacactcatgctcctggaactgcagtgagagttcggccgtgtcaaattctcgggtgtagttggtcaactgactgtgcagtctgaaacatcggttggtcagttctggtatcttagcacgtctgtgtaacgcgggtagatttggttgtttgtatttggagagatataaagctagctggctaggtgtaacgtaacttcgaccgataactgtatgtgaatgatgagctgtgaggatgaataaaagcttcacttgtgttctctattgctcttctgaaaagcccttcacttgcggtgttagcatacacatataccctgtgatttggaaactattgtggattcctgaatttttgactgtacactcggcatatcttgaagcgatggaattgttgaaggttgtctttgactctatttgcttgtctaagtcgtattttttctaccaggtagcggtatttttctcttataataaattaatgaacgaacagccttgaaggacctttaccttcgccctccacccctccctcgtctcttttgctggttccgcttccgccaccgcctataaacctacgcagatacatactgctgttaccaaatgcatcgaatatccacaattttttctaacactgatctagaactaaaatagagaaaaaaaaataatagaaaacaaaattagatacgtatacatcctagctgatacccgtgttacatgttttagctggtatagtaccgattagatttccggacatccattttcacatctaattataaccggataaaataaaaatgagggcagtttgc

SEQ ID NO: 3832 - DNA, 4044 bp, Sorghum bicolor
gaaattaggtttccaacatagtagctagtttcatcgtgacattatataatagaggttaaatgtcaactcttctaagttgcttgaagttaagaggcagtcccaggtacttgcaaagggaatgataagatcaggcaagcaacatggaagaatgttgtccaaataaaacttatatactacaaaagatcggatagaacttgctcttttgcaaggttggttagtagtctagaggctcccccaaatgcatccactaggggcaaaaggcaacaaacactcttctcttaggccttgtttagttttcaaaaaatttcaagatttcccgtcacatcgaatcttgcggcacatgcatgaagtattaaatttaaacgaaaacaaaaactaattacacagtttgcctataaatcgcgagatgaatcttttgaccctaattagtctatgattggacaatatttgccacaaacaaacgaaagtgctacagtacccaaaatccaaaatttttgccaactaaacaaggccttactagatttagaaaaatcacggtgtcaacgatatagagactcaccttggaattagctaatctgtgttggatgcgattgagcaattcttgctgtgtagtcaaatcaaacaatctctaaagcggataaactataaggacaaagagaagaggaggaacaaggtttcttattccagtcccctcacatgctataaccatttgtctcttaataaaagtagacatatatgttgttaatggcacttcttctcttactagatttagaaaaatcacggtgtcaacgatacagagactcaccttggaattagccgatctgtgttggatgggattgagcaattcttgctgtgcagtcaaatcaaacaatctctaaagcggataaactataaggacaaagagaagaggaggaagagggtctccttattccagtcccctcacatgttacaaccatttgtctcttaataaaaatagacgtttaggttgttaatgacagagttgtcatctgtgatcatcataggttttcaaaaccaagatgtagaggtctaataaaatagtcctagcacactaaatcaaatgcttttgcaatatcaagattgaggaacaatgtaggacacttggccttttatgtaaatctgtgattgaattctgtgtaggtatgcttcgccactttatgaaggcactctggcttcttgagactagctggttgatgtctttttcgatagagcttctagaggagcttcatgtgtgaaaacggtttatcaagctaaaaaccaaacaaaaagtgatgaagctaaagtcattttggtctaaaaaacatttgaccttttccggcttcaccatttttggagaaaccaaaatcctgccaaagatgacggaaggcaacctgcctgcctactggacatgatctttgagattaatttagcagcactatgtgttaggctgatcagttctatgtgtttcaggctccttaaaaagttcccttgtttcttactgataccactagttccttggccgtacattggcaggcgtcaggcgatttaaccagttgcatgatctacctgcgcttgagggtttctctgtgctcatgttgatctctttgatctttttggagaaaaagatgcgtttgctcctgcaagaaaaagacgaacccgttcaactcaatcattggatcagtgctgagcttgagcaggacgacaagattttgctgctgcgcctgccaagcactggtcgacagcaaatctaccccaacgggcccggaatctaccgcttgccgtgcatggcatgggctccaatgccagagcagcggacggtaacacacaacacaaggagcttgcgatcgagctgatgaagataaggacctgccctttggaagcacacacacacaaaccaacactgacatcacagcggggtcaggggaagagaggagagggagagccttctttaagatcacaccacaacctcccctcccccctcctcctcattgcttctctctctctctctctctctctctctctctctctctctctctctctccagtctccattgagctcttagattcttgcttgaggtgcagtggcaaggcgcactactacaaacaagctgatcagctgatgctcggtggcttcaggatcttgccaaggttttcgaggtcccattttgcttctcccctgggcttgcagttgcgtttgagtgcacctctgaggctttgattggcccacgcgctccgtacttaagctctccgcctcgtccatggcgttgcagctctcaagacttgctgtctcctgctagctgctgcttctactccatctagctgaaaaggtagaaccgagatcagtcttggaattcgttaaagatcactcttcctctgcaatccgatcacatcgatcagctctcaaaacgaacatcgcgaattgacgcttgttttgtgccacctcctgtctgtccgtgcagagtgtagttggtcttgaattcttggtccggtgctgttggaaatgttcttgaggtcgaagatccaggaggtgatcctgcgcaggagatcgaggtcaatgaacagcgccggcgcgcagaggagccacgtccccgatcaggccgcgagctcgtcgaccgttccatgcgacggcgacagtggcggggccggggcagacgccgccggcagcaagagtgccgctgcacgtgccctgttcgcctccccgaggctgctgcactcatcctccctgcccgccggcaccctcgccttcgccaagagccccgcgcgggacgccgagtccgacacggccttcctcatgagcccgacgtccgtgctcgacgcggctgcggcgttcgcgccaggcacggacggcgtcggcaagcgccgacggccgtggcgggcgcgggacaacaacggcctcgcggacgcgctggactgcagcgaccagcagcaggagcggatcgtcctcgcggcgacgtcgtcctcgtcctcgctggtcaggtcgtgctccctggaccgccgcgtcgagttcggcgtcaagaacaagagctcgtggctgcccctccacgcctgcagcggcagcgaggccacgtcgccggcgccggccgacccgcgggatataatagagccgtcgtcggaggactacacgtgcgtcatctcccgcgggcccaacccaaggacggtgcacatcttcggcgatcgcgtcgtggaaggcagcgccggcgccggcgctgcggcggagagggaggagagctcgccgcggccgatcaatctgccggcgcgcggcgaccggggcttcttcagcctctgaatgatccatccattcgcgcgtagcctgatgatgcctagtaggtaaagaaattgagtttgctgagtgctattattaagatcagccatattgttgctgtattgtattggttgttccatttccatctgatcagatagatgatcatagatgtttttcttgatcagatgatgtactagacgttttgtccaggttgagctgaagctgtgatataaatttcattatgtggttattactagaaaaaaactgcaaatttagctcccagtggttgaactactctgagataaattttgtctccaaactcgtttctgcaaccagcacaatcggaatgtcagatcaaccctgatgacttcagagcactacgagtttctgacagtagctcagaacatctcatctccccaatcctgacaaaaactcagaccatttcccaacgaactccagcattaaccataccaatctttcatagcatgagatgagagcatgctattgctgcatgcccttggtgaggcgagtccacaatcattggtgagagggtttcttgcggcatgaacccatggaaaagagctcaatgattgatgtctcttgtggcgaggccctgcctgccctgctcacccagaccagacgatcgggcgccggggctgtggggcggatgcgcccagcgcccacttgagcggtgcctcgtcgccgtcaggggccccgccgcggtggacacgggtctctctgccccgtggggcctgattccttccccgctcggccatttgtggtctc

SEQ ID NO: 3833 - DNA, 3832 bp, Sorghum bicolor
cgccggcggccggcacgggcacatccgggacctcctgctccggcactggaaggacgcccgtgacacggacgtgttcccggccggtgtacgagcacaggcaagacgatgcgttcggctactactcattcatgcggcgcgcgcgcttctgcctgtgcccgagcgggttcgaggtggcgagcccgcgcgatgtgttgttcttgtgtagtcgaagtgtactaagatgtgcaagactagtctcactttgatgctttgacataaaaccttttagcaatgcttgttttgaaaattgaacatatgcttctaaaactatgtaacttgagtagacacctagaatgtgtagggcttgtttatgcctagttatgtgataagtttatgcctagtatgcttgttcttgtgttggttgggtcaaatatgttttgccattgcaaatgttaagcccgtgatagactcttgggagaggtagtctcttttgtgtcacaaagacacaatatgtgctaaagtgtgaatagctttgtgattaagataacctttcactccaaaggttgctttaattctctcatgaccaaggcaatttgtgctattgtgatccaacacagatgcttacttgcttcatgttgcttgccaaagaagcacatcgttgtatgtgaagtccaacttacaagggcttggatccataagtgggtatttgcaatgtccgtcccgatgagaatgggttgccaagtttaggcttttcatagcaatagtgataactgatcctcgtgttgtatattcatgactagttgcttactcttgaggtgaacatttttttgcataatcttgaaaacttgataaaatgcttagtgcatgtgacttagtgtcattagagaactttgaggctcgcattcacactctctgctcgttatttcagtcttccataaatcaatgtctaaaacaccagaaaacaatgcccgcaacgtgatatatataattcaaaaaacaaaatcacactactacgccagtactacggatacgtagtaatgtaatttttgtgagttggcaagtcttaagaataagtagttgggtgtactggaaaagatttatctaattaatacgtctctatcttttctttttttttgtacttactagtagaatagaaaaacaatatatctctagtgaacaaactctatttctagtcataaatgttatggacacagcagtagactcgctgtaaactggtcaatacgaactgactagactactagagtgcgcacggtgcatctgcctctgcggcagttggcgcacgagctggcctccggggtgtcctactggcgctgccgagctcgtatggtggtggcccggccggcgcccgagagcgagctgcaggccttccccattgtggatgtgcaggtgcagcgcctgccgcctgggcgaacgcgaagacatcgagcgagaaggctcccgatcttcgcgcggccggcggcgctcgagccacggccggggacggggccttatgtctcgccgccggagtggcggctgctccggagcttccgtccgtgcagccttcgtcatccttaccgttgcgctttccaccgtcctcggcacctgctccgtcgacgacatctccagctcgaatgagctgttcgcgtcttcttcttcttcttcgccgacggcatcttctcggcctgcgcgatcagagcagctgctgctcgtctcttcttcgtctctcaccacggtgtgtatgcaaaccgaagctactgctatacatcgctatgattttcctttttccagtttttttccttgcctttactgtgctaccgtgtgcgtccatgcccgtgtgaggcaggagaggagcaggaggacgccgctgaagatgagcgtggagcaggagcttgacgcggcacgtgccgcgatacagcgagcggcgcgtcgtcgtcgtcgtcggcggcgtgtcgttgatcccgccggccgtggcagtggcaacgtaaccacggcggacgagtggttcgaagccggagtcgaccatgctctcgtggccagcgtctaccgcaacccggccgcgttccaccggtgagtactcgatcgacgacggtgacccaaacccaacagaacggaacacaaacgacagccatttgatttttcacgagtacgtacggtacggtgattgcgaggcaagcaggagctacagagaaatggagaggcggttcaaggtgtacgtgtacgaggaaggcgagccgccgatcctgcacgccggcccgtgcaaggacatctacaccatcgagggccgcttcatcgagcagcttgagctcatggcgccgccgccgccggccggcggcggcggcggcgcgcgcacgtcggacccggcgcgcgcccacgccttcttcctgccgttcagcgtctccaagatggtccagttcgcgtaccgccccgacacctacgacaaaacccctctccgcgccatcgtcgccgactacgtccgcgtcgtcgcgtcacggcacccttactggaaccgctccgccggcgccgaccacttcatgctctcctgccacgactgggtcagtgtggtggtggtggtgttggccgaccgctacgaaatctcgaacattttactgacccctctgctgcgtgtgcatgacatgcatggatagggccctgaggcgtcgagggggcacccggagctgcacgcgaacggcatccgcgcgctctgcaacgccaacacctcggagggtttccggccggggcaggacgtgagcgtgccggagatcaacctctacacgggcgacatgccgcggcagctcctggcgccgccggcgccgccgctagcgtcgcgcccgttcctggccttcttcgccggcggccggcacgggcacgtccgtgacctgctgctccggcgatggaagggccacgacccggacgtgttcccggtgtacgagcacgagcacgagcacagccatggacgacgacagcaggacggggccccgcttgactactactggtacatgcggcgcgcgcgcttctgcctgtgcccgagcgggtacgaggtggcgagcccgcgcgtggtggaggccatccacgccgagtgcgtgccggtgatcctctccgacgggtacgcgctgccgttcgccgacgtgctgcggtgggaggcgttctcggtggcggtgccggtcgccgacatccccaggctgagggaggtgctggagcggataccggcgccggaggtggagcggctccagcgaggggtgcgcctggtgaagcgacacttcatgctgcaccagccgccggagaggctggacatgtttaatatgatcctgcattctgtctggctcaggaggcttaaccttagactgaatcgctaatagtaaaggtctttcaacgcaggatgttgtacttgtttcttacacaagagaagcacaatgacaaatgcaataagctcgagttctttactaattgcattgtgcacgacagaataggttgcacaaagtgtcgactacataacactgaataggtttgcagaaggccaaccaagtgtcgttagttgttaccctgtcggcctgtccctgagtaacaatgtgataagaactgtgtgcaaaacaggacattcaggtcaaacaaaaacatatgccaggttgaaaactatgtataggcctcttatatatagaaaaacattgtagtgattcagaaagctaaaagcgaggacatagcaacaggtctttggaacgaaactacagaacactgcgattgtcgtccatagcaaagaaccacctcgcaagaacaagagcaggtcacataacacagcacacaagtgcacagcctcaactcttcaactgtttgcggacatatttcaagtatcctcaca

SEQ ID NO: 3834 - DNA, 3510 bp, Sorghum bicolor
tatctggattcaaacatgtatcacaggaccgcactgctttgacttctgaatgtggttccttgctcgaggaggtacataaccaaatatcatcttgatcaaactttttgttttgagtttaatgattgcataagagttagtcaagacaactgtgtgaattgggctgtggaagtctgcaaatggtttgtaactacattgaccttgaattgagaaattaatattatttagctcgatgtttgctattgctgaatcgtatatgcacttctataatgatttttaactcttcaactatgatgaactagaggtttcatatctggtggtctgttttatgtagtcacactctctttttagttgttcatgacaatgtggttgaatcagttatttcttgttcctgagttcctggtgaattatttgcaggttttagctatagcagatgggttgcatgatgtgtacactctggggaaggaagctgctgcagtgcacagttcccttatgaccaacctttccaaggcttgtcactgcttctctttgttcatcaaatttcgttccccaagatcaatatatttacctgtttttcatgtgcatacatttttagatttcagtatattaaaattttaataacgacatggttttgatatatgtggatcataaaaacattattggccaaagggcctctagtccagttggttagaggaacccggcagcactccttaggtcctgggttcgactccctgtgggagcgaattttcaggctaaggttaaaaaaatcccctcgtctgtcccatgctaaagcacaggtctaaggcccggtcccggtcgtggtcgttctcacataggctacggtgccactggtgtatgggtggagcaggggttcggggtttttttagacctgcgtgagaaggtcttcttcttaatgcaatgcctgggggctgtcttaccccccgcaggtcgattttttttttttaaaaaaacattattggaatatgctaaacaatattcatgtaacatataaatacttatcatcaatattgtttttggtagaacatggcattgcttttttttttaatctgaagaagagcttatgttttgtgctcaacaggcaaatacaattttatttccacttgaagcctgtctatgtgctgatgtaactgttatgtctgaagcgatttcaaaggaaagagagaagaataatgctagtatgcctcttattcatggaaaggcattacaccaatcttataacattaaagttagggaagcttgcaaaactatggaacctctggtgggtccactcactgagaatgcgaaggaactgcattccatggtaatgaagcttggacacatctcaagtcttcatgctgggaatcttcacaaggtacttagctaagaaatgttatatgttgagagcatgttaatcatttgcaatcacagtttgaaatttaagtgaaaataataaaagaggtgaatattttgcaaagcttcaggtgcagtaatatatagcagaagcttgaccatgtttgaacttcctggtcaatgtatgcgaatctgaatttgtaaatactcatgtgacgtacagacatttctactttgtctatttagtcattttttattgctattttttacaaggaatatagatgtattttggtgtacatacataagtttaacactaaccctttctttttgctacatttgtctaggtatctattatctcactcatctttttttcttattcacaggctctagaagttccaggagaaagggaatctgtgagatcccaggatatgctctcaacacatcctgatcttttgcaaagtgatccatcaactgagaaggatagagcatctccaggtggcacagattgtggttcttcagatttagaaatgaataccgacgtttctttgcaagatggatgttggatttcacctccagagcactcatatactagcagttctggatgtactacaggattgacccagattagttcttatgacaacttagagaaaatagatgctcttatggatgatggggctgaaatagaaggtcctggtgctactgaccaggaaacaaaagacagtagcaacaatcaggaagttgaaaccgatttggtggagggaaggattgaaagtgcagataacagtgcagcagccttcaaacaagttagaggacaagaatgtgacaacagcgatcctaaatcctatagtgactcgactactcgagtgagcagaggtaagacaaaaataaaagggttgatggcctgtatctgatacttctttttggttttactgaattgttttgtctgacagaaaactatgccgctctgaaaactaatataagagatgtattgtgtatctcgacacttaaaattatcagatcattattgttttaatctgtttgtaaatgtgcaggcatcactatgtcgacaccgaataattttcatctaagaagcaactaaaattgcatatactgtaaaaataataataagacattagacatctttaacttaatcaaccttatactcagtatgctatctatttttggtttatataagaaagattaatgcaaaaaggtgagtaattttctctcatgttagttctttgtgggagattgaatattgtaaatactcatacctttgtattttcatagtcttttttgtgtctgagaacttcttagcttctaatcaagtaaatgccttaagcattctgaagctgaaacaaatttacaactagcatttgcttgttctcattgatggcaacaggtaaaaatccttttgctctgtccatcctgaagcaagtggagcataagttacatggacaggatatagatggtaccaggtgggcaattaagaggaagaattttagcagtcaattttatttatttacatttcttgttttattgatctcatgttattctgtcaaggtccttgaatatttctgagcaagttgattatcttcttaaacaagcaacaagcatcgacaacttatgcaatatgtacgagggatggacaccttggatatgattcaaagatgtgacttcattgtgcatgggcaaattgtccaggtaactttttccacaatggttaaactgaatttcattactagcgtaacgaaattacatagttctaaattgtccaggactccaggtaataacttgatattatgcccaagcttacaatggttacctgaatcttttctatttgccttactttatgttttttaaaccataggtctccttatgtgtggctgctggttatcgttataacgtacagcaatctttctgtcacttcttttttttactgatgttctcaagataaaactgaagctggtgtgtatgcggtggcggtgacttaggagggcactctgtggtaatagactgctgactgctagaagaaactaagcttgatatatcttagaaattgatcggtttctgcctaatgaaaaggatgttaatgatgtacacttgagcagctgtattggctttggctctgaccccagggtaactagtgatatgcaacctctg

SEQ ID NO: 3835 - DNA, 13044 bp, Sorghum bicolor
ttgacagcttgagcagagtccaatggtgccatgtgagatttttccttctgtggatctatcccagtctcagcttttgcataaaagcaactgtaatgtgatcaaaactccaaccatcaaactcaacattcgaaccgagcacgatatctgagcatcgaaccctttttttcagaagccaaaattgaacatgagacctaagagagagaatggatcaaacatcgtggatcgtgacatcctagctttatatttaaacgtgacccgtacgccagtgttaagattgtggatttaggccttgtttagttcaccctgaaaaccaaattttttttaatatttctcatcacatcgaatcttgcggcacatgtatgagacactaaatatagacgaaaataaaaaataattgcacagtttacctgtaaattgtgagatgaatcttttaaggctagttacttcatgattgaacaatgtttgtcaaataaaaacgaaagtgctacagttccgaaaactaaaaaaaaaatcagaactaaacaaggttgtagcccagagagataggttaaacaaacatatataaaggcatatattgtcaacttcggattcgtcttagtacagttgattaaggtagatgaaagtgcaactaaacaaggctttttatgtgaataatgatagtggtggaataactctaaattaactcttatacataaagtaaaaatttatcatgtagagtgaatttgggttgtacgaaagtcagattgctatttatttactagttattagataataatctaggtatagttgaatactttaatataggttaggaaaaaaaacataggcatcattccaatttacccatgcaagcatttagatgtagaattttgcttgaagatgagtaagcaaaagatgcatgtagttgttgttaatcccattcaataccttcatggtcgtcatcatgttctcgtatttgttgcccacctgatgttcacatgagaatcagggacaaaagtttaacagtgcaaatggatttgagtcatttagaatttgggttatggggtgctacatagatggagagaaaataagtgtgtatagtttgcaaaacacacatccatgtcacactgttagcgttagacaatgattattatttttttgagagggagttagaagttgtttggttgtcagccgtagttcgccactgcatgagtggcgtcgccaaagctatgatggtaaaatgggcagcctaacttttagcgtgatttcctgcttcaaatagttgaaaaacctgtggcgagcctcaagctactaatgaaccaaacagcagcctcagatgtgtggtagccttatatttgcgatggcgggcaatggccagcaaccaaatactctcttagatgaatgaccatagtctaagcctctaaggtgagagtaagtgatgaagtacaacaacaagaaccaacactctagcaggagtatgcaccaagctttaaacaacttcactttattttttaattaaggaaaaaagaagctttaggccttgtttagttcaccccgaaatccaaaaaaatttcaagattccccatcacatcgaatcttacggcacatgcatgaagcattaaatatagacgaaaataaaaactaactacacagtttgtctgtaaatcgtgagacgaatcttttgatcctagttagtttatgattagataatatttgtcaaataaaaacgaaagtgctacagtagcgaaatccgaaattttttcggaactaaacaaggccttaaataatatgcaatcgaagagctagattaaaagcctgtactgagcttacctggagttgcaaaaacaaacaaacacacagtaaaaagtgaatgatctcgtttgcatatctttagccctgtataatttcgaaaattacagagctatgcgaaattacgcttggaaacgaaactttccaaaacacccctgatcattctccatctccactcccacaacctctctctggtctctccggcgtcccgactgcgagccccgccgcgaagccccaccgatatggcgacagccgatggcgccgcaccgccggcaatggacgagaaggcgcggcgcacgcgtgacctccttgctagcttctacaacaccgacccgtcggcggccgccggggccgcggcccccgcgtccctggcgcggccgtcccctacagccgcgcccgcatcgcccctcgactccatcaactccgcctccttcgatcccgacatctacatgaatgttctggttagtgcttgtgtctgatcccaactccgtcccttttcctggtctctcagatccagctccctgcttctcaggtcggatagtatagttggtgacctgttgcgtagaatatgaatgaatgtgatgaactttggtatgtaataacccctgtatttattaatctctttctggaattgacctgattagcccatcgcgtttgtctcgagatcaactgagacaaaatgtcatatcctatgatgctgttagcttttctatttaaacacagtcggttgtgcaatttgtgtatacgctactaaaagttctgatgtgtgtgtagatcatggagttgagttctgggtgcaatttgttccagcatcttgtaattataaatataatcgtgctcaggaaatagaatcctcaagacatgatatcttaggcagtgagttacatacataacatgaatcatagaaagcttacaaaaacagatgcaattgaaattctgcattagagcacttctaacagtatgtacatagtgtgcttgctgtataactacactgttgaattttgcacacaagtctagattgttttttttaactaagatctcaatcatatttattttaactaggagcatttccatgcagcatatttgagttatgcttgcacaggtatccttagagtctgggatctagacacatgaatgatgtgaattagaaagactaaatttgttgccatgctacttatttagttagagttagactacttgttatagcagcattacctttttatagtttcagtttactcatatagtttgcttatgctacatagtttaccatatagtttgcttatgctacatagtttacactggtattacctttttatattatcacttttctgttctgtacgtagcttactggcattctgattatatgaaatttagcatgacctatcactcaattggcctttttctgcgtatatttgttgcatgccttgccattttcacttgaatggcttgagttattcacactgttccatacttggattgctgcaaatggttttataagaaagctgaaatggttttgaccctttttctatatggacctaggatatctttggtttgtgccctcaactgaccttgttaaatgattggctagctgttcaagttttttctaatactgatgaggcaccaaggtctggtaaaaaactgtattggatgtgatcaaagggctatgtgcttgccagaatttcacagacatttaaacataggcccaacctacataccctaatatgctattgctagtgtaatagcgtttgttgaaagcgtaaattagtctgacatgatatcgtgtttagtttgttagtaagagtaggatgctcatgctcgctactcatgtggttttcaggtgcagcaatccaatctggaaggccttctacaaaggcatgtgaagatggctgctgagatcaagaacctagacacagatttacagatgctagtgtatgagaattataacaagtttattagtgcaactgacactataaaaaggtgatgctatttccttactgataaatcagacttctccttctgttaatgagtttgatgttctagtactattattttctatagttgtaatgtgtatcctatctatctgtgatttttttcccacaggatgaagactaacattgttgggatggagacaaatatggaccagctccttgcaaaggtatgcattatctcgttgttggtgcatggctgactcatttttacatggttgatccaacctatttttgccttttccagataacatcagtgcaatcaaaaagcgacacagtaaatacatctctttttgacaaaagggaaaacatcgagaaattacatcgtacacgcaatctgctccggaaagttcaagtatatactctcctgcttacattattaatcttagaactatgatttatgctgctccattagtcattgttgtgtcgagaactaacaatttgtagttacacaaatatgcaaatttctgcaataatataataatatggttaaacctaaggctactcccaatgggtggtatcatgcacatcaattaggtgctgcatagacatagaattttttattgatgcagaattaattaggagagaaacaaagcctaaaacgaagtccaatattttggcaccaacccaatagcttgggcccactctcataaacacaacataacagcaattaattattttttaactcttaagaaacaacagtatagtactatgtgttggagggattttatctacacatgaatttggtgatctttgtatgatttggcagtcttggatgtaacaacatgatattatgcactgggagtagcctaagtgtaagtggtatatatatgtgtcattgttgttgtcccagcccttgtgttgtgggaggccctagtgatctacatgtttagtttaacatgaagttttggtgttgcatagggaatttcacattaagacatgccatgaagatgtttgttcaagactacttggtcaatagtttactctgtattctttttttttttgaaaaaaactctccagggtatttctaccaccagtgaattctaataactaattaaatgtaggcgcagaaaaaagaaaacttttgataaaatgttgctttctatcaacttctgttgcagttcatatatgaccttccaactcggcttaacaaatgcatcaagaccgaagcatatgcagatgctgtcaggttttttactggagcaaaacctatttttgaggtaaatttgagctaagtgaaattcctcatcttagaaactccctgcaataccttttaccatgctctttcatgtacttctgtattataggcctatggagatacgtcttttcaagactgtaaaaaggcatccgaggaggcaatggatttagttatacaacaccttcaggtaactgtgcacattttgactcaaatttgtatggaatatgacataattatttgtccaaatgccatctactacttatcatttgttacataattgcattattctaattttgtagatttttaatactatttactgcccataaatttcaggcaaagttatactcagattctgaacctattgaagcaagagcagaagctgtagttctccttaaacaattgaactttccggtatgtattttatcaatgctagttaggctatgccagagctcctctctgtattgcaatgtactacttgcatgttttgcccttttttttctgtaaatgcccatcgttttttttttcataatttcatatgtcaacaggtggacaacttaaaatcgaatctacttgagaagcttgaagattgcctcttgaatttccagaatgagcctacgcaggtgtgcatgtgtctatatcagaatattacaactgaacagtttccatttagtattgtatggaagttacacagtttgggatcggcactgcttctgttacctgtattactactaagtctgcacactatgtaatgcgatgttgctcatgctgtaacatgcagcctagttgtaatgcccatttatgcgtttgccctactgtattgattaatcatctaatacctcgtgctattttttggttaggcttcaattggtgacatctcaaagacattccgtgcttatttaataatatttcctgattcggaaaggcgtctcattgaacttgcacaagctttgttctcaaagtaagtttggttcagtccttatgcaactgtgccatcaaacagtcggctgtccttagaccattaactgcatcctgccaattcttttctgttttagctcccagaatataaaccgagattacttatgtgaagaactgaagatacatgacatgccttcttcctttaataatatcaacattctaatcctggaagataaagcctctgagttgtcgcgtgtccataaagctttgtagatataacttcagatgattatttttctcactttgttttaaattttaaattctaaattgttgagaagaccaaatcatcttgcgggtggatattgaaattggtcttactgctttgatttgcctgggagtgatggaggcctggggcgggggactagggggcactccccctattctacctctgttcctgctaatattaggggctgaggttgatcaggcagctttgttggaaataatcctgtgtctaggtgtatgctagtgtctaggttcatagccttaactttaccttaatttcagcatggagtaataggagcaaaggctgaatacgtgtgcaatattcttcattactaggaggctatcacagcctgatttgctcacggttgtctataagtagaagagaaaatcagaaaaggttaagtcatttccagccaccaaacttgtgtttgtatgtgttcttttgtgtgtgagttcctggttgtccttttgaaggctatgtctttcaagctgcatctgccttttgaacctgttgctagatgggaaaggagccttgagtgtatgaacaacctggtgcatgtcgtatattttcaaatgcagagagaattggaagtgaaaaaaccttggggaatattttctttatctgcttcctaccattctacttatgagctgttacttattgtgcaatggggatagtagataattactccaatacttggttctgtgtatgagataaactgacacatttatcttctccgtatggcctatggttgctttgttgttttatcttacatttctactagattcatcacatatacacttgtctttttcttttgatgaagccgatatgaaacagtcagagagaatctgaagaaaagaattccatcaacagatctgctggcaatactacgtaagaactttatctatattctatgctatagcaccattgcaattttatttacagaatatgcttagaacaatagtgtaaacttctattggccagtgatcattggaatttgaattcatatgtcaaaagacgttccctctgtaggaaagcctccttagtcttaacatctttggtattcgttcagtggtatttttacctttaggaccagttagctgttgagttcactatgctgtattgtattgacattgaaacttactaattgtactgagattttgctgttatgacttgaataggattcttttgaagtgctgcttctgcaatgccaacaatggtcttgcttaagaatttgatattattgtaagattattgatctgtttaaatttaatactactattctttggtgatcaaaggatccttatgggaggatgcaaccgccatcgatgaagttattccagaggctgcgctaccagctttttctttggaggttactatcagatttaatgttacacttttctctcttcactcaacttttatgttctgcctagaatcaagtagcaattatgtggttaaatgtgcataatatacttcttagttgtcctgtaactcctgttcattcctcctggcagtttcttactttggaaatttggcttaaaccaaagtgcttttctgtgctgagtattgctatctgcttccactaactataggggacatatttttagagttaggtacaatgctcctggaggcattggataatatggcagataatgatgtcttgttctttaagacagtgactcctgtcatagcagtggacaagtccaccaattgatgtctagaattaggtttgtcactgtggtgcttgactcctgtcatagtgactcctgccataagagtggtgcttggttagatggggtagggacctctggttaggttcctggttgtcggtcgtcagatgtctcgtaggtgaaatgttgtaagtgtcccaacctatctcatgtatggtactggcatgagttaccttttatttcctctctataatacaatgatgcgcagctcctgtgtattcgagaaaaaaaataatgaagtgataaataactggtagccaccagttctcagaattatatcacgtcaattgttactgttagtgttgggacatatttttttgaagactgttgggacatatttgaagcattggtttgctatatgggcgtataattattatttattagatctattgtcttggaaataatattctaaaatcagttgctagtatttattatttcctcaatggtgattatagtattatgtttattttcatatgtaacatgtagcagtactactcagtagactaagtttttctctgcctgacaacctatactttgatttagaaatcagcaaaaactgttttgtactatatgtttagctgagaattgtttgttagtatactttggctgtatagtgttactgtataggtcatatgatatggttcttttggaaatattgaaggtttattttcttccctcttatattttcttattcagggataaatgaatatacttaaaaacacagttctgtaattgctgcttttgatatctttgatgtccacttcatatttcttgatactgattttgcgcgtggcaaaaaaattttctactggcagactactcgagacattattaggcaacacatagcaactgcatttctccatcttcaaagtgaaatatcaggtccccacctcccaccatactttactctgcaatctgcatttttttctccagaacttcattccggattgaagttcagatgtgatttaccagtaacttattttggtttagcttgtaatggtacaagtatgaaaaaaattcacatatgttgtacatgggtgagcagaggcactggttaggacacgttcaacatcaaatgagaagttagaagagtcacagctgcaaactgctatggaggcaagcaaaatcaaagtatcccaaggatgcatagatctcctgcaggtacatacttagaagcttcagaacttctgaacacccacccgttttgtcatgttgtcaagcaacataaatgtaacacacaatcaaagttcatgactttctcatgctctgttttaatgttatatttctggccatgctgcttccaggaatttcatcatctgatagatggcaatatagagttgcttgtaaagctgagagatttgattattgactgggtacaagaaggttttcaagattttttccagaaacttgatgggcattttcatgtgctctctgggagaagcaaaaagaaatcacaagagtcaactatgcattctgtgcaaattgataaggtcccaacagtcttggtacttatgcttgcacaactctgtgtttacattgaacaaacaacagttcctaaagttacagaggtacgttgcatcgtttccaatcacttggccactgtccaatgtgaagcttcataatgaaacaatcctggcttctgttaccttttttaggagctagctgcttctttttttggaggtggtgcacgtagctacgaatatggaccaccttttgtgcctggagaaatatgtcggctatatcgttcatcaggagagaaattcttgcaccatgtaggaagcattctttatcttatgttctttttcattttattgttcattgtttctggattttatgtagtagaagttttatcccactgccccatatggtggctttttttctttgcttcccattaactgctgcatggaattaaataactacataaagatagaaaagaaggcttgcagagtagtattttctcttgtacttttggatctccttgttacaaaaagttgggtgcactcttgtaacagggagaaagtgctgtgtgcactatttagtcttttaatttttttagaaccataattctattgcattgtggatacatttaactccgtaaacaatgttagtacatgcatgatatcttgtatagtgtcatgaaaacatagtatccatagtgccatgccattactttctctagaattttgtttccaaaagcaaccattttcagtctctaagcagccaaggcgcagtttacatgtgaagggtcaatctcccgtgccatgggagcataatcagaaacatactcagaaactctatgaaatagcttaatccttttctcctttatacatttttttttaaaaaagtggatctggcagtgtcaataactggaatattgtgttccttgacgcagtacataaatctgaagactcagaagatctctaaacttcttaataagcgatttacaacaccagtttggattaaggttagcctttgtattcaacagaatatttagtgattttgcttttttctggttttgttactcagatttacatttcctttttctttatatgttcaactaaaacagcacaaggaacctagggaagtgaacatgtttgttgatctacttctcctagaggtttgtccagttccttttcctattgcattatgtgtacttataatgctagtatggctacaaattcataattgagcatgcagtaccaagccaatttaggtattggagtctgctttcagaaaataagttcttactggaaattccatttctaaagttttctctacgtaaacggtcatcatttttcttttagatcaatggtgtggtatctgaagtcaagcagatcttacctggtatagttcggcgacatcggcattctgatagcactggtagcacgacttcctccagaagcaatccaatgcgagaagatatgttgaaccgatcaaacacacatcgtgctagaagtcagtttttagaaaaccacctggcaaagttattcgagcagaaaatggaaatattcaccaaagttgaatacacacaggtaatctcccagaattaattacttccctttccttttagatgtaaaaagttgttatcagcttttggtttcattaatcttttagcttgttaaatatttggacaagggacataatactgcatcagtaatcacaatggtgatcttgtagttatatgggttataacagaagttgaaagattttaatacacattctgactgtatgcgttgatagttttgctgttgtcagaattttctcaagtgcatcgcatacttgctcaggaaattagttatttccaacagctgagaggaatatttttatttacttgtgctcttgtgacaagatgaatataacaaacttatagttatgctataatgttatccaggagaattgctaaaggatcacctattcaatgggactactatagacttgtataacctgatcacttttgtgcatcatgtagtttcattaggttgcaggaatataatgcaccatgctgtgagactggcaatttttttgtcaacattttaggtagtattttaacaacttgttaacattgcagtcatatgaggttgtcccagttggaatggcatgataatttttggagttcttctatgcttctccctcttaaccatctgaacccctttcaaaatcaacggaggggaacagacatagaatgctcatctagtttatattccaagtttttcaaaataaataggcaaaaataaaacctgctgatttacccaagtatcagaatcagtcgcctccctctcgtaacacttgttatgttactgcaaatcccacagattctcgtaaaatgtacaacaatgccaactattctcgtaaaatctacatcaatgccaactgcatcatagtttttagaatgcagtatctgattgaggtcatagagcagcttatcaattaaatttggtgatactattagggagatattctatagttcaagtatattttgtgatactattaggtagctgcttttgactgtaattccttgtattctgggtaaatttcaggaatctgttatttctactgtcctcaagctctgcctgaaaagcttgcaagaatatgtccgtcttcagactttcaacagaagtggatttcagcagattcagctggatatggaatttctcaagacctcccttaaggaatttgtggatgatgaagcagctatcagctttttactcaaagaggtcagatactgccactatatatttcaacttgccaccggttaatttttcctcagaccaatcaaaactgcacttgtgtgtaattgttccgtattgtgcttacctgtaactcagatcttcatatctctgcaggtgaacaatgctgcccacgagagatgtcttgacccaatccctcttgagccccccatattagataagctcataaatgcaaaactagaaaaaattaaagaggaaaacccaaatatgcggtagctatgcacagattggtatggtttactagaattcagttctgtccatttgaatgcaattcatatgtttgcaacttcataggtctaggccacatagcatgttgttttccgcatgtaaatctggagactggagtcagactcagaattgaataacactccccaaatgtatgctagtatacttaatttgaggcggctgagctcagcttggcatccacttgcagccttgcttgtcaagcggccatcaagttgtcttctgtgcattgttgtttaatcccgggtcaggagagctcttgtctgaatttaatcagatgggtgttgtgaagtttttgaatgaaagataggtaaatacagttttctgaggacactgcacatatataaactaagtaagcattctttaactgtacttctcatgatgaacttatagtaaatgatattggtacttcaagaatgtcttactgtactttcacattattggcagactggctactatgatcaagcacctaagggcactaactctaatagattcaccatttggaaaccgaggacagttatcatgatggtgaagatggtttgttgggagtgcgacttccctttatgcaccctgatttttttttttatttctcaccttttgttgtatcatcctttctttcaattatagtttcctgtggtacatgtcactttttttaccttcg

SEQ ID NO: 3836 - DNA, 9970 bp, Sorghum bicolor; identical to SEQ ID NO: 3529

SEQ ID NO: 3837 - DNA, 4882 bp, Sorghum bicolor
atcaagctccacacgctgtcggcaagggaactctcgccgccgcgggtcatgaggccttgtttagttcgcaaaaattttcaaaattctccgtcacatcgaatttttggtcgcatgcataaaacattaaatataaacaaaaataaaaactaactgtatagtttatctgtaatttgtgagataaatcttttgatcctagttactctgtgattggacaatgtttgtcaaataaaaacgaaatgctacagtagcaaaaaaacaaaatttttttaccaatctgaattcatctcaccgccgccacctaggcaccctcagctccgccatcactagggccttgtttagttcccaaaaaattttgcaaaatttttcagatttcccgtcacatcgaatctttagacacatgcatgaagtattaaatgtaataaaaataaaaactaattacacagtttagtcgaaattgacgagacgaatcttttaagcctagtttatcaaatacaaacgaaaaagctacaatatcgattttgtaaaaaatattttggaactaaacaaggcctaggatctcttgactccactgccaccaggagaccctcggctcgaccgccaccatggaactctcgactctgccgccactagggtgaaggcacgagtctttattttcaacggttttggtcaaatccattcgtaaaaatagtaggttcactggatatccgaacagcaagtttggatctgggttgaaaaaattgacaggcctgcaatttataagcgtttcggcccaattaccgggcatcaaacaggccaaactctatatatttgtttggccaacggcccaatggccagcgcagcgtcaggcagccagcactcccgctcccccatttcaaaatttgaaaatatcagcccggcaccgacgaagcggaaccacccgtccaaatcgacaccaacgtcgagcgtctcacctcactcacctataaacgggccccaccatattcctggcccacagacaggtaagatgtcgctgcttgtgctgtcttcccgcaccgaacgttaggtgacccgagaatagatcaccaactggtcttttttagagccacacaccttgggagtacacacagtcgtggacacgcacaaaattggagtacaagaaggtctgtggggcccatttaacagacaaataataggcagcggtgggtcgcgggctagtcgcaactcaggtaccaataaaacgcgagtagttttgaaatattttgctcctaagcccctgtaaggtttttctttttatgtcagcttgatccagagtcccagattagccgccttccgaccgttgaggagcccgaaccgtggaattaatcaaaactctaggggctgaaacgcaaaaaaccgtctcctcgctttcgcttcgccggcaatccatcgtggcccaggctgtcgttccgttctataaagcgagccgagtgggaggagccggaaccctagccgagcaccgcagagacaggcgtcttcgtactcgcctatctccgcgactcaaagcttctcccccttctcccatttcccaccgccgccgccgttccacccttccgacgacaccatgagggagtgcatctcgatccacatcggccaggccggtatccaggttggaaacgcgtgctgggagctctactgcctcgagcatggcattcaggtaacgatccgtccatttcttcttccgtagttcctttatcgcgctgttgacgtagatctgttagcggtatggtagtttcatcgctgatgtgtgctggatcttgcgggattgaatcgggagaggaaatagcatttcatatcggtagatctgtacgtatctggctgtatatgatggtggttgcccagatccgctttcgctaagtctgatccgtagatctggtgaaatggtgtctgatccaggtcgctattatttgttttctttaattttggatagaatatttgaatagggattactcgatgttgcacattattttccatgatccagtaaatttagtaattatatagcgtatttgttgctgattttgcctatacgtgtggtagacctgagtgctctgaaagtttaaatgcactgttactttgaatctgtaaatataaatattcataggccaagtttgtattgcctgtttatatgtagacccttgatgaacagatgcagactacagtatgttaatttgatgtacaaccattggtattgttattagatctgcaataaatcagtacccatcaggcttaggcaccttaacccaattgcctttagctgtttagatctgttagaaatgggatacagactggcattctgtgttatgtagtcctagttgtcattagtagggctaaaagctgtttacacgtttgaaatgtttgtaatctgtaatttaatcatggttcccttggacattggaatcgtgtgtatagtttgaaacaacggtcattcaggcacatgataccttgaagattatgcatctgtctgatgtactacagtactagtgtaggcacatgatacattttaatcgactgcatttgaattatatggtctccttttgcaatttgcataaataacactgctgtttgtattctattcaggctgatggccagatgcctggtgacaagaccgttgggggaggtgatgatgctttcaacaccttcttcagtgagactggcgctgggaagcatgtcccccgtgctgtgtttgttgaccttgagccaactgtcatcgatgaggtgaggactggcacttaccgccagctcttccaccctgagcagctcatcagtggcaaggaggatgcagccaacaactttgcccgtggtcactacaccagtaagtgactgatctgaacttcatttcacattgctcttggatattcagtctgtaatgatcatcttacttaaacttgatttgcttgtcttgcagttggcaaggagattgttgacctgtgccttgatcgcatcaggaagcttgcagacaactgcactggtctccagggtttccttgtcttcaatgctgttggtggaggaacgggctctggacttggttccctcctcttggagcgtctgtctgttgattatggcaagaagtccaagcttgggttcactgtgtacccatcccctcaggtctctacctcagtggttgagccatacaacagtgtcctgtccacccactctctcctcgagcacactgatgtcgctgtcctccttgacaatgaggccatctatgacatctgccgccgctcccttgacattgagcgcccaacctacaccaacctcaacaggcttgtgtcacaggtactgtcttggtctactgcttctgcattcttcctgttaaatggcttgaaatatgggcttttgtctctaaccatcagctgttactgatgttgtgcaggtcatctcatccctgactgcatccctgaggtttgatggtgctctgaacgttgatgtgaacgagttccagaccaatctggtgccctacccgaggatccacttcatgctttcctcctacgctcctgtgatctcggctgagaaggcctaccacgagcagctgtccgttgctgaaatcaccaatagtgcctttgagccatcctccatgatggccaaatgtgatcctcgccatggcaagtacatggcctgctgcctcatgtaccgtggtgacgtggtccccaaggatgtgaatgccgctgtggccaccatcaagaccaagcgcaccatccagttcgtggactggtgcccgactggcttcaagtgtggcatcaactaccagccacccagtgtggtgcccggcggtgacctcgcaaaggtgcagcgtgccgtgtgcatgatctccaactccaccagcgttgtggaggtgttctcccgcatcgaccacaagtttgacctcatgtacgccaagcgtgccttcgtgcactggtacgttggtgagggtatggaggagggtgagttctctgaggcccgtgaggacctggctgcgcttgagaaggactatgaggaggttggcgctgagtacgacgagggtgaggatggtgacgagggcgacgagtactagaagctttctggttctacagcgtcgggcctatttgctgcaattatcccgtgatctgccctgagtggctcgtactatcttgtttgtctgtgggttccgaacttatctgtcattgtgtggtttacaacacccgatgttgtaagacttgtggttaattccctgctttgcgacttgttgggttattaagagccgttatatggttgtctatattgttgcttcttgactcttgacctctgagatgcacttcttttatcgcctgggtttgtcttgtttcatcagtgtagtgggttagtcttgatgtcttgtcatcagtagtgaattgtttgatgcatcgagactcttgttaataagtcatcgtcttgggcatgcacaagctttctgccgaaggaagacgtgtctcgtccttgggctgccacggatatcgctgtgttgcagtcgtggctgaaacccatttttttgtgttcgtccgggtagaattggtcccgtggagtcgaggtggcctggacttgcagatcatatccacttgccatgccggttcacctagctttgctgcatgcataatctgtgatgtggaactgaaagggactcaccataaataactcttgtaccatttttcctttggcaaatgagtactctctccatcccaaattataagttattataagaatcttagagagtcaaacttttctaagtttgactaaatttatattataaaataataattactatggtactaactaagtattattagattctttcttaattatattttcatagtatactcactttatattataaattttagtatttttttctataattttggtcaaatttaaaaat

SEQ ID NO: 3838 - DNA, 3102 bp, Sorghum bicolor
acatcgaatcttgcggcacatacatgaagcattaaatatagacgaaaataaaaactaattgcacagtttagctataaatcgcgagaccaatcttgattctaggtagtctatgattggataatattagtcataaacaaacgaaaatactatagtaacgaaatccaaaaaattttcgcatctaaacaaggccttgcctaattagccaatcagcagctgagagcgcccagccgcactggcggtggcgccccgtcacttttctccgccaagatgtcgccgcgagcgtgccgatgccttccgcagacggggacgggcggacggctcccggctccggggctacacctgctggtggctgcgggccgtgctgccgtcaggcgtgggcggggcggagcacctctgccctccccggccccgctccaccctccacaacttgggccagtgacccggcgcgtctttcgttttcctttgtccttttccttcacggcttccaacccaatcatcgtgtgttccagtggcttgtgtgggcaacgtgcctgcctgattgaagccaacccacggcggaggggccgcgaggatcatcacgtgccagcacgcgccggcacaggactcctggcggcccacggcaaaccaatttttttttttcagatggcagcgtgctcattgtgaattaaggtaatctaatcttccacaatatcaatagcagtagcctgtgatgcatcaccaggctcctgtgaattaaggtaatctaatcttccctgaactcttgcggtgctcattgtacccaagctgtggttgctgacagacaagcagagcctataaatttgaaactgtgaatggcgttaccgacaccagacaaatcgtgatgtgattattgaattgataagaaaacttatacttgatactcttcctgaaatgtgctcaagcaaatggtgggatgatgcatgaacaccaaaacttcaaatatgaaaggaacattctgaaaaacgcagatatacagaaccacatgtacactgagaaaaatgtatgattacaagaaagataaatgatacaggttgccctctcctggggtatgccgatttaaagcaacacaaccaactgcaagcagagtctcaagataagtccaacgaataagcaccgcaaaaaggagaataaaaactttaattttccaacgaatgatttattttcccacactcaacaattagcttacatgtccaacacaccaacaaataaatgacttaaactcagaatgccggtctggaacgaacgaagctcctcttggtgctgaagccattgacgtcgaatgtgtagcagtggaggaggcgtggctcgccggagtcggtgagggtgctccgaaggaacgactggtaccagcgacgccgcgcatccttgtcgtccatggcctcgccgccgttcgggtgcttccggagcaacacctcatatgtttggtattttctgccgccctggggccttcggaggaagaggtagtaacctatgaagtatcgacagtatcagcaaagtatcgagattttatttatttatttttatttacttattttcttgatacttcaccgataccatatgccgtatccacgtatccgatagtatcgcgataccgatacggcaactcagtcaagtatcggctaacgttcggtgacgacggcaaaactggcgcctgcctgcctgcgcacccggtcttcttcggctccctcctcccacgggttggcacgtaccaacacgggctgaggctcccgtttccaaaagcgtccgccaacaatcaagacagcccactggtttgccccccaaaacctcggcacaccacccaccgtaaccgatcgtcatgacatccatccatcaagccctcgttttggcgaagcggatcgcagtcgcagcttcttccaatccgatccgcgcgcgcctataaatttctcggcgcaccgcacacgccagccccggaaccggcaactcgtttgtatcgagcgagtcagagactcatcagaggagcgatggccccgagcgcgtcgatgctgttcctgagctaccaccagctccacagccacaggccgacggaggcgggggcgggggcgtcgccgccgcgcagggaggaggctgcagttggcggcggcttccggatgagcgtgcgcagcgtgctctcactccctttgttccagcggcggccggaggaggcggcggtgccggcggaggggaagacggcgacactgcacgagcgcgacgcccgcgaggaggtcaagtcgtcggcgacggcggccgccgacgctgataaggagctggaacgcaagttcgaggaggcgctgcgcctcagctgctggtcttcgtgaacatccatccatctctggaggaacggagagacgcgtgcgcgcgtgccgccggatcggagcgacatcctttactctttgtgttttgtctctgttgatatgtgcaaatcttttcactggatagctaccgttgtcgtgatgaagcaagtaacggacttatgctagtagtatatgtagataaattaagattctctcttgtttgacagacgcaacagtttaggctgtataagtcatgatgatgaaccaagttggcacgacaaagtgttggattcagattgtgccaagacaattaccctgcatgtataagtttatgatgactggaatcataatcaacacaacaattaacccttgcattacatgtgagtatggccgtacggcgttctttttttttttttgaatctggtatctctttcattactcagctaacaaatcgttagcaacaaaaacagcaatgttttcgggcacagagctggatataaactcttcaccctcattacacagattacccaaagcagtcagctcatgagcggctctattacaactaatgaacacacacttccaggaaaggaaatttgaagcaagcaagaactttgtctcgtctatcaggtgtcctaccactgaatcatcatatgtgcatgacgttagggccttcaccacctcttgagcatcagtctcgacaatgattcgcccaattcccaaatctatcgccagctgaattgcttgcgggcaagctatcacctcggcatggaatgggctgaggagattcttaact

SEQ ID NO: 3839 - DNA, 6450 bp, Sorghum bicolor
cctcgcaggtagttgggtgtgattgtccatctccgacgagagtgctgctaataattaagcgcttctagttctagaggggttcgtcaagtgcacgtacggttagtactacatgtacaatgtatggagtgagggatggggctgttttatttatattagcaaaaatagttaagagtaaggaccatcatgtcgctagctatagcttagctactgtgtgaataagacatatttcaacacgtcctccaccattttgattggaactcgacagagacgtgcacatgggttatcaccttattaatttgtactgtgcatgcacaattttgcgcaaatgtgaataaggcagaccataatcggctccttgtatgcgtcgcccacagtcccacataccgactcacgtaggaatttctctggctaaagaagggaatcatcacacagcaacctgtttacgaaggagtaaagcacattcgtaagcaggctaacgggtccgttgggtgggtggtagtacatggctgactagccaccacaacacagcacgaggatatttccagaggacaacatatctagtgcaaaccataacttctataaaaatctgtacaaaccatggtaaaaaagttgtctaaattcatcaaaaaaatcacacatgtagatgatttgatgataaacaacattgtaaaatatcttgtctaaactcaactttgtttgtgagatataaaaataacaaattttaagctagaaaggtgtccacacgagtcacgccggcacgccggctgcggtaatcagccggtcagtccatccaggtccacgaacttgcgccgttggcccctctcccagatcgccctcgttcgtacgtggttgccgcctatacgcccgtcaccgccggcaaacaagaaccgaacatacatttccgaacacctgtgcccctctccttcttgtagtcttgacgtcttgtttgcccaaagcaacgcacgcccaccctcttcttcttgttgagataatccgccgtgaccccgacatctccggacgagcgggtttatcgtcatctcaattcgccaaacgcgcggctcgcccgtcgccggccgcgcgcgccactgcctcctcaccgcgccgttgttttgtcccggactcccgggccggccctagtaaaatactagtcgtagtaccgcccgcgccgagatgtggccgcagcgcacaagggcacgggcaccgcacagccccgcaacccgctagtgcgggcggtggcccctggcccgcataagcggcgacgctcccgaaatgtctagatgcccctattcccgtccgtccgttccacgccacagaccagcaccagcagcccccgcgagaatctagacgagagcccccgcccgcccccgagtcgcgactctagggccttgtttagatccgaaaaaatttcggatttcgacacggtagcactttcgtttttatttgacaaacattgtccaatcatagagtaactaggtttaaaagatttatctcatgatttatagataaattgtgtaattagtttttgtttttatctatatttaatgctccatgcatatgctgtaaaatttgatgtgacggagaatcttgaaaagtttttggttttcgagatgaactaaacaaggctctaggcccggtggagataacaaaggagataagcgacggcgaccggtcgcccacccaagcccgctgccacacgggccccgccacaacccgacccacgccgaggctcccccagccgctacggtggcgccacgcggcctgccgctttaccgccgtccacacgtttgcctgtggaggaggctgctgtgtggggccagccgttccacgcccacgtgggcccgtgtgcggccacgatccccgcccgccgcggcccggcaagagatcgattcgttcgatttcatactcccggtcccggtgctctccctcccttgccgcctccgcctgcccctcccccgtagcgagcggcggctataaaaccttcccctgcgctcccagtcgcgaagctctactcaacttctccttttccaccggcgattattccggccactcgccttcgttgcgtgcgcctcgagaacccggttctagaatcggcggcgggcggctaaaggagagggtgctaaattttcgatagaaggacgagcacgacttcttaatttttttttggggggtggcggttgatgttgaagaggattgcgctggcgagaatccatttttagggcggtgccggcgcgaccgttccgggatcgggagctttatctggaggcgagaggggtcagggcagcggcgacgatcgaccaacccaacccaccagttcccgcgtcgaggaagaagaagggataggagacggagccggtggtggtcgcaaggatggccgggagcatgcaggcggcggacgcggcgggccggctaagcgcgctgctgtcgctgctcgcgctgcgccggctcctcgccgtgctccagccgctggccctgctcctgctcctgcccttcaggtggcgcccaaggccgggggccgtgcccacggccgtggcgtccgatgccgcgccctccgcgtcgtcgggggctagcgggaagaaggggaaggcgtcgtcgtcggtggttctaagggtgccggccggctcgcccatggtcgccgcgcggaggcaggcgtccgcaaggagggagatagccatgcgccgggcgcgggaggccgggcgggagtacgagctcatccccaccgctcgcggcgagacgctcttcacgcagtgctggtggccgcacccgccttcctccaccgttaaaccaaggtgagacaaggacactccctcacgaaacagaggaacccgataaattccaggcatcctggagactctgcccacatgtccttgcaaattttgttctttcttctcctactaggaaaggtgccttctggtgctatcgacttgttgatctaattattcgtcctttggtgttggcgatttgtgacgcagggcgctggttgttgtcatgcacgggctaaacgagcacaggtaaggacggttcctgtttccaccagtttctttcgaaatgattctctggctatgcttgtttgttggtagcggatggctgaccctgaccttccttggattggtgtggcagtgggaggtatgatcatttagcgaggcgattgaatgacatcggcatcaaggtgtacggaatggactggactggtaagcatcttttttctccttttttggttgtcatgcttcaaatcttatagtatcacgaactacttatgcatgtatgttttgatttgattttcatccatgttgatgattgtgtgattgtgaacttaattaactagtgccacaaacaattcaccagctatgacgagagcaatgaataaagatgccaatttctcagtaggacgaaatggacccaatttctaaagtgaaatgcaaggctgtctattttttacactttagtgtccaggtgttttgttgtcttcattttggctgttcattccttgggttgtccgactccgtcttagtcccattctaattttattgctccattcaaaatagggcttcattttagctgttcattccttggttgtccttactccgtctaaatccgattctaatgttaccgacccattcactgaaaatagcaacgattggccttttatttatttatttttgtggtgagaacagggatttgaactcctgacctataggttgcacttctgctttccctaccactgtatttggtggattctaagccatgtggcctgccaaagtaggccctgaccttgagaagttgagatggataatgttatctggtttgtagctgggagcttagctatgatgcttctccgctttcatggttactttgtggttgccttattgtatcgtgtattatctggttgtgatctgggagcttagataaagtgcaccagttcagtggattcccattccatattgtaattgaagtgttgattattcataattgtcggcttggacacttaactctgtttgagggatacagattgttgggtacacatcatcatttaacaattacaaaaaaatggcctatgaactatttttcccttattcaggttagcttctctttgttgaattagacaaactgcgtgctagtttggagttgcttatagtttttttactacgtataaccatgtaaaatattaactatgtcaagatgtaggagcataggatgagattctagattataataaggaaccagatagcaatagtaataatgcagcaaacaattgagctaactaatatttggaatttgtcagaactgcaggcatcactctgagaatcagtgataaatttattagtctgatctaacctgtagattgtgctgtgttacaggtcatggtggaagtgatggtctccatggatatgtgcaatctcttgattatgctgtcaatgatttggtaagagcaattgaatatcttcacagctctctgagacccatctgtgtaagtccttattcaaaatcttctgattaatgtagaaaatgtacctcaagaaagtattagccgagaaccctggtcttccatgcttctgcttcggccattcgactggtggaggtatcattctgaaggtaatggcagcggtgccatatgaattgcattattgtggaacttacttcttcaggactgttgttgcacatttcttttgtgctgtttaaatctaactgttttgattcacaacaggctgcgcttgatccagaggtaaaaactctcattagcggtattgtcctgacatcaccagctgtccgtgttcagcctgcccacccagtcatagcggtatgtcttgttctttcttaaacaatatctactacttatgtccttgaaaaaatgaagcaggttgaatgttcagtaatatttgtcttgttatttcttaaacaatataatctagcagtatatttataccattgaaaaaatgaagcagaagcacggtcccttgtggtttcctaaacattgtgtcacggggtcagatattgttccacatttttatgggttgattgttctgagaaaatattacttcacgcttgctaccaattttgtgcttacggtagtgtgtgcagtctgcagacaccatcactcatctcaagagaaacgtttctgcttccaactgcaggtcatggcaccgattttcgccctcatcgcaccgaggtatcagttcacggcgtcgcacaggaacggcccaccggtgtcgcgcgacccggaggccctgcgtgccaaatacacggaccagctggtgttcacgggcgccatccgcgtgaggacgggctacgagatcctccgcctgacgtcgtacctgcagcagcacctgcaccgcatcgacgtcccgctgctggtgatgcacggcgccgacgacctggtgaccgaccccaagggctcgcgggcgctgtacgagcaggcctcctccgcggacaagtccctcaagctctacgacgggctgctgcacgacctcctgatcgagcccgagaaggacaaggtgatggacgacatcgtggcgtggctgagccccaaggtctaacgccggcatgcagatgcccgtaggacgcgcgcgcgggcttcgatcgtctgctgagcgcggaggacctgcaggcggaagacgtacgcctcgcctccggacggtgatgacgcgggtctggtcggccgcggagcaagggagagcgggtgtgcctcctcgcccccttgccgtggtgattatccgagagcaggactacaggagtacggcatactactactacctacgctacggcgatggctttactcgtgcctcccattgtatcccgataatttttgtcaggggtacttacgaattatgtaaaacatgctcgtttcgccctgtacgtgtggctgcacgagcggtgtccgatactgtagaagacgcccgccctcttgtgaattgtgaatgcattaacgcaattccatatcagagttgcaagttgcaacaggctctcggtctcctcgtctgtctgctctgttcatagtacttcctatcagcaccctagccagcagttgttgctgcttgcaattgcaaccttgaatccttggtgctgcgtaagaagtcccaagtggccaagctggctgtccgcagggtcaccgtgcagtttcccacacggtgcgcggcgactgttctgattggcggtgaagcccggctatggccaccttgccaccgcgagctactgccagtgtcggaggttgtgcgaccgtgccagcgttttcatgatcttggtgatttcaagcctcccattttttcttttgtatacggcgagatcgtgagccgtggtcgagtgagtaaactcgctggccttcaaatcttgcgaatcagcacagtgggatccatttctacggagtatattttcctattcacggtgttgttcagacgtcgcagtctgcgaccgcgggaggcggactcagcctgacttcacgcaacgtaaacgtaatga

SEQ ID NO: 3840 - DNA, 4391 bp, Sorghum bicolor
tacgaagcgaggcatgaaatacgcctttctttaacttaccatgaaatatgtcttgatagagcatttattttgtatggtagatgttaatatatttttctataaacttgttgaagttaaataagtttgacttaggccaaaacaaaacagacctacaatttggaacagagcaggcatttgctattctttcttcaaatcagggtctgagtttgtttgtttgttccatatgcatcatactgttgcttccaagcgtttcaagcgttcccttgagttaatggattatgtaaatgagtgcaacatgcatctatgattccatttaatttacagattaggtgctactcctatcatggagttgatgattgccactagaaaaactgtgcgcaagttgcaactggaatatgatattgctactgacagagtctacactggatcttttatgacttcacttgacatgcaaggtagcatatatgtttttaagttttttcaatttgtttgaagtatgaaaaagaacagcagtctgcttgaggaataggatagcatggaatgactttaacatcttttggtaggattctcagtatacatcattttctgtagggttctcaatatccctcatgaagtcagacacaacaattttgaagtgcctagatgcatctactaaagctccttgttggccggctggaactgatggtaataagtttgcgtagatagtgactttatttagcatgataacttggcctcctgtttcctgcgtgtttgagaaaaagcttggcctcctgtttcagctttcagttttgatcataatttacaaacagaagtgttgctcttagttatggaaattcatgttcttgatttaacatgtctaaggtgatttggattgcttgtgttcttcatgcctcttctggattacccatgaaataagtatattgttttgatatccgttaccatcataacttttgcatgttgaaagtgttgtagctattaatataaacaatacaaaaagatacacatgaaagaaatataatatttaagcttctaatttgtactacttgactttaacttgataaatggaaggcatttttttaaaaattgcatcaaaattatttggattgttttgaagcataaattgaaacaaaaggaatttactatgtcctctgaaatgcatctttgaatgtctattaacttatctctttttttctaaaagaaaaaaaacttcttctctagtccagattttgaattggtgaatggttacacagttagatcacttcttatgttacattaatgaaagagcattgttccaagcttcactatatgcatactcaagaaagtattgacccttaaagataaatgctacttaatattcgggagattggcaaaaacctgcaaaaattgctgttcctgcaccaccatcatgtggaatgaagagtgataaggtaggatttacataatgatcacactggctttgctattttctctgaaaggaagtctatttttcctttcctccatagatctgtatacttccttactactatattcactattgaaatactgcccctgctgagcttgcatggatgatcttttcaagaacatgattttattgtcaactcttctagcaatgcacttaatgtcctcaagcaaccagtaggttccaatctgctatcatgttcctagttgcttctgttttttgctagcgccacccacttctaagcctatcagtaacaagacagcaagagaacatgcacagctagtatgatggatgggatcactgtagcacacgtaatctaatgcaaataggataagagaaatattattttgtgcttaattaacaactcgatgataacattacctattttttcccaccagaatggtagtggaatgaggtgcatcaaaactgcaatacagatttagaacagataaaagtgaatttgttgacataaaattataaaatacagaacttgtgttttaagttgatttcatacttatgctcatattctgttgccttacagatgcttcaacgaagtcgagagctgacgaaacaggtctgcattttagaggcttccattgaagcaggtgctaaagaaataatctggataaaggatagcttaaatgaatgggacagtaaagttggtgatggtgactgtgggacaacagtgagtcaaacaagctaggactactttatgctatttcctagttataaccgcatagcctgtataatgtaaccctttttcttttcagatgtataggggggcaattgctatacttgaggacatgaaaaaatggtaatggtttgggaaaacagaaatcagttttacatgccaaccactttctatgttatactggtaaacctttatcatggactgacttatggcttacacgctgactggataattgttttggacactcagttacttgatagcaacaaacgtattacattttgtgattcatgtgtcagtaatgtttactgcaatggtttaacttttttatgatttcattttgtaatgtgaccatgcatacatctctgggtttgtgtttagtcatactcatagtatccctcttctcagctacccaatgaatgatgtcgctgaaacagtaaatgagattggtgccacagtaagacgagtcatgggaggaacaaccgggatcttgtatggccactctcctgaatttggtttcgtttgcaattagaaaagtctaccatacctatcctggttttatataggtatgacatactctgtaaggctgcctatgcaagtttaaagggcacgaaaacagtagaagcaaagcactgtaagcaagatctcatatacttgctgattctcttccatatcccatataagtcatacaaggggatgttttacttctaggggctcatgctttacaatcatctattggtgccataagcaaatatggtggtgctcttgaagggtatcgaaccatgcttgatgctctgattcctgcttcaaaagttctgagagaggtgggcagttactatttagcaattttatttgttggctagtatcagcactgaccatgaagcctttcttattgcgtagaggcttgaagctggggatgatccacttgatgcattcatcgtatcatctgaagctgctttgactggtgctgaatccacaagacacatgcaggcccaagtgagaaatttttcatgttgagaactttctgttaaaaaaaacagaaatgtattgttatgcatttttcacctttagaggcatcatttcctgaaaaataaaatcaaagcatatttaccagatttgcattcatctttcaccattcagttgtgataagatgataaatacagcttgaacttcttctgtttatgtgcgacgcgatctaagaggttaaactttgacaaacattttctacaaaaagatataatatttcaaatagagataattatatatgaaaatacttttcattatcaatctatagtatcaaccttatgctgtaaatctttttagatttagctattggtggtcaaagcctcaaaggtaatgtttgacttacaacatacctaaaacaacctacatttggaatcagaagtagtagtttatactttatagcgctttattgtagaaatatagcatgctagatcatagtgttgtggcagtgaacatcaaaccatctactggatgattaaattgaacctgtaatctttttttccatatgacatgtggtactgactgagtgactgactgacagaagcacccaatgggcttgttgcactgacggcgtaaaatcatatttcaggctggtagatcatcctacattgctgctgacaagctggcatcagctcctgatcctggggccatggctgctgctgcttggtacagggctgcagccctttcgttaaagaacatgtcgtgccattcggatccatagctctgtttcaggttttctgcttcacttgtctttgtctaccaaagtttcgcacctatacaggccagtcctttcctttcccttgtgactgctgtctactatttcattagccccagtcgtgtggtgtttacctgtaacctgtttatattcccctggcattggcatacgaactttcatggtaatgttgtacatggtaatgatgctccaatcacaagacttgtcagacccaatttagataaataaatatttgaacacgagaaatatgttacttttgttaaataatgtttgaaaaagtaatgtgaaatttcaatgtcttcctgcgtgtaagtgggttctttttcaacctattattaatgaaatgatacgtaaatcttctgcctgttcgagggggtaaaactctagtgtcccctcccctggcagcaagatacacaaatcacaccttgctgcacacacgcccgtgagcgactctcatagaatctaacactgcagtgattggcctataa

SEQ ID NO: 3841 - DNA, 5236 bp, Sorghum bicolor
ctgagaaattttgcaaatttttgcagattcacatgtatgaagcattacatgtaaattaaaaaataattaattacaaagtcgtttgtattttacgagattaatcttttaagcccaattaattcacaattggataagatttgtctaatacaaaagaaaatgcgacaacgttcaatttgcaaaaaaaaaaatataactaaataaggcctaattagtaatcatgcatcagcttagtacaagagtttttcttttttatggcaacttgtttttttctagttccaaggtggcccacagccacagagatgtcagctactgcttgtaggacggattagtaataagactatttattttatgaaaaaatttgaataatagacgtgcgtttatttgttgaacagagggagtaagtggtatggagtatttgaggaacttggtcgagtactttcgcttttagcattgaggtcttgtttagttacatttgaaatctagttttttttttaaatattttttgtcacattaaattttgcaatacatgcatggaacattaaaatatagataaaaataattaattatataatttatctgtaatttataagacgaatcttttttattctaattagtctatagtttgacaataactattaaatataaataaaaatgctacggtgtctaaactttttttttcaccaggaactaacacaaggcctgattgtgtgcctcaagaatggaattgtccagctgcaaagtgattggggttcacatttacattcacatcacatgaaagaatcctgggtcaggcgaatccgaatcctgccaacataataagaaattagcaatccaagttttcacaaaaataaaatcgtgatcaccttctagttattttcagaacatcgtgagtttctttctttcagctatgaataatatcgaagagtgagaggaatgacatctaaacaattggccaagaaaacatataatacgatccattggaacgcaagaaactttcctctcaacctaaaaatcggcaatgtgattattttctcacatagcgagaaaagtttttcaccactaaagtgagattgttgtgcagtaattactaattagatcgtatcacttgaatttttgtatataagggacatagaaaaatagtacaatgaccagtagttttatactctagggagattattattaattttaggcacgtctaaatgctctgtatttctactcctagattatacaaacgagctagccagcacacaaaactcattatagacttatttttgtatattatgaattttgtccgcaccagtcaaagtgcattttgtgctcatggtaaggtggtgctgaggtgaatgtgcctgtttatgtttctaaagaagtatggtattttttttcaagaaaaatgatcgataaatcttttcttctaaaaaatattggttttattttgagatatatacagccttttattttaccgcagtgcatgagaaccataggcgcgtatcgtgacacttcacttgcgccgtcgcctgtaacttttccagcctgcgtgtacgcttcctgttcatttatatctctctcattcacacaagggccttgtttagttccaaaatattttgcaaaatgaacactgtagcttttttgtttgtatttgacaaatattgtcgaatcatggactaactaggctcaaaagatttgtctcgttatttggaccaaactgtccaattagtttttatttttgtttatatttagtacttcatgcatgtgtctaaagattcgatgtgacggagaatctgaaaaattttgtaaatttttttgaactaaacaaggccaagaaaaaaatttggacctggaaaaaagaaatgaaaatcagctcgccacctgttctaacacgcgaggagaaagaaagaaagaacacggcggctgccgtttcatctccgtccgcgtgctctgacccccagcgaacccacagcgtcgccctataaaattggggcctcaaaacctctcctctcatcagcaacgaactcagaagtctccaaccaaccaccgcatacaatccccaatcccgcgtccccgaaccctcgagttctcacgggctccggccagattcgtgcagtctaagcttcgaatcgacgcatggaggcagcagtagccgcggcgctcaggtcgcccaccgccgccggcccctcgcggcggtccgcggccccgggccccagctcgctcccctttgaccggaggcgcagcttcgcctttggctccatcaaggtaggaggagcttctggttctctcttacggctgaagcttaggcgggtgtttgtttcttttagacagaaaggagaaagggcagtttggatcttatcatcttcagtttctttgtggcatgcttatctactttctggtttttgtatctttgcttgtgggggaaggatttggtgcgattaacctgcaatttgttcattttatatcttcgtaagattcggtttctcatgtataattcgtctgagcatggaaatggagtgcttgcctagttgcctgacgctgctggatgtttgagcagggtctcgggcggcagcagctcacgtctaggactaggaggcgaagcagtgtggtcagggcctcctggtccccctcggagtctctgccaccgtcatcgtcgatcgcgccgctcaggatggaatcaccggcggggcagctactctcgcaaatcctccacacgcacccgcacctactgtctgccgccgccgagcagcagctcgagcagctccagaccgaccgcgaggccgagaaggagaaggagaaggagagcgaggctggcgacaagtcgaccccgacaggtggcgacctcgtgctgtacaggtaattgtggtttttagtcatttagtttgtttcctttgttacttacggtgcatcttgctataagaagataggatttcgtaaagatgcttgttctgagttatccaattgtacgtggattgggagtataacagactgtcacataggaattgtataactgtctagttatcaaggccagctgacatgttacatgccgctccatcgcggattaacttgtgtattttatggatgcctgtttacatccttaaatattattatgtgggattagattaaatctagagagttgtttgagggagatggccatatcatataggaactgtgtgtcaattgtgcgatgccaagagaggaaaaggacaaactattctagtcttttttgattgagatggagtgactgtagttcacatatgagcaggggcgaagctacataaaaatgaaccctggtgcactacttaaataacgtacacaactttatttgagatatatggtgaaaataaggccattcaatagcaaaaaaaaatatatatattaccatggtgcctgtgcaccaggtaacctcaacgtggctttgcccctgcatatgagcaattataattgtgagttagaattgcttggtgagccagactgtacttctaacactgaattaattgtttcctgtgacttggggtattggagaaatgttggctaattaccgttgttttctggaaataggcgtattgcagaagtaaaggagaaggaacggagaaggactttggaggagatactctatgctctggttgttcagaagtttgttgaagctgatgtttctttggttccagcactctcacactccatcgattcttctggaagagttgatcagtggacagaaactgtggaagagaagcttcaacgtttacactcgcccgaggcctatgaaatgatcgagaatcatctctctctcattctggggcagcgtcaaggtgatgccactattgcagccataagtaagctccgagttggccaggtctatgctgcatctgtgatgtatggttatttcctgaagagagttgatcagaggtttcagcttgagaagacaatgaagagcctcccttggggatcggaagaggaagatagtgctttgaatcaagttatgacgaccgactcgatgccttcagctcgggtttctagctctcatccagagatgggctcatggactgcacccgacttcaacgcaggagggcctagccaatctatcaagccttcccgccttaggtcgtatgtcatgtcatttgattcagatacgcttcagaggtatgcaacagtcaggtcaaaggaggcctttggcatcattgagaagcacacagaagcactatttgggaaaccagagattgtaatcacacctgaaggcgcagttgattcctccaaggatgagcatattaggataagcttttctgggctgagaaggctgatcctagaggctgttactttcgggtcgttcctctgggacgttgagagctttgtggattccaggtaccatttcgtgaccaactaagatggtcatcctaactgaagaacgattcatggtttacgcatctggtctgaatgtctatgggcttcggaaagactgttgtacaatgatgttagactgttaccacaccccttactgtacacgatggtatcaatgatttgcccagttttatggcatcacagtattgtaaagaccaaatgtcattagccgttaggttctattaacatctgtgctgcccggggtgcgtagcaatgtattttttcactatccccgctgcaaattgtaagaagaattctaggctgctaggcaacccttcagcaaacctattattctcgttgcagattgcatgttgatttgagttctctcttcttgggagcacggccatttcgtagtacataattcttgtgtaaataggaatgaagtttcgtttttttaatatatatatatatataggtatgatattagaagcttagggcttccaataaatagcggaagccctggtccaaattagagcctcatggtttcaccgaaccagcatgcaccggcttgtggtcctggcagcccagcccaaacctgttcacatggttgaccaaagccgataggtaaagcaccgagccattgtttcaaattcatttgaattggcatggggcagacggaagcagcttgacgctgctccggcgtcccgatggcggcatggtaggtggagcggagaggaccagcggcagcggtggctttttttacgagggaacgacatggtcgatcccagctctccaccgggaccctccgccgcctccctcttccccacccgtcgcgtccaccagccgccgcgccgccgccggaccagcggcagcggtggcttttctgcgagctcgccgatgccccgcgggacgg

SEQ ID NO: 3842 - DNA, 7285 bp, Sorghum bicolor
ttcataaatagatagtacttttatatttggtagtattaagcaattcaaatttgcacaagttgatagacacaaaaaaagattttcacatccttcatctctactgaaaacataatttgtatctatagtacaacatataggtgactacatgtagcaaaatagaaataaccaagcacaattttacctaataccatttgcctatgtagacaaaccaaagatgaaacaccaagataatgcatacgtcaatgctagcttataattatactggcttaaagtatactacataactgatcttcttaagaaaaatatgcaacataaggcctagtataatcaatcaatcacgtactaaccaaacatacccattgtacatccaccgttcccgtgtagttaaaaattattcgtcaaaaagactcatattgcacacacctcaaattaggtgtaggtacaccctagaaatataaaattgtccacaatttcaaaatgtcaccatatatatatgtcctccatgatccaattttatgtgatttatctttcttcaattcgttgtagctttgtcattataccgccgtatagttttcttagcgaccatgctttaaccgtgccaaaggccaaagcacatatatttggctgcacataaatccatcccaatccatatggtttgagaccgtccgtcccaaaccaagtggattgaggtggatttatatatagccaaacaagctctaagagtacgaaacagaacggtcatagtaatactccatctatcctaaattacacaacacattttgatattctagatgtataggttttctatgtatctaaaggcgtgttttataggtgttaaactttaacatgtactagaatttttgttttattggcatttaatgtccaatcatggactaattaggcttaaaagaattatttcgcaaattactctttagctatgcttttagtttcgtaaataatctatatttagtactccatacatgtgtctaaacattcaatgcgatgggagttaaagttttaacaacaacaacaaccaaatggggcctaaatatatatatttatatcaagatatacattataaaattaatagatctagaaaagacgtcttatagtttgatgagaaattgatggagtaataaggtaggtttaaggtcttgttcagtttgcgaaaatttttggctttaattactataacactttcatttgcatttggtaataattgtccaactatggattaactagcctcagaaaacccgtcttacaaattacagacaaactgtaaaattagttattattttatctatatttaatgcttcatatatgcgttttaaaattcgatataacagaaaattttgaaattttttagaattaaagccttgtttagttcactaggtaaaaaaatttaatgtgatagagaattttaaaattagttattttttatttatatttaatattttatgcatgtgctgaaagattcgatgtgacgagaaatattaaaaaaaaattagattttagatgtaactaaaccggacgtaaataggcctaagccaaatctagccgtacaagtagagcgctctgccgtgtagtcaaaagctgtcgacgctgaaactgtcgaacgctcggccgtgtagccgccggggggcggcacggcctctgacttccggcggagcccgtacaggcagtactcgcggagacgccgacggccggtctcgtcgacgtcgagctcgtgttaagcatgccccgccggcgcggaaaacgacggtagaaaagccaagccaaggaacaggggcgcgcgcgcgaactcgtggacggatacggatcctgacgccctgatcccacgcgggccccggcctccactgcacccctccctcacgcaccccacaggcacgaggccacgcccacgaccccgcgaccccggtcctcctcctgtgccccgcgccacatcacatatcaatcccgcgcctgtgactttgtgacgacgcgttccgcctttacccgacgcataacgagaggaaaacaaatcagaggaattcgacgagggcaccacccaccaacaccacaccatggcggccgccgccaccgccaccaccacctcgccctcagcctccttccccgcgggggcctccctccgccgcgatgcgcgcaggccctactgcgtagccgccgccaccgccgctgcggcggcgacggccgctgaggcggggctcgcggccgtcccggcgccgccgccgacgcccctggtgcatgtggtgccggagtcgctgcagcgggagagcgggtgcctcgtggcgggctttcgggagcgcgggggcgggggcgcgggcgcgggggacgccgcggtggaaggaggaggccccggcgcgatggagtacctcaccagcgtgctgtcgtccaaggtgtacgacgtcgcaatcgagtcgccgctgcagctcgccaccaagctctccgaccgcctcggggtcaacctctggatcaagcgcgaggacctgcagccggtaattgatgacgatgcgcagcccttcgtttgcttacccccgtcacctttttttggttggccttgcgttcatggacgtggatatttgcgtacttttattccaaaaaaacagcatcatttcttggaaatgctggggttggatgtttcagctgctacttgtgtttgtgggatagatttgcactcgccaatgaccttgttcagtgtcatatctttgggatttgggggtttaccttagtactgtcgtgttatgttgttcaccgggttccaacgggatgctttggattcgcagaatcacggggataggtactcagacattccctttgattctccaccttggctttgatacgttcttgtcacgctttctccgagaatagacgttgcaggatagtttgcacttttgacttgttatttattatcgctaatactaggagtgctgaaaccttgaggtggctgtgtttttagcttacatactctgtgaaacttgattccacaagtctataggagcttattatcttagtctgtgaaacttgattccacaagtctataggagcttaatatctttttagaatctcaaagctcaacaagctagacttgtgagctgcagcatgattcagggtcttgagaattgtacctggtctgctatatttgttttttgtgtgttattagcaacagcaaaaaaccacaatgaaaggacgttatttgcatattctttggagaaggaggaacccttgtatgcatattaaagataaatttccctatctggtattttgccatacacacgttttatacataataaggttactaatttaattttgtttgactttatttagcgtttatatgtgctattccaaattcattgaaaactgctattctacttctatgttttctttactttcctcatattttgtttgcttggtgtacaggtgttctcattcaaattgcggggagcatacaacatgatggcaaagctcccccgtgagcagttagagaggggcgtcatatgctcctctgctggaaaccatgcccagggtgttgctctttccgctcagagactgggatgcgatgctgtcatcgtcatgcctgtgacaactccagaaatcaaggtttctgatctttagatgctgaacttaagacacccctttacatgattcagtttactttagtgctaactgaataataacgtaacaccttaattccagtggaaatcagtggagaggttgggtgcaacggtggtccttgagggggactcttatgatgaagctcagtcatatgcaaaattacgatgtcagcaagaaggccgcacattcatacctccctttgatcatcctgatgtcatcactggacaaggaactgttggcatggaaattgttcggcaactgcaaggtccactgcatgcaatatttgtacctgttggaggtggtggattaattgctggaattgctgcctatgtaaaacgggttcgcccagaggtctgctttccatcttttaaaaatcctatgctgaagataacagagttcctttacacgccttcatggagactgtcgtgtccctgatattttaagttgaatcgtttcatattggatcaatcttgctaatataatttctttctggatcttgctgatatttttttggaatgtttttgaaacatttttctttgtacaggtgaaaataattggagtggaaccctcagatgcaaatgcaatggcattatccttgtgtcatggtaagagggtcatgttggagcatgttggtgggtttgctgatggtgtagctgtcaaaactgttggggaggaaacatttcgcctgtgcagagagctagtagatggcattgttatggtcagtcgagatgctatttgtgcttcgataaaggtgagaactatacatatgggtgtttttactgaatactgttagaaatttatagtctgaactcacttcgagctcagtatacaatgttgaagaaaaggaagatagtaattttgttgcaccagtattctctgctgtagtggtctgtcaatataaaccacccagtcatgagtatttttaagttacatattcaaaacactgtgtagggggaatgttgtataatgttatgtcattaactatgtaatctagcatcaattcctgtgaattgtagagtgttgtctaatttagtgaggtgtttgggttgtatggatacacatataggatgcataaatattatgcaatgtctattgcattccaatcttacattcatactcctatcatccttcttgaccaatgctgcattgtacatgcattttgatccttctatattcttggtgctgaaatgtctttttatgtgtgcaggatatgtttgaggagaaaagaagtatccttgaacctgctggtgccctttcattggctggggctgaagcctactgcaaatactataacttgaaaggagaaaatgtggttgcaataactagtggggcaaatatgaactttgatcgacttagactagtaactgagctagctgatgttggccgaaaacgggaagcagtgttagctacatttctgccagaggagcagggaagcttcaaaaaattcacagaattggtatgccttatgaggtagttctgccaacacataattttaagatccatttcctgtcttatgatttctcattctgcaggttggcaggatgaatattactgaattcaaatacagatacgattctaatgcaaaagatgcccttgttctttacaggtatatatatcaaagttcattgtttttctttaattatgtatccatatcaaactaccaacattatataccttgactaagatatatatatttagtttatttatctaagatttttatttattagtatgtacagcaacggttagcttagatgcttaggttattatctgtaacagtgtcggcatctacactgacgatgagctcggagcaatggtggatcgcatggaatctgccaaactgaggactgttaaccttactgacaatgatttggcaaaggaccaccttagatactttgtaagttgcatctttcacactctgttggcaaaattattttgtcaaagagatcaattgtaattttagttcatttttagtgttaatatgacaatagttaactggatttgcattgtgtgacataggaccctatcaaaattgttttacttacctcgcgtccatttttgtgcgaatttctgctatcttgttcatgatatcacattatcaatttttcagattggaggcagatcagaaataaaagatgaactggtttaccggttcattttcccggaaaggcctggagccctcatgaaatttttggacgcgttcagccctcgttggaacatcagccttttccattaccgtgcacaggtacatgatgagttttgtctgtagccttcttataatagtgtccattatgcaatctcataatttgaaaggatgattgattttcacttctttgaaagccagaacttgaacaggaaaaaacatctctgctcttcaaatgatcatatgccccttcccattaaaaaaaaatgtatgccttgctgaagttggtctgggacgtgtatattacttgtattgatggtactaaacaatggagagaaccaacaagggttgcaattatatacatttcatcatctgatctaattctcttgttcagggtgaagctggagcaaatgtattagttggtatacaagtgccgccagcagagttcgatgaattcaagagccatgctgagaatctcgggtacgagtacatgtcagagcacaacaatgagatataccggttgctgttgcgtgacccaaaggtctaatgtcatatggctttgctcccataagttggtgacacttttcaaggaagattctgctacaaggtagaaggtgcaagtttcttctaaagttgaaatgaagccatcagcaaatgtagcttcagtgtgccatctgtttattcagatcatgtagtgtatcagttgtgtatcattattgttgttgtgcttcgtgatctcaatttatcggtttgtggcacctagggtttgtcaaataatgataaccaacatgttatctaaatatctgataataattatgtaattgtgatttgggatgcatcactgttgtaaagtgtaaacccttgtctctttacaatatcgagttatcaacaatttgagtaagatctgaatgttctttcttttttgtgtataacaagagttgtaactgaaaatagatggaaggcatattaaacctcctttgtgccgtttgttgttgtctaaagttcaaactacgagaaagtctttcattttattagcattctcgtgtaaagtgtgcccagctttattttacagaatgcatatcatgtgacaagaaattgagaatgtgtggtctaatgttttgtttacattgtttcgattggaatggtattctgttacattgtttcgattggattggatggatggtgtcatggtgagagagcgattgagaatgtgtgttgatgctgtgtacttgtgttgccgttactcagagttgcagcgaggaaaaggtactgttagttgtaacgtcgattggtggttaagcttgtctcggacagtaatatttcctcgaatgtatcaataaccagacctagaggacttgttttccttaaacatgatacctatgtattcaccacatgtgttgaactagattagattggaattaagactctgtttggttcgataaattttatcgcctataaaatcaaatgtttagacatatgcatgaaatattaaatgtagactatttataaaattaaaaatatagttagagaata

SEQ ID NO: 3843 - DNA, 5264 bp, Sorghum bicolor
tgcaagtagctgacaaaagtcgttctctatgattaaaggcagaagaaattgtgcggcgaggaggactgcaagcgctgcggggaaggagacctgaagcagccatgcctaggtaaaaggaatccgtaaagatttctcctattttccgcacctagtaatgatcatgtcaacactcaatactttggcaaatatttgacaggaaagacggagtgttcatcttgccattcttctaatgggatactctgccgtgcttgcctgaaagttaggtacggcgaaggtaagcggacttgcttagttgctcaacgctgaaatgcctttgttcttggtggattgtattggccttgttactgaactgtgagacacggtagcagagatggaagaggtgagaaagaacaagaattggatgtgccctcactgcgttgaggagaagggtatcaagaaattctggatctgcaacaggtgagcgcttcctcaacctctctctattttgttctacaatcagaggtctgaaatggtgcttcctcaacctctctatttagttctacaatcagaggtctcaacctctctctatttagttctataatcagaggtttgaaatggtgctgtcaggatatgtagtgttttaaaaagttcagtttcccatcgctcactcggtaacctttggtcatacgacgatgcagctccttctgcttgaagaagaggaagataccaataccaccgactgggattgccatatataatggtaattctgattcgactcctgtctacatctgtgaaacatgctgttctagctgttactgataaacatatctgtttttttttctctttttctttgccattgcaacagcaagagagcaaggatacgagtcagttgcgcacctcctcatggacaggctgaagcgacaagctttctgatgacgactggttttggcatgttcacttctgcagcgaacagcgacctcacatagagattgtagtgacggtctcttgtctgacgacatctgttttggcatgttcacttctgcagtggtttagtgatgatggtagagattgtagtgagagtccgttttctggaagtttcgatgataggctcttagcctataggagaaaatggttctgttgaaatgacttttgcccaagaatgaggctaggaactctcggtagtcttatgtttcaggagtggcagcttgtctgtttctttttgtaaccgaattttgttgagggtcagagcaaggatgatgcatatgcacagcccatttattttctgggtttgaacgtaaagccaatgctgcttgttattgaggcagggtcgtgcggagtcaccaaaatgactccatatggctagcctatggttagctagaacgttttgtagtattattttattattttataccctgagcacagatggatttttctgagcataaggaatcacacacaaaaaaagtaccatattctcaactacaattacattaatttgtttcctttatgtaaaaaaaatagccaaataaagctgcttgtgtaggacttgcatattgaaatatcagtaaatacttgagtctttattggttgggccaaaactcattcctccttgttgtgaaagctctaagttttagttgggccaaacaacctctgctgctttagtttaccaagctggaccgggccctacagcagttgggcaacttgaaaccggccggaggccgacgcggtttggacatctccactccacctgccggatgcaccgccgccttgccaccgcggccgcagcgccagcgctccggcggttctcgcaccacagcgcgcctccccggcctgacccaaggctcgccttcctccgctccgaggtcgacgacctcgacctttccccctctcataaaccatcgccacggcctccccatagagaggaatgccaggtgttagaagagctaagaagtggccttgctagagctggagacgctccggcagctgtggatatagcgcatccgtggccggagtgggttgcgctgatggagctcctcctccgtcggggccacgtggacccctccgccttcgcctctgcctcgctgtcttctaaggacgccaacgctgtccgcactgcgtgcctccaattcgggcgccagcggccggagctcatcaggtgaggtggccgtgctcggactcggactagtggttttggggttgggttcttggcctgggttggtgtgcgtgttgaggtcattatttctgctggggctatgattttagctgcaagctgggtgtttgttgaaatgcgttagccattcgcggtgccttttttcttccaggcacaccagctgtgcatgtaaaagtggttgcgtgtttaccatgaagggcacaaactttggcggttgttgcaatttcaacattttggctaattacatgttccctgaagctgtgcaaattgatgtgtcacacttcaatagcaactcgcggagcaaagcttgcctaatagtaccatttctggggatggtaacaagtgcaaagtacattatgggtttcctcaagttatatcactgtaccctacagaaactcttagatgtgtgcgattacaaggcattgttgcagcatgtagagtagtactgctatcttttgtttcatgagtcccaactctcaactaaaggacttaatggatgctggaagctaaagttgaaagttttttgttgcaggcatatatcaagatggaatattcaggttgccatgcgatgtggttgtcccagcattgacaggaaggttgtaaactctgggaagcgactgcgggcttatgtaggacttgatgaaggagaggtaacctacaagaaaatatgcattgaagatttctcttggtgcactgcatttttacattttaattttattttaaatattctgacggtaaactcatgattttgtgtaggatgtacacatcaatactgaattatagacacaaaaaagaatagtaaaccagtttatgcacaagcaaaagctttattaatcttgtgtatggtaatacaatacaattgtgtgtgatcttaacatgtttgcttataaattgcatgtttcacgtttgaactctttgagtgcaaacatgaggtgtgaaggaatagaactgttcgcctatttgacttcattaacaacctttctttcactaaatccacttcacactggtgaactggctagtagaaaatatgtgcaatatggtttttcctttcttgggaactagaagatatttgcttactgtgcagtataatttccgaaacctgttggatcctcgatctttatatcgtaaatattaatttcgtttatgcttgaaagtttggtttctttaaatctaggacattaatttatgtagtatcagcttatgctaacaggtttgcagccaatgcaatttaagaggaagttgtgatagggcatatgtaaaggctcggaaagaggaagttggaagaactgtggatgttatgcgcatccttttgacttatggtcttgacgttattaccggcaatgtagagaatagagcatgcctgaacaaaactgtcaaggaatcaataaagatcctactaaacgaggttgtcgaggtcgattctaggggacctggttccagcactgtgaaagctgcacaacgcaaaggtcaatctgctgtacccatgaagcagggtgattggaattgtcccaagtatgtttgaaaagttaatatgtgtgtctaccacctatccccctggtcataatgccttgcatttattgtcagatgtgactttctgaactttgcaaagaatatcaaatgtttgcgttgcgatggggaattccaagagaggtatcagttgttgcatgaagaccaagagcatctacctctcaaaaagggtgactggatatgcaaaaggtgagcctgcttatagttttagtttatgagaaatatttacggcaagtgctgttttttttttctttcttatactgaccttaaagtttcaggtgcaactttttgaattttgctaagaacacaagatgcttgcaatgccatgagaaaccaacaaaccgtttactcaacccaggagaatgggaatgtgtctcgtgagtgcctattatatcttatttgttgaatatttgaactgttctcatgtctactgccaatacgatcttatagttgaagatgatgttagtgttgtatggccatcctttcactgctatgatttttattcctagtacatttcagaaaatggaagataattatgtttatgtgttatgttcaattacaggtgtaactatgtgaacttcaagaggaatggattctgcttgaaatgtggctggaaaaggccaaagtctctaaacaatcaagatactattgaatcacgtcatgacttagagcatagtaagacccccagtatttcatttgttcaagacggcgtccagctgaagaggtggcaaagtccgcaaaagagtgcttcaccatctgacgaagattcagatttctggagcgcagacgatgaaggaggtgatagcagggataatgatgcactcctgcaacagaaggactacagatttcttgacagttttcccattgtcgggggcaggactgctaattcccaagatcgtcttgcaagggagaagtggaaggacgaaatgtccaggagaaacaaaggccttcaaactaaggaatcacaagaaagcgttcggccttgtagccccggccgtcttccaagaagcatggaactggttgagtctgatgatgatatcgcttcttggttttcgggtgggaataatattaggaacttggacaagacataaggccagtcttagtgggggtttcaccaatatgtcatgtacatttattagagcgtcatgtcagcaaaactgtacttttttgcatgaaacgaagatgagagagaaggaagtagtttcaccatggtgaaaccccgcggacgttgtttcccacatggtgaaacggtatgaaattctcactgagggctaaatcgtttcaccatcttgcatgtgatccaatcattttgcagtaattaaatgctttgcccagcctaggaaacatcaaggtgaaactcatacattgtgaaggttgtttcattattcgtttcattgatgctctgtcagcggatttgttttggaaacggtgcattgaaacggaccactgacactggcctaactagatcttgtaaagcgggggcaactcgtcaattccgtcaataaaatttcatatcttggaattattgaaatccaggcaaaaaaataaatacatttaaagctcattggggaattgtaccatttaatgcttc

SEQ ID NO: 3844 - DNA, 5099 bp, Sorghum bicolor
gatttctggcccacatcccatatgtgtagaaatcaatcagtttctggggtagttcagagttttattttgaaaaatgaattgctgtttgagttatgttcatttgatgcctttttgaatattttctagtttgaaagattccgaccagtagaaacctgtaaacagccaagagtcatttttgttgctggacaaaatgcttttgttcaagttcccaagccatatgctaacttattttgagtgcccactatttgtgcatgctacaggcgctatcattacatttccatgacctgtaaagtagtgacatctttaatccagattggtcacattagcaaaacagaggtttcactcaagtattcccttgtgatgagaaagtttcatgttaatagtgtgacccagttttgttgattatctgactacttttcaaaacatgtgcactgttttcctcatgaaactcctgctgagaatgctaaatcgaatactgcaggcgctaaaccgtgctggtggcaaggctggaaacaagggtgctgaagctgctcttactgccgtaagtaaaccttccgtcggcaatcttaatttcaaataaacatagatttattatcatgtgacaagctcaaattccctgcagattgagatggcctctctgttccggcatcacttaggctgacacttgtgtattctgtacacgaggcgacagcatttcttcctgtcagagttttggcttagtagtgactagtgagtttttcagccgtgggctagtatatataattaatatataactatttcgaattcagttggttcggtgccgaatggttgttttctttctataaggtttgatttgaaaagcccacgaaacatatatttgtaaacctgacaccatgaataattgtcacgaagaatgaagtatggtcatgaataaagttgcactcgtgtttgtaatggatgagagttttgttgtgagctctgacctcttcctctaccatgaatgtttctgtcccaaggattttaaagttgtttaaatggtacggataccttttgaccgactgtctgactgaagagacacatgtagtaaatttttaatccgtatcggaatttgaccgttcaatacccttaggccttccttaggccttgtttagatgcaaaaactttttggattttgatattgtagcactttcgtttttatttgacaaacattatccaatcatggagcaactagacttaaaagattcgtcttgtgatttacggataaactgtgtaattagttatcttttttatatatatatttaatgttccatgcatgtgccgtaagatttgatgtgatggggaatcttgtaaagttttgggtttttgagtgtatctaaacaaggccttaatcaaaattgatatctatgatgtttgtacctgaatttgaattcgagaaaaaaataaacatatttatgatttgtttacacaaaatttgaatctcctcggtttgcctgcttgtaaaaaagcttacatagcattttgagctgtttttcgtgttaaagtgtggtgagctggtggctggcgaactgcctccttctaataatgttatattaatttttttgaaaggcctagtacgttattatagttgagcgcagttgccagcatgagcacaacatattgtcctgcactagaattctagctttttttcacgaacgtgcctgggttcaaattctccgcatcaatgggcttccatgggcttcatcagctagcccaagagggtcgtgcgcgcttatgccacgcgtggtcggtttgggcgggaaatctcccgcgtcaccaaccaaggcggtcccgcgttgtcagtgactcgcacacagagaggccacgccaagcccaagacagctgcccccttccgcttcccgaacaatccatctacccgccggcgctcgcctccgccccaacttttccccttcgtctcgttcaaatcgccaaggccgagcagcagcaagcaaagccgcgccggcgtggcgggtggttgaggaggcatgccgcctaaatccgatagcgttgaaggtattcacttctacgcctccgaaccgaaatggtccccttttttcttcttcttttttgttttacttttttgtctgaaaaacttaccgattcaatccttagctcggtgtactcagtgtttctgatgattttacggtgccgtttcttctttttttttttgcaggaatcgtcctgggtttcgtcaatgaggtgcggtgtctctctcccctaaatcctaccctaaaccctaaacccctgcttgcgcgattaggattcgattctccctccgtgtggtacttatggagtgttgcgctgtataagaattattcagaaatcgttaggattgtatggatgcgacaaaattgactggagtaaataggcaaggtgtattgattgtgcttgatggcatcatgctgtttgatgaacactggccattttccatactgcctttctgtaggttcaggtggagttaattagtatcatatgaaaaccctggtcaccattctgattaatcggtgtatgttagttgcaactggcatcactttgtgttggatcattattctgaatgatcgtaattgcagtccattatctggccagaataagaactgtaggctaatccctagaatagaacaaaagtttagattaatttcagttgaatgttgactcctctcggtgctactttaactaccgtttgagtctgctctttgtgtaagataattaatcaggctctatttcaactgtactctctgagctaagagtttatgatgcacaagagcttacaaatgcataaagtacaatgcttttgcagagcagttttggctttttctgttcagtgtagtatttgcttccctgccagagatattactgcaggttgttttttcccctttaagagttttatttatgtttctaggacatgaatttcccagttaactaagtgcagtctccttctgaattccaataagatggggaggaagtatactatctttttccttcagatactgaatttaggtgaaattttaactcagtatactgatgtacctaaatagtatatgtgactgtcactatgaaatgaggttattcagaaagggttttgtacacagttcttcaactttatgctggataaaaaaatttactccctctattccaaaatataaaatgttttagttttatcctttgtcaaacttatctaactttgaccaagtttatagaaaaatgaaccaatatctacagcatgaaattagcttcattaaatccaccaagaaatacctgatattgcggttgtttggtttgtataggttaatacggtttcaataaattaggtcaaagctagagaagtttgacttgtgcaaaactaatatattacattttggaattgggggaagtaccacactgtttgctcagctttgagtattttgttctattgtacaacatatagttgactttaccatgactctgcagcaaaacaggccattgaattcacagaatgcagctgatgcactacagaagtttaatcttaagaagactgcagtacaaaaggcactggatgcattggctgacagtggacagatttccttcaaggagtatggcaagcagaaaatttacattgctcggcaagatcaatttgagattccaaatggtgaagaacttgaggagatgaagaaaagaaatgccaagttacaggaagaactcgcggatcaaaagaaagcaattagtgaggttgaatctggtgagttccaaacttcaaactggtaccatggtcttgctatagtggtctaccaaatgcagtatacaagatcgtatttcaaaaacatctaaatataaatcttctacagaggtacgaggtctgcagtcaaacttgacgctggcagagattacgtcaaaggagactaaattacaaagcgaagtaggtgcataaaaaatgttctcttcaacgaagcttatttgttttcaatataagcagactcatcttgtttaaaaatttgttcccttctgcacattattgtgtgtctttgttcctttggactggttttaattgcaggacccatgtttgttcaggtccaggaaatggaagagaaactaaataaattgcggagtggtgttaccttggtgaaacctgaagacaggaagatcattgagaattcctttgctgagaaagttaaccaatggaaaaagcggaagaggatgttcaaggagctttgggataatattactgagaatagcccaaaggatcagaaggaatttaaggtttttactgcatgcccccaccactacccccacaccccgaccccaacacacacacacaaatgcttttgactgcacttaagacctagtatatgctttgatcaagcatttaccacatcgatggtagactttaactgctactagttcttttagctgtcaccgtttcttttcattttcattttcattttctattgttttctgtttgtgacgaccacatgacgctgatacgctgatgaacaatatgtactgcaggaagaacttggtctcgagtatgacgaagatgttgatgtgaacctgcagtcttactctgatatgctagcaagtctaaacaaaaggcgaaaaatttcccgctgatgtagcatgagcatctcaagttgaaagtaggctacaaccctttcacactttcaccagctatgcattcgtggttctactggttcctacgctttctgtagctgagatgttccagatagataatcttgtcttctgttaatatttattggctaatgagtattctagtcggtaggttcagaccatagcgagtgagtttaccctggcagcagtgagtttaatataagctttgtaactgttgagttacagcaaatcctgcgtcctcttcattgtatctatagttctgtatactgctatatattgtactgtttttttttttgttgctatggccaccaaaatatgtcctcactctaaaggagaagtgcactctaaaatattcaatcttcactatgtgcatgccatcctatgcacctggacctgctacaattataatctcgtgagaagtgcactctaaaatattcaatcttcactatgtgcacgccttattcgtttggctgataagttaa

SEQ ID NO: 3845 - DNA, 6780 bp, Sorghum bicolor
cattggcattgtgtcggtactggaccacgtaatgtggtgattcgtttatgagttcgttgcagcttgcatctgtctgttagcgagaatggcgttgaattgatcacgatcgagcacgctactcttgcttttgtgttatcatcaggtttcctcgccattgatttccatgtgacagtatattgcagactgcatctgtatatgcaatattgcatacttgttttgtatatacgtgtgtttttacgttattattatgatttgtcagcatgaattcagtttcctcctaacgttccatcaatttggtgccctcctaatatgttagtcacattgtgtacaatttaatttcagcatgactaaagataattttgtaccatgctggacggggcctttgaagtacttctgaaacttaatgttgttcatcagtttgctgaataagccctgttgggtatgatctgacttcagttgctgaagatatgctctagctaccggggatcagaattagagtaaggagtggttaacgatgacgaggtgggccgtgagcccccatggaggatggagcttcatctcgtcagcgagcaaaggtgggggaaggcggcaagctcatgatcttgcagccctgatctcagtttgggaggaattgctgctgtggctgtgtaagcagagggaactagcctgggtggttgtggcctgattgctagccattttgatgttgcagctaggcgcctttgccattaggactgggctgttcagatcagcggctactatgttcacattgttcttgttcgaagtagctgtgcggtacaggtttatgtgcgaccctgggataagattgacagatttgtcacacctgtacgtgagctgaaaaatgcactccagcttactatacacttgttcaaagtagcagagcctgggatcggaagaaattaacatatttgtcacgcctgtatatgagctgaaaaatagactccagttcactatacctgaagaagcatttttgggcaaatgaggttgcgtagtgtgggcattcccgtgcaagcctatagaatgcatttgtgtgttttaagcaggatgttggatttcctaaactgttcattattaggccttgtttagttccgaaaaattttgggaaatcgacactgtagcactttcgtttgtatttgacaaatattatccaattatagactaactaggctcaaaagattcgtctcgtcaatttcgaccaaactgtgcaattaatttttattttcatctatatttaatacttcatgcatgcgtctaaagattcgatgtgacggggaatgtgaaaaattttgcaaaattttctgggaactaaacaaggccttatctagatgcgcgcaatgccgagttatgacacaactctgttgattcgtcatgttggatacctgatttctactccgcgataatcgatggtgagatcggcgtacgacttggagttgtccttgtggggagagtgcctaggagcacaccacagattaacctcttgacgatgaaatcaacacctgtaatggcgtatatttatttagactaagcttaagcaaaacagatctaaagaattgctataaacaaaaaaaaaatgtctcctcactctttttttatcaccgacggattcacagaagagaaaggagagggaccctaaacaacggcagcgagcagcaagaagcggcaactgttctcttagctcggcggcggctagggcctctgtgattttagttgacttattatattacccgtgatttcataaaatcaatgtgaggcaagtagtaagttgattttttggaccatagcatttgaaaattcgatgtttgaactagactctgaatattactagttttaagtaataaataaccgcgttgaagagtaacaataacgagattcaaacagaaccttttcctccccacgcctttcgctttgggccaagcatttgcatagccggctccgcaagtattcgcggtcgcacaagctggtccagtccaacaccggcctccctgtctcaatcctagccacaagctctcccggggctgaggatgactccccactccgggctcctccggcggctccgcatcggccgtcgaccaaaacccgccctgctaaatactcgctcgctacagctctcctcgcaattactaaattaacagctccgttagcacgagctgcggggagggagttgggaggagaaacagaggtgccggggcgatgggaaccgtgctcgattcgcacttcctggcgctcaccgccatcgttactgtgagtgcccccattcgcctcctcgcttctcccggtcctgcgcaaggcttcttcgagttctgactgttacgttccctgtggttcccgtaggtggggtaccagctgctgttcttcatcatcacagctctcctccggttcgataaggtcacggatttcgcaggtaacaactaactcagcctgctcttgataccggaatgagttgccatgactgccccttgtgcagttgtactagtagggcgcaattgatagtagtgaatgtgaatttagttcattcctgctaattgcttagaggataaattcttgtccttgttagtttttttttttctggagttcagtttaggtaacggttagcaagatcggtcattgagttctttgactcagtttgtgtggccgattggccgttgttgcttcaagactccaacaacccaacatctctcctgaactgtattatactccctccattccaaattataattttttttggcttttatagataaatgctccctccattccaaattataagttgctttaacttttccatgtatttagatataataatatgtctacatacataggaaaatagatgaagaaaaaaaaagtcaaagtgacttataatttggaacaaagggagtagtttttgatatgtagttagataatagatatacattagaaacccttgcctcccctttggttgggccagtgacaatgaactgggtacaagaaaaacaaaaataatgacactctagagtgatagcatgtggtgattgattaaagtggtttgatagattcagtatatccaacttgggtagaattagtttcttatatatagattatgtctagacattgtaaaaacaatgtatctcgaaaagccaaaacatcttataattgaggattgggggagtagttttctcgcttgctttggggaatcctcatgcatgggcttgcttgattactccccaggcaaggttgtctggtgcagggtgcttcctgcccgatttttttgggcgcttaggaacgagatcgatgcctggcaggcattgaaccaaacaatcttcttgtctgttataagataattatacacgtgagcttacatgcaaaccgctcctcattcttacaaggcatccatgtcttctgaacccacagtctgaatgtttgataaaattccctatctgcgcaccagcctgtatactagctttgctgtattttctgcccacaattatttattttatgctcctaatttcaggcagtacaaattttgtcataatcgccatcctaacattagttttgaagggagcatggcattttcgtcaggtaactaattttttcattttaaatctgttcactttaatgtaaacatagtcaatggattgactgatgctccctgtctgttcagtggaaacaaaagggtggaatttatcagaactactgctttcttttcttctacgctggattgtcagcttttttcccggtgcaaataccttaaaaaatctgtttgccaaccgcccacacctttgctaacggcagttgactttgtagagaacataaagtggatttacatttttcagtctaagtgaaaatgtgagttacagttgctgcagcatgctggcaagttgtttgtttgaaatgttgagttacatagatctctgaatttaccacgattcattgatttttagtctggaagatggcatatactgtggtgttgtagcaatatagcatgattaaaactacctctgtcactttaaagctcacagaattgtcttgtcacttacattaatttagacactgcaaatttaataatgtttgtaaagctaatagaatagcttcatcatttaccttagacactgcaaatttaacaatgtagaactagcaaaattgcttcatcacatacaataaaattagacaccgtgaatgcgaccatattgatctgattccactgactacattgttatctgattccattttcacaggaaagacaatttaggtatctttttgattttttgtccctgtgaaatctaaaaaatgataggaaagagacaagtatagtctcttgaaaaaggtttgtttcttttaaaaggaaatggaacaaaatgatagtaccattcctttggcactgcattgatttgatttacttgtgatatacttttataggaagaaatcaaggttatttaaaaatatgtgcatttataaaggtcgatctctatttcagattgtgctgacagtgcttgttaccatttggggtcttcgcctaggactatttttattgatgaggtacgctgttagcctgtcacatgaaaaatcgttagcttgactgaaaatatgtctatagttttcaataaattgctattttttttaatttctaggattctgcaatggggtgaagaccgacggtttgacgaaatgcgtgataatttggggaaattagcatttttctggattttccaggtaccttttgcaacttgtgtctgatattaagatctgaccgtgccttttctgaagaaatcctcagcaggctatctttttccatttgggcaggctgtttgggtttggactgtcagcttgcctgtcactgttgtgaatgcaagtgacagaaacccctcgattgaagccagggacataatcggttggataatgtggttggttgggatatgtgtagaagcaacagctgatcagcagaagcttgtgttcaagaattctccaagtaataggggaaagtggtgtaacgttggtctttggaagtattctcgccacccgaattactttggggaggttagttaattcagtttgttactttggtcattgttggtaaatatgaagattagccttcatgtatactcgatttgcttaaatacttatattagctagagtgagaactcacagtccttgaatagtacctgtcgctactaattcgtatagtgttttcaatgcatatgttgtttacatgcttatgagctgtgattgcaagtacagcatgttctacatacaatgtttatgacactgatctgtatgtgaattgaaattgatgtagatgttcctttggtggggaatatttgtagcatcaaccccagttctctcagatgctgaatggcttgtgattcttggacctatattcctgactcttctgcttctttttgttagtggaatcccactccttgaggtatgcaacttttctagtgccctcaaacccaagctatattacttgcaaaatgctaacatgctctactcttcatatttatatcgtgaagtcatctgctgataagcgctatggacgaatggaggaataccgtgtatacaagaacactacaaggtagcattcttacactggttattttcctgatctctccccagagtccaaccactggtttttactttttagcaacaagagtaaagtgttgattgttctctgcagccctcttatcccattgccaccagccgtgtacggttccctgcctgcatggttcaaggttgccttcctccttgagctccccctctacaatcctgggccaggagctgatccaatcagttgagtgacgcttgcaaaattgttctgctgcccttcagtgataaacatgtatagaatagccctgcgtatatttacggtttgctttgttttgttttgacagaactacggtgagcccattgatgggtcagcctgatatttgtgttgttattgtgtactgggcaattgtttccccttcgattccaagggttgacaatggagtctggcccctatttatcactcatgaggctcaagcatgtatattgttggttaaaagttagaatttcttttgttgcactccttgtctccatgtgcagatcagtagtcagtagatgatcatgcgaactgaactttgaaccgatactaggagtgtctcaatttggtagtattcgttatgcagacacggtatttttgtatcttacattcttagttagtaccaggactgaaccttttaaactctttatctatgtgcgtgttagttgggcaggtgttcagggaaacaaaaggcagtaaattcgaagaaacaaaataattaagaaaaatgtttctgagaagcagaactcccccaaaacagtccagttcacgaggtagcagtgtggcagtgtgcaagctcaaaacgagctgggtttgcaagctccacaaatcttcactcctttgggaaatcttgcttgagaaaacgagaagaaacttgtccatggccatggccatgggtcatggcaactataacaactgtggtcacgctaccgggtgccagtatagaaacatcagtagctcctcacgccggcgcgatggacaccttgtcgacctgcacgacgtactcgagcgtggcgccgggcgggatctggacgtgttcctccccgaagtcggcgccgtcgtcgccgaacgcgaggcccggcgggacgaccacccgccgcttgccgccggccctcatggagcgcagcacgtactcgacgccctcgcacatgcccctggtgtacggccgggagcccatcaccagcgccagcggccgcttgccgtcgccgaac

SEQ ID NO: 3846 - DNA, 6090 bp, Sorghum bicolor
accaatcttgtttctatgttgccaggaatggatcaacctggaaacttgacccgtgagcagtacttgcacgacaccacaagggtgcaattctacaaaggctacctcgctgagctgaagaaagccatcgatgacggcgctaacgtggctggctacttcgcttggtctctccttgacaacttcgagtggcagtcaggttacacgtccaagttcggaattgtctacgtcgacttcagcacgcccaagctcgaacgacaccccaaggattcagcctactggttcagagacatgcttcagaaacactgagtgtctaacaaccaagcctgaaccctggagtagttaccattgaatttcttcagcgttgcctaagttagtgtttggctggccatattattctagcaaaagctgtaagctagctcagtacaagggtatcaaaattggagtaaaagatgataaacggaaaatcaatttgcgagttccatgtgtttgatctgtttgcatccttgctttttctactcaagctaacatattgacttttcataagacggctactagagccacctaatcaactcagctagatgccgttcgattttgaatacaaattgacacatataacttagatgattttaaactacataatgcaataattaaagctttgcagttttaaaactggatcagatcttgttttaaatgacaagtttttctcaatgatttagagatagttttttttttgagaaacatcaattagagatagatgaggctggtcaaatttcaaatatcagactccttgaaaaaaatgagaattgtattttttttacagagagagagagagtatatatgagttactccctccatacccgtaaagaaagtcgtttagaacaacgacacggttttcaaagtctaactttgactctttatttttataaaaatatttatcaaaaattgatatacgaatatttttatgaaagtatttttaaagacaaatttattcatatgattttcacatttttaaactcaacaacttaaaagttattcatgcatgttttatattctcattccaaaacgactttctttataaatatggaggaagtagtagttaagagaaactccaagagtttatatctctatttgcaaattcatttattgaatttttatctatatatacgtctcgagtgtgtccaaccgattctctactttttactttttatactccaaaatagcttatttaaaattgtgttccgtaaagagataataataataataataataacaaccatatatgcatttagaaaagccatgtgagctctttaaagagcaagaataatggtcttggagagtgaaaaagacaaaatgatttatagagcctatattgaagcatgttattttgtttgttttctaattttatgataaaaaactatatagattgtttttttttctggaaatgctattattaacgcgagtagatccaaagaggacatggctgcaggacaaacgggtgtttcgtcaccatgggccgccagttgagcaaggtggccagccgcgccggacagtcggacacctccctgcacatgcgcgcagatggatggggcgcgccgccccgatttcgaggcgccacccaccgaaagccgacatgcgccgaggaaccgcccgcctttcccggccctgacgcacgttcgctcatcaatcgaatcgaacagccgaaggacggctggagacaagcgcggccccacacgggcacgctcatcaatcaccggcaccggtcgtgtgctcgtgccggcggcggcccccacgcccgccgcacaaaggatacttagtaccgtacaaaggatactaccggcaccggtcgagactcgagcggccggggcgcgcaccggcaccgcccgggggtccccatcacacaaaagatgcctcgatccaccgctaccgcaccgacacgcgaccctactcattgatgacgcgacgtgagcaccaataaataggggcacgccagctagttcgccggcacagtcagtctagcgctgaaggcctgaagcgcctctgctactgtgctgcgctgacgcggtgacgccggtggggtgtgtgtgtgagcgaactgcgagctgccactgccgcggtcgacagccgggccgccggcagccgtgcgtgcgcgcggagccgagatggacgctcggtgggcggtgctgctcgcgctgctggtcgccagcggcggcggcggcggtgtccgtgtctgcgccgcgggggcgaagggcgccaactggctgggcgggctgagccgcgcgtcgttccccaaggggttcgtgttcgggacggcgacgtcggcgtaccaggtcgagggcgccgcgtccaccaacggccggggaccctccatctgggattcattcgcgcacgtcccaggtactgcttcgcttcatcactgtgtcctacgctgaactccgcttgactgcttcggctggcacgggagtgaggaaactctgatgcgtgagcgtgggtagtcctaggaagcatggatccaggtactggttatccacccacgtcagttgccgtatcagtgctgcaacaacagcgcgtctgaattaccgtagctaaacaggcgtggattacgggttgggattggatctccgaatgtgagacaatgagagcaagtggctacttgattactagatgattagtagtacttgattggcgtttttgtgggggtgtggggtacaagagatggatctaggcaaaaactatgaaccaactacagaatgttggacaacaattaatctgatgttgttcattgagatctatgcatcttgattttctttaagattttccttttcgctttgttgcaatgaacaggaaatattgcggggaatcaaaatggagacgttgcagtggatcaataccatcgctacaaggtacctgactatgagaagtagatagaccgatctaggctgagacataagagcgtttgatggccttatgattaattcttttgttcttctacaggaagatgttgatctcatgaagagtttgaattttgatgcctaccggttttcaatctcgtggtccaggatcttcccaggtaaattattttcattcaagttgtagcacaatccaaacatgagttttggatgttactagtgctgatacatcgatctttggttcatgtagatggcgaggggaaagtcaatccagaaggtgtagcatattacaataatctgataaactatctgcttcagaaaggtaatacataagttgggataattctacttctgagatgttcattggaacctagtacttatgtaaacatatctgaacgtccctccttgacaactgggcaggcatgactccttacatcaacctttaccactatgatcttcctcttgcgcttgagaagaaatatggagggtggttaagcgctaagatggcgtaagtcagtgtaacaattaattggtgtttatatctggtcatactatggacgtgttttgactttctgtgtttacccaaagaagaatacacaacatagaagcactccagaaattatatgttagcctataaatgtgtcatgctatagctctaatttcacaggatatagaactaaaataccagattatacttatatgtgtgtacaatttgttttttagggacctgtttacagactatgctgacttctgttttaagacctacggtgatcgcgtaaagcactggtttacattcaatgagccaaggatagcagcgctacttggctatgacgtgggatcaaatcctcctcaaaggtgcaccaaatgtgctgctggtgggaattcagcaaccgaaccttatattgttgctcataattttctcttggcacatgctgctgcagttgcaagataccgtacaaaatatcaggtattttcttcttgaggatctcaaaagttcccctgaaattaaaagctagaagtgctaaactgatgttatttttttcaatgaagtgtgtggtccaaaattttattttattaaacgaaatgtggcagggtctatatatgcttggaacaatgctccatatttatttctgcatgaaatgcattagcttgttttcttaaatagctggacatacatggtgaatctcagtaacttgtatttaaaattgctgatggaagagtggcataatttttcaaaatgtaggctgcccagaagggtaaggttggaattgtcctggacttcaactggtatgaagctcttacaaactcacctgatgaccaagcagcagcccaaagagctagggacttccacattggctggtaagctatatcagtatgctctgtcagaaccttaagtttttataaatgaaaactgcaagttataacacagttaactgttacatccggtgcaggtttgttgatccattgataaatggacattatccacaaataatgcaagatcttgtgaaagagaggctacccaggttcactcctgagcaagctaaattggtcaagggctcggcagactacattggtatcaatgaatacacatccagctacatgaagggacagaaactgctccagcagacgcccagtagctactctgccgattggcaggtccaatatgtttgtgagtttcttgccttaaactctatattttataaaaatatatttgccttagatattttttcacctaatctaaacatttgtcccataaattctgtagttgcacgcaatggcaaaccaattggaccaaaggtatgcagttcctccatttactctttctcaacgttatttacttcgttagcactacatagtgcatattatgctaccatcagctacaaattcaaaagtactgcaataaatccttgctaaccaatgcatggacttgtaggcgaattctaattggctttacatcgtcccgacggggatgtatggatgtgtgaactacctcaaggagaagtatgggaatccaactgtctacattaccgagaatggtactcaacagaattccatacttcttattccacgtttcacatgaacacattgcataccaagggaacaatatatcaatcttttttctgtgttaccaggaatggatcagcctggaaacttgacccgtgaccagtacctgcgcgatgccacaagggtgcggttctacagaagctacattggccagctgaaaaaagccatagatcagggcgcaaacgtggctggctacttcgcctggtctctccttgacaacttcgagtggctgtcaggatactcgtccaagtttggcatcgtctacgttgacttcaatacgctcgaacggcaccccaaggcgtcggcctactggttcagggacatgcttcagaagcattgagatctctagggccaccgagcctgaaggtagtactattttgttcagctttgcctcgtgttttggattgcccaatggttcaaatccagccttgtgcttggctagcaaaatgggagtaaaagagagccactccgatgaattgtgcattccgagttatggtcagaatgttgtgagtttgtgagtatgttctctgtggcgtttgagatgtggttattttatcgtgttgattgatcttatttgaaatgcttagtcaggaacgtgacatctcgagggttttttaaccaaatatatcacttctaagaactacactgagccttggtaattggatcaaatctgatcgtcgaggcattgccatcagtatttttttttaaaggtggcaaaaagcttttgcggaatttttttagacgagtaagaaaaaaagactaaaaaatacaaaagcccacaagcttcactccgcaaaccccaccaaacactaccaaaactaccataagataactccaccttactattcactaaacagactgaaaaaaaaggaaaaaaagggaagagagagaaaagaaaaaattacatagtggcgagttgaaactgatcgaatttctctttgcaaaggccacttcagatggaaactgatcgaacttctctttgcaaaggcaagttgaaaccggtcagcgtgaggccaccacgggggatggagctgctaggtgcgtcagctgccctcggagctagatgcatgcacaacctccaaatgagcaggatcagcaatgctgctccggccacactcccaaa

SEQ ID NO: 3847 - DNA, 7484 bp, Sorghum bicolor
ctccctccctccctcctctctcttctgttcttcacctggagctgtgatcctcttcctaagtcccgagcgttggatggatacgtggttggctccacgccatctccttcggtggcgatgagctccggctgctgcttatgaggtatgatgcttgtgagacctgtccatggttgcttgcttcgcttttcttagagatgctcttgcctgggctgagcagccagttgcgctggaattcaagcaatcctataggattggtggaattcgagcagtttttacaagtttcgaagctatacgtgattaaagtggcttttcaaaagcatcttctacatgtagagatagaaatgtattttcagttcatgagttgtcacttgtcagtttctactgaagggagacccaccacgtgccctgctcgctgaaattttgtgttcaaggccatgctttttatttgtattccatgatctataatatatttgaagttactttcatggaatcatggtaatgattcaggggaggaaatctggcacgagggttaattccagtggaaatccatcaggagtaaatcttgttgggatcaagcctatatttcatttcagtgagcgtttattttcagcccatcgggtataacaagttaacagccttttcaatcttgtttcagatcttgctgaatgaattttgtggtttttgagccgtcctggtaaaccttggcatggccagtccagagacaagcgcagggaacacccagaggtgtgcttatctcatctttactgggaaacatgccgtttcatttgttctagttctaatgactactggaaggctcttcagtgttttttttaaagcctacccgctgctgtgctaactgtgagacttcaagatttttgtttaaagaaatcttttgcaatttacgtagttgtcagaaatcttggaggcactactatatagacattttaatataaattgtgagtgctggtagccttatcttgtctttctgtttaggggggatacccttccaaatggtgacatctatgttggcaactttgctggtttagttcctcatggatttggaaagtatatgtggacagatggaactctttattatggcgagtgggatacaagcaagatgagtggtagaggagtaattcagtggccttcaggcgcttcatatgatggagatctctgtggaggtttcattgatggaacaggcactttcaaaggagttgatggatctgtttataaaggttcttggaggatgaacaaaaaacatggaatgggcacaatggtttatgccaatggtgatacttacgaaggtttatggaacgagggcttgccagatggatttggtaaatatacatgggttgatggcaacatctacattggaggatggaaatctggtaaaatgaatggcagaggagtgatgcaatggacaaatggcgatactcttgactgtaattggcttaatggactggctcatggaaaaggtttttgtaaatatgcatcaggggcatgttacattggtacatgggacagaggactcaaggacggacatggcatgttttatcaaccaggaagtaaaatgccttgtaaccttgaagtgtccgagtgtgtatctgatcacgatatttcaagttcttcgagctctggtaatgaaaatattaatagtggcttattatttttattccaaaaactttgcaacacatggagactacacagccttttccattggcccagacgtatttcaaatggcaccacaccagtttttgatgataattctggaaataatttgtcacaagattcatctactgagcccttggcaactgataattgtgtccaagatagtggagttgataaagtattggtttatgaaagagagtatgtacaaggagtacttatctcggaaaagccaaaatgccatgattccggaatgctggatagtggtaaaacacaggagcatacctggcaaaagcaagctggagggcccatggagactattttcaaaggccacaggagctattacctaatgcttgatttgcaacttggcattaggtaagtgcttaattgtattgatatcttccactatatgtcatcttaattcatttttgtcaagaatagattcttgtagttgttctctttttctgtatcattacatttatactgtgtatctatttaggacagttgtactctccacacagatatgctacatctgaaagaagcatatgcatatcattcagacacagaactcacattatttgtgctaagtattacttatgtaagaattattagcagtgggtagtgaaagttttgtttaacctattgcataaaaaaagttgttttgaaacctcccattatttgaatgacaagtgaaagagtctcttttcaagaataattttgatatgctaaaaatatgattttctttccttaggatgaaaatttgagatgttatatcatgagccactatccacatacagaaatagttgtcatggcatatttctgacactgcctgtactaattgtactccaaactcttagggcatgtacgcggttccagatctgaaaaggccatgtaggaagtgtccagtagtaaacccaagcttagcaaaatttggtgaatccgtagctcctcaaaaagtgaacgatggttcccatactaaatcaagtaataggtttcttcacaacaacactcagccccatttatcatgtccccagcatgacacagaggtgctacttttacttttcttattctcttggagctaaatcctggattgctttggagtcaggaacttttctttccccaccaagccaattcttagatcctctgcctgcaacggtatacgtcatggttttgagagactaatgatccttagctcctctttggggcatgggtttgcatacacacccttatatctcctaaatttactatattgtttgtttgtccctgtgatatctcggagctgttttgttttgggtgcaacaaagctcggcaacgatgacacacagcgttcacttcttgggaggtcagggcttgttgcaaatatgtgacggcatgtcagggtccctggctgatgttcaccgtgggaagtcggagctgcttatggtaggctcggcaacaatgacatgtggtgggcttcgtcgggtgtcattgttgtgtaagtgggttgcctagggattgtcgtctgggctatcgtagtgggggttttgccggttttccatctgataaaccacgcgtctgtatggttttcaggcctggttttccttataaaccaggtcaatccattctacttaattgaaactttgaaaggcagagctcttgccattgtgttaaaaaaaatctatttagggaattgtataactatactaaattcaaacatggtatacctcagtaaattaatctaatgttcacactccagtaactagttccctattgctattcagctatgcacaatcctttctaaccaccccatgatgttgctatccaggtatacagtaggtaaaatcacccctgtgcctttgcgcgaagttcgttcaaatgattttggacctcgagcacggataagaatgtacttccctactgaaggctcgcagtatacgcctccacaccactctgtcaatttcttttggaaggattattgccctatggttttccggtatgtttctttcctgatcgctaattgtataagaatttagcattttcatactttctgttgaatgcatattgttttgttagtgctaaatgcatatcgctaattgactgtgatattaaaactatggttcatctatatctaattaactatgttggtatattatgattcacccgtctaattaactatagaagatatcaagtattcaagtatcaactgaacaaatgtgacgtggctgatttgtttaacaagagagtagctaatgtgatggttagattgcctatgtttttacttgcagaagattgtacctcagaataaattagaaactagcaagattcttatgatcacctctgaatcagtttgtttgatttagaatgaatctgccataaccataacagcatcgctcaaagcctcaacttgattttttttcctgaaagtcatgtttatctgttttactgtttttcctatttaaatattgtttaattggttatagctcaacaattaataagagatcatacatattatcaaggaattcacactggcttggattagtctacagattcttcaattcatccttttattgtagctaattgactcattgatttcaggaatcttcgagaaatgttccacattgatgctgcagattacatgatgtccatatgtggtgatgacagtctgaaagagctttcttcacccgggaaaagtggcagtattttctatctttcacaggatgaacgttttgtcataaaaaccttgagaaaagctgagctgaaggtatcgcctcaaaggctttctatgagtgtgttgtgttttacttgttctttttttttctgaagtgatgttttacttgttcttagtctgtggatgagttgataaatttacagcccggaattttttgttgctcataagatttatggtcctaatattagttaacattcatataaaaaaatcataggataaaaataatttatacggttgttgagtgataagttatgcctactgcagattggtttgatgtaatacatgctgcagatactgttgaagatgcttccaaaatattacagtcatgtcagagcttatgataatacgctcattacaaaattctttggcgtgcacaggattactctgaaaggtggcagaaaggtgcacaatcacattcttgttgcattattcttatttagtctgtaaatgcatgtcatatgtgatagttttcttatgttttgtacaggttcgctttgttgtgatgggaaatatgttctgcactgagctgcgaattcatcgtaagtatgacttgaagggttctacacaaggccgatcaacaaaaaagcaaaatataaatgagaacacaacactgaaggaccttgacctttcatatgtttttcatgtggataaaccatggcgggacgcacttttcaggtaagctgatgatcaattgctccctttgtttttctaaacacctttttctggtagtatatacttgtatttctactaatcttcagtgaccctttttttacagaaagtatctgacattatttatgaagtcagaagtactctcacaaaaaaatacaagaaagtaaaattaataataaatacgaactgtagatagtaatagacttgtgatagatttctactttaggccaagatcagtgcctatcaaatgttttatactcccatatggtttgataagtggtggcttctaaacgtttctgcggaccattttcaggcaaatatcacttgattgtatgttcttggaatcccagtctatcattgattatagcatgctcttggggatccattttagagctccttatcacctgaagacatcttcatcacatcagagcagtcttgaaagatgcggaattccaggtatagtattcattgtaattgtaacattgcatgaacccaaccttaagctggtttcatttttttggtgtacttttctcttataactgaacaaatcatgacaaaacactattgctatgaccatgatatccttttaaaaacaaaatgaccatcttaagtatcagtgctattcacactactaaaaatgatactcgatattttgaaaatggtatcacagccaacttacgcctgctgatacaaaaatggcaaaaaaaaagggggggtcacaacaaaaatataggtaatgtaagagtgaaatatagagcagaatttccaaggaaaactggttcacccgagcgctataaacaaactttcccttatatttatgctatgttcctttacactctatggtgtgagttctattctatcagcaattgggcattgaataactggttgcttaccttcagcttttgactgtgttgcctagtaataaactgcttctttttgccttgaccagatagtgaactgttgcaatatgaggaaaaaagttcctggaagggatttttgcttgttgctcatgagccaggcactacagttggtggttcccacataagaggaagcatggttagagcatcggaagctggttatgaagaagttgatcttgttttaccaggcactggacggtacattttcttcagttttgccaaaacatttgatgatctggctttgcaccatagatgctgcaatgcaatactagaacacatattactatattaaattagggagtctcctggggtttactggcagaggggagaaactttccactagccaaccggaactcagactgtccgttaactctaaaatgtcatggctgtccgttaactctaaaatgtcatggctgatttaaatgttccactagccaaccggaactcagactgtccgttaactctaaaatgtcatggctgatttaaatgaaaaacatgatggtcaaattacttgggtagttattagtcctgaggaagatgaattctgcattcttgcaccttacacaagatgaattatgttgctgattcatctgtatgtattctgtatcgtgctttcaggtttcgtgtgcagttaggggtgaatatgccagctcgagcccggaaagtgcatgagtacatgaacacggaacttgaaaacccaaataccattgaggagtacgatgttgttctttaccttggtattatagacatattacaggagtacaatatgtcaaaaagggtcgagcatgcagtcaaatcactcaagttcgatcccctttcaatatcagctgttgatccgaattcgtactcaaaacgatttgtaaagttccttgagagtgttttccctgaacaagactgagtagacataataaataatacattgtagcacttctgccctcattttttcttgtaaaaagctaacatgttctcaattattcacgctggcttctacgcacctgtaagtgttatttgttaatctctctctatttcaaattatatgatgttttggtttttctagatatatagtttttgttttgcacttagatatacgctaaaagtaaaaaaaaaaaaaatcaaaacatcttatgatttggaacatagagagcaagtatttacctgggctgtcatgttctttttgttggctttgcttcttgtcaagcggtggttcacctctgcccggcaaaacattgcaaatggtgcacataattttagaatggccataaacgcggtgtttcagttaccactgatgaccacacatccagcattcatgattcatgtacgatgcatactctcaaatggcgctttcgtttttatttgacaaacattgtccaatcatagagtaactaggctcaaaagattcatctaacaaattacagataaactgtacaattagtttttattttcgtctatatttaaatcttcatgcatgcgaccaaagattcgatgtgacggggaatcttgaaaatttttacgaactaaacaaggcaaca

SEQ ID NO: 3848 - DNA, 6119 bp, Sorghum bicolor
atcaccaagacaaaattcaggctttctacacttcctttatcactatgcactagataatattcaatgttgtaaataaacaaagtaaaaacaaaatcgtactaaaagttcaaattaaaccatgctatcagatgggtcgacaaacctatgaattcacccagccaaacgttcgcaataagcatgaggtcgttcaaactgttactactaggagccacttcgatcgatgatccataccttcttcttgcactgcttgaagagcgggtcgaggtatcgcgcgcactgcttgcaggtggctaccgcggccttccctttcgccgtccgccgttccgcctccggcataccgtccacctcctgagtccactcgcccatcagcctcctgaagaacgcggtgatcttgtcctcgtcgcagagctcctcgaacggcacatctcccggtacgccgtcgtcgccctccccacgctgggcctccacgccggccgccttgggcttcgtcgcggccgcagccttggcacgcagcgcctggatgtcgcggaggaagtcgttggtctgcccctccccgatctccgcctcatcgacgtcggcgagcgcggcggggtcctcgatcaggtcccggaggcggcggaggcgcgcgacgtcgtcctcgccaaagagcgtggccggctgccgcagcacgcgcaagcgtcggatgacctcctccctcgggagcgactcctcggacccgctctctgcccgcgacgcgtcggcgtcggcgggtgcggaggtgggcgaggaggagctcgaggaaggggaggacaccgctgccaggcgggaatgcctgagctgcttttggaggaggagctggcgctcggcctcgcggatgcgctggagctcgcgggcctcgatctcggcgcggcggaggaccctgcggccgccgaaatcggcgttgaggagctggcgcttgcgctgcagctcgcgcttcagcacgtccattggctagctctcgctgcagctgtggcggaggtcgcgatcgcgccgcgcgtcgggtcgtttgctcgggcaaggagctccggatcgtgaaaaacccgcgctgtggatcgtagggcgggggaggcgcggggtctggaaggttcgggttggatgtggtgccggggcggggagctcgagctctcggcctttcgcgcgaaccttctggattcccgggaaatccggatgcgagtggagcagaaggttgttttgggctgatagaatttaggcccagcgcaaggttgtgggctgtggcagggcaattaggatctcacgataatgatgatgatatcgacgtcaacttgcgttgcggttggcaaatgttgtcatgtatcctggatccttcctgggctgaaaattggagttatatttgggcttacgttaattagtgttcaattatagactaactaaatttaaaagattcgtctagtaaattatactctagctgtattttcagttttataaataatctatatataacactctatgtatgtgtcctatttgatgtgacgaatagtaaagtttaacaaaggcaatggccttatactactactctacacttgactcgacggcacgcccgactgcgtataaagccacaaagccgtttggctggcaaggaatataagcctaacccaaccaccaatcagcgatcagtgatcaccgaccgccgaccggcacagcgtcgtggcttggcaggcagctccagcgaagccgaccgcatccgcaaggccaaaaaggcgaggagcctcgtccaagcggagacgcgtacgtcgagcagagctcgccgccgcaaggaacacgagccgcgctaaaaactactcggccactccggctccgggagcccctgtccccacgaaaccgagttgtagcgtgtttcacgcacgttggcggacaggattaccgcgccacttccccccgtggtccacgcggccggcccctctcgcctctcgcctcccccgaaactctcttctatttaaacgccacgcctcgctccccccaatctctctcgctccgctcttcgccccggcactctgcgagtctccatagcgctcgacacatcaccgcggcaactcgccccggttcggttccaccgccgtctcggcaatctctcctgcctcgtcttctcaagccctcccgcccgccatggccgcgaactcccccttcgactgcgtgctcctaggtgagcgtcgatcgccagctagctcaaagtccagggcgattgctgctgtcgatgactatatatatatgtagctgatgcggtttttttgtgtggcccgcgccgcgcgctccggcaccgtgcagacctggacgacaccctgtacccgggcaacaccggcatcggccccgccctgaagcgcaacatcgacgagttcctgcaggccaagctcggcgtctcggcggagaaggccgccgccatgcgcgtcgagctcttccgcacgcacggcagctccctcgccggactcatcgtacgttccggttcctttcctttcctttacccggcttgaattctgaccaggcctagctagctcttgtcgcttgtcgatcaccatctttctgattctgactgcgttgttcgtggattccgcgtctggttttcgtcgatttccgcaggcgctcggctatgacgtgcacccggacgagtaccacaggtcagcactgcacgcaagcaaacacgaaaccaatttttagttcctcatcgaaacctgccgcgagtttacagttggccgcaatcgactgacccggattccgcttcttccacctgcagctacgtgcacggcaggctaccgtacgacatgatccccgccgacccgcagctggcgcgcctgctgcagagcatcccgcagcgcaaagtggtaagcatgcggcgtctccttttcacacgaaacccctccgtcccattccatccagacacttggcattacattacacgaccgatcgatgagctaaccatgtgcgttttcgcgcgcgcagctcttcaccaactcggaccgggcgcacatgaagcgggcgttggagcggctgggcgtggacgaggccgtcttcgacgccgtcgtgtgcttcgagaccatgaacccgcacctcttcggcggcgaggccagagaggagcgcgtcgacggcggcgaccacccggtcgtggtcctcaaaccggcggtggacgccatcgtggcggggctgcgcgccgccggctccaacccacgccggacggtaataaccactaacactgcatgctcactccaatgatactactagtttggtcggtagttttgttcagtttctagacgggttaagttaatcccctgtcatctaaaactatttttttttaatgtttcctggagtcgtagagcactggataacacaattatgaattaaaacaaggtcgtagccggggacccacactgtcatggacgctatcatactctagaacatgcttttgaaaactgtcgtcttagcaaactaggtcgctcttagatggcaccgtgtctaatgtttttttaataaaaaaaatactgatatactgctttggtaattaacgctacaagagaatcgaattatatgcgtcgtgaaaagtgacatttaggtggcagtatatacaatgtgaataccccgacgacttataacgaagtagtagcacaactaatcagggccttatcacttatcagcacttgctgctttggatgaaagcaatttaagcttgtacattataatctccgtcgtacataccatcatttgttaccaaggatcactaaattaaaatttggtggttgctcctatcagctcttcctggacgacagcgagaggaacatcaccgctgggaaagcgctcggcctccgcaccgccctggtacgtaacgtatcgcttgccattctattctgcaacaaacacctttctcccgcctcgatccagacacgcaaacgcatggcaccatcgtgctctgctcactacgctgccgtcacgcatcctgcattcatccttccgcggcaccaggtcagatcacatgtgtgttcgcggggtcgtcggagtacgcaagtagttggtcgatcaggtggccggccggccggccggtgccgctcaaagtcacagcgtgtgttagttacggggagtaccgagtaccagttgctacccaccaccaccaccaccaccactggtccacggcaccacccgatggtgcccggcgccttgtcggggtcgttactcgttagcgtaggcatattcccccgctcggcgccgtgccatcgatctcgatgccgcggagatcatctgcttggcgcgatcgatcgggcttggattgtttggcgcgatcgcccctgtcatcggtaatcaggattgcttttgctcatgcgcgccatcagtcaagatgattggcgctctagtgtgtctagctggcgtggcaatttggcaacgagctagtaggtgcaaggtgatgcctctgtctctgatataagatcatgcatccaacgctggcaaacatggcatatccatcttctcttattctcttttttccccctcttgagcgggcgaaaacgaaagaaaagttcgctttcctctcctcatgttcatttgtccatgttgaatatgatatcggcaggaatttttgaaattggacggtccaattcacgtgcctgtcgattcaatccaatggtctctcactcttcgccacaaatccggggagagcaaggagaaatatcatctccgttggttttggcgttttgggaacggaacaaggaaacaagaaaaatgagcagtgctagctgacgcatacgttttcatttgttttcggtagtcctggcaacatatcgatagtgcgtggttgcgccgtcacgtcagcacgcacattgcctgtctgcctttttttgggcgatcatgcatgtcgctgcatcgatacagcagtactacacaattagtctctgaacaccccagctttctgcagttctacccattgatgcgatacctctctgaaaaccagcattaatccattcgttaatcattttttcaggttggcaagagggtgaggagcaaggacgcagactacgcgctggagaacatcggcgcgctccggcgggtcatcccggagatctggggcgtcgtcgccggcggcgagagtgaacgatcggaccacagcattgacaagatgccgatgaggtccgacctggactccatcatccagcccacgtccatccaggcctaataacctcatcccacccaacttcataaataatcaatcagtcagaatcatgggatgccactaataaatcaaatctccatcgtctctctctctctcaccacctaatcgatcatcatgtacattattctgattcctgatgtgcgtccgtgcgcgcgtgtgtgtgtgaatatctatctgtacctatctagctgacaggcatgtacatacacatttctgatcagcaccggttgtcagtgcatgtaaagcagcaattcgccaaattccaagtgcatgacgagtcatcatctgtattatgataagaataacaagtcgtacttatgtaactatcgcgtgctctgttctccatatatatgtcccgatgtaaagaataatcagatacgcagatggtggaagcaccaaaccctatcttgggttattggtgaatgcgtgtttctcaatggatggaaaagcctcatccgtggcaccatacataaatagacctcttggagatcatgcagtattgtttacatggacaataatcaatgtgatcctattcatacgtgaccactcctattcatgggttaacacatgatcgagtctaacgcatctggtcgtaacacacatgcatacacacgatctggtctatgttgccgaatgttgaggttatcctttaacactccccctcaatcacaactttaccaggttgagattgtatttgaagttctctaagagtcgaactgacactggctttgtaaagccatcagctacttgatcaccagaagagataaattcaatatccaacaatttccgtgatactctttctctgacgaagtgataatcaacttctatatgtttagttctggcatgaaatactggattagctgacaagtacttcgctccaatattatcacaccataacttagctgcccttgggctgttgatatgcaattcttgaaga

SEQ ID NO: 3849 - DNA, 13246 bp, Sorghum bicolor
tgggggggggggggggattgtatttaaatatctcatagttagcccttgaaaaaaaagataagtatgcccctttagatattcacatctatcaacagacttttagtttgatgtttaagtctatgagaaaaatgatcctctgtgatatgtgttttcttcatgttttcagcatattcctctgattttcttaacctattacttgccatacttttacatggacggtagatttgctgccaggagtacagtgagacaataaatgttgttcttagtcttcaggcagggctgtccttgattattgcagaactaacaatggtatgtctgcacacttggacagattcatcttttgtccatgcttcattagggaacattcgtgttcatgttatggatagactacttttagccactgctagcgcatgtaactggtccccatcttttaaacatttaacatttggtattgtcaggtttcaggcataacagttggtttcaaccttgtttttgaatatggtggtattataacaggcctatgtttttcaagtgttgtagtctatctgctgccacatgttatctcccgtctggtaatttattaacccaaagagctgcacaaaaaaggacgaccttctttaatatcttatatatttctggtttcgtggttgtgctcattctagggcaggaggatggctggaacattcaatgcctgcatagcaggctttacacttctttgctttgtgcttggtttattagtcagtcaaccaaaggtccctgtcaatgtgaatgtgatgttccccaagttgagtggtgagagtgcttactcgctgatggcacttcttggcgcaaatgtaataacatacggtttttatgttcattcatcggttgttcaggtaatctagctgtccattgctcattattagtctttatcacaattgtcagagactctttggagttacatctggtgcactaagttaatgtgcgtttttcattgccggacacatcttcttagtgtatagaatgtttcatgttttcgcaatcaaataataccactggaggagtaacttttcttaaatacacagtaatataatgcttattaccaaaggatgactggattattgcttcagttgtgtttgtttcatgtcgaaagcaacttatgtgtacattttattttcacttatgtgtatccatccgcagtatttctcatataatgcatcacattcatcattagtctacagcaatttattgatcttcgtggtgtatgatactatttattagcagcatgtttataacttgataacctgattcacagtgactaaaacagaaaaaaaatcttctgattcatagtaacgtcatgataggccaaaaactgaaccgaggaagttatatttaatgagacattagaaatctcactagaatgcaatttagttatatcatattcaaaatgcatgcccactaacacaacattcaaaatcttcccttaaaatactataaaacacatcaagtcattgtgttaatacttttgcactctgcactccactttgataaaccaggccattttcgttgatttgttctctacttatttgattgtatgttaattcagatatcatatgtgcaggtgcaaagaagatctctagctcctacccttggttccctgtttcatgatcacctgttttctgtattattcgtatttactggggtttttcttgtgaactatgttctattgagctcagcagcagatgaatccagtaatataacacttgttaactatcaagatggtattgagttaatgaaccaggttcgtccaatatctgttagccctttgtgctattgcctattgctgttctagaaggaatcgaactcagagaacataacatgtttccttattcctatcttgttcatgttgtcacccttacacagcctgtaacagcatggaaactgagaaaagcactatcactttgagtatggattcttcattgaagctccttactaagtttgtgtattgttgtcttctgcagatgtttgagagtcctgtggcaccagttttgttgttagtgatcctaatcttctcaagccacatcatctcgttgacatctattatcggtagtgatgtgattttaaagaacacttttggtgttaaactgccagattctgcacatcatctcctacttaagggtttcgccatcattccttgtatctactgtggaaaggtcgctggttttgaagggatatatcagttacttattatctgtccagttatccaggctatgttccttccttccactgttatcccccttatccgtatttcctcatcaagattaatcatgggctgctacaaaatatctttatatgttgaaatacttgccactcttgcatttcttcttatgctgtttgcaaatatcatttttgtggcggaaatcctgtttggtgatagcacctggacaaacaacctcaaaggaaacaccggatccggccctgttttacttccatatattgtcatagtcctaacttcttttgcaagtattgcttttacgctattccttgctgttactccactaaagtcagcaagtaatgaagctgaaaacgagaatttgtctgtgtgctcacatagtgaagcattgaacattgctcactatagagaagagacttctcttgaaagtgttccacttgaagaagttcagtggtcgtctattgctgttgctccgagggattcgttggaaggtcatcagaaatcagctttggagtataccgagtgttctgataccgctacagagtctgatcatgatgctcaagaaccaacatctcataggacagtggatcctgaagctcacctctcaccgcctgcattccgtgatgagccaaaatttgttgaggttgactggacagagccaatgtcaatagtttgtactgacaccatagtagaacaaagtactgcagagaacatcaaagtgaagagcgcgactgagaagattgttccagtggaaccagatgtttgcgcacagaaggattctgaggtgtcacatgatttggaatttgacaagtcctatggaggtaaggtaccttctttcccttctggtggcccaccatctcttatgttgagcaggggagatgatactgatgctggtaatgtcagtggtttcatctcaaaacagtctggtttgggacgtgcagcaaggagacagttagcagcaattcttgatgagttctgggggcaactttttgattatcgtggtaaacttacacaagaggccaacaataaaagcttcaactatttgattggactggacttgagagcagctggttctgctgtgaggaaagataacctatcaattgaagcttccagtaactcaatgatgagagatgtaatgcaagggtcagctactgtattgaacacatgggattctcatgataaagatatcactaatcaagacacaggtatctgtctgcaggtgggtaccatgggtccaccaacatggtctcaaagcatgcatttaccaaatagagatattccaagttcaggcagaaccttctttgagcaaaatgctaaattattttcaaattttcatactccatcttactccagtaaccagttttatcaaccggctaccattcatgggtatcagctagcaaactatttgaaagggataaatgcaagtcgaaatccatactctagcactccattggacccatggcaacctcctagatcttctgaatctgctattcccacctatactggctctgcaatgaatgctcatacgcataatctccttggttcatttggagatagctctttgcaaagcccgacattgaaccgctcaagtacaatggcagtggaaagatcctattatgatcctatctccattggtgggagtgatagtgttggctcatctgctaactcaaagaagtaccacagttcacctaacatatctgcggtaattgctgcgagcagagatgctttgttgaatgaagcaagtttgggtcctgctgcaaatctagcatacctgactagtttggcatctgaaaaatcacggtatgtggacttagcagtcagaccatcatctccacttactgagttgtcacaacataatgttcagagagagatgctctctacacattcgggtacaaacaccaaaaccaaattcctttggtcccaacagccatttgaacaattatttggtgtgttaagttcagaggtgaataggagtgaggtgaacactggccagggagcatgtagtgccatgaaggatgatttctcttacacacagtttgaggcagaacttcttaagtctcttagattttgcatcatgaagctcttgaagctggaaggatcggagtggctgtttcgtcagaatggcggttgtgatgaaaatctaattgataaagtctctgaaaccgagagagtttcacagggaggaaccagtgatgacagagataccagttctgtgcacagagtgccaaattgcggagatggttgtgtttggcaggcttcactgattgttagttttggtgtctggtgtatccatcgggtgctagacctgtcccgtgtggaaagtagaccagaactttggggcaagtatacatatgttctcaaccgtcttcaggtgattccttttgactgcacacctgtttcccagcgaactacacatcttgttcttatgccagtagaaaagggtaaacctaaggaatagattcagcctttggttatgccagtgcctcgttcatatagcagagatttttgtaatcctttcctgattacatttcaacgcttgaaaacgtttacatcagcagttacaggatctaaagatcacattgccgctgaacaaaaaaccctgctcttgtgttcattctctcccaatattagttctgagctgttgtttacttcatgtagggaatcattgatccttcactctccaatccccggaaacccctaatggcgtgtgcatgcctcctgaaagcaggctcggttggcaaacccatccccggcagcttcatcacggcagccatgatactggaggtgatcaagggcgtggaacaagccgtctcaggccgcaagggccggagcggaacagcagctggagatgtggcctttcccaaagggaaggcgaacctgctctctgtgctcaagcgatacaagcgcaggcttggcaacaagacgccgcctaggcggtagaacaaaacagaaaggaagaaaacatgttcatgttccatcttgctgcttctagagtcatgggtgcaagaattcctgtttctttttctgtacccgtttttagcatttggcccctacaagtttttgcatatgatgtgatgttcgcacgaggggccaaaactgccaaatgttgttcggtgtacagcatgagttttagtagtttcctcaatcagcattgtgaaatgatgtacagttaagtttagctctgttgttggcattggtctacatcctgtcatcctgtgtgaaattgtagtcaagctgtgtggttagcgtccaggccctttcgcctggttcctgaaagtcctgtggactgtgctcaggttagcgaaattcgagttcggaagcaaccaagtcatcgatgtcgccgaggctcgccacttgcgaattgccatggacgatggcaggtgaaggtgatactatgccgatatgcgcgaccttgggttgggccgtttgggggcgagtggttctggcatcgtcgcgtagctgcgtctgcgtcctctcgcgacgtctcgtacagtcgtccttcctccagggctccacgtcactgctcgccgccaccaccccgccgcctccatctcggtcccgtacagtacagcctctgcgacgcgtcggcgcatccctgctcgccgccatcgtttcccatcccacccaccgatgtatgtcggaggagcaaataagaggagaggggtcagttgtcttcttcagttcttctctcccatattagccgagaaggcaccgtagaaagatcccccaaaacttttcagaaatccgctttcactatcagtagggctcgcaactttgtttgcacagcgcatttcttggtcttacctcgttccttgtgtagagctcttgtggcaggggaatcccaagcgaaatagggagagaaaaaaatcctggaataaaaggtaacagcggcaaagggatttgtttctttcggaggcattgttcatttttatatgttggggagaggattcgtagtctgactacatgctgccttgatgcgtgtttctttttcgattgcttgggctctatatgatctggtgctttgatcatgttgcaggtggctcggtgttagctgttattgttaaggtttattgcctccatgggcgcaagatcctgaaaattgaggtacagaaacctaagctttcgcccctcttgaagataaatattggagattttggttggaaggaagacactccatcactaattcatggttgcttctacagtgctctcaccatttctgtaagaaaagacatgttatcttctcagccatagtatgatagtagtccacatcctcgcaagaattatgtggtgtaaatctttctgaagcaagttaaaggctgtggattgtgattgattgagcttagatgaggagtggcatgccctgggttttacagtgctgtggatggtcatcttctctgaagtttggtagtcggccaattatcggatcataaagatatagagtcaagaaggcctgagtttgatcaactgttggctattagtcttagtggtctgggtccataatcgatactgaaattttgctgattagtgttatttctgcaccatgaatagtatgcagagtatagaatctctggctgctggggatgctcagcataaactttttcgaacccttggaccaacactcgtgatttcgatggcatatattgaccttggaaagtggttggtagcagtggatgctggatctcggttcggctatgatcttgtgctactggtgctgctcttcaatttctcagccattttgtgtcaatatctgtcaactcgtatcggcatggtcactgggaagaaccttgccaaggtatgaattactgagcactttcttgttcttgcttcagacacaattttcagaactcttaccagtcactacaaccaccatgtagagatgtcactaattctagctgatattctagagcttagtagcttagcatgacctcgaaaatgataaggtttcttatgcaattcataacaatgatttggcatctcgcgtatgggtggcaattatcttcgagtagacaaggatggattctcaagtcctgaatgtttgtatcactgctgttatatgcaatctaaagctcttggtcttagagcctaaaaaaagaagtgtaccactttctgaatgaaagactgaaacacaacgtaactaaattagttactttctgctgtgtgcctgtattattacttgtttgtgttaaaattattcctgggttgctggtgaggactgtcaaaaaaacagtatttactcacaataacctcagttttatagatacaatgacagtacagatcacaggaaatcaagttaccatttttaatctctgacttctctttcaactagcaaatgcttctgcattgtgttgtctgttccaatacgtcttggaatcggactctatactgtggctagacgcgcactattttgactcagatgaacactgggtcgtgagttcaggtcacggacgagatagtaaaccaataaccaattaggatccttatctctaattcatcacgtactcctactcttagtaaaaccgaccaggactcttatggtcagggagtggagggatagacggactgggggactgggtgatggatgaaaatttggagaaagaaaattccttcttttaatattagataaaaaacaaggaaaactgttaacaataaactttatagcttggggttaagttctatctagtaaatgctcctttcattctaaattatcttaaactgtttcctgcataggctttggtagatattaaccttactctctgttcttctacatgactgatagatctgctgccaggaatacagtcaggtgatatgtgttgttctcggccttcaggcatggctatccttgttgacctctgaattgacaatggtacgcctacaaactttagatttttcgctctgctgtgcttcattctggacgtttatgagatcatggtatgcatgcatttagtttatgagtacttgttactccttaccagagcacatcatagttctcatcttctaagcacttaacatttggctactttagattgcaggcatggcagtggggttcaacattgtgtttgaacacgacgatcttatcacagccatatgttttgcaagtgttgtagttggtctactaccatacacgctctctcgtttggtaaatctataaatccccaaataaccccatcataaaaagattatcttcttaagtctactaagaccttatgtaattctagtttcttactcgtgctcattataggataagaaggtggctgggatatttaatgcctgcatagctggatttacacttctttgttttgtgcttggtttattaatcagtcacccccataccccagtcaatatgaatgtgatgttccccaagttgagtggtgaaagcgcttactcattgatggctcttcttggcacaaatataatagtacacaacttttatactcattcagcatttgttcaggtaagttctaacatctaaagcctcttgctaatccttaggtgaagttttcagatggcatgtacaagaacttagctttgccaaacttatcttccattaagttttattatcaatcattaatgaatgtgtcttgcacgttgaaagtgatccaacaacaataagcctcagggtgctgaatttaatgaaaagtggtgtctgggaaaatgtgactggccatgggggtgcttaatgttgttagtaaataatcttttgtgtccagattagagtacaggtgcagattagtgcccaggttcagtctttagtgctagcaggattctacctggtagttaaggaaaataagggctgattgaggtagtaattctctgcattaattaggaagctatcacaaccatatctgtagctcttggctgtgtataaatatggctgcaaggagacctgttgggggtttcaaatgtaatgagaacagattaagcaagtgttttatcatgattcatgactaggttattggtgtttggttgtgctgcttcatgttggggtgtttgccttccaaatgtaatgaaaacatcatgttcatgactaggtatcagtttttggttgtgctgcttcatgtttgggttggcctttcaaatgtaatgaaaacagagtaagaaagtgctctgtcatgattcatgaataggttactggtgtttggttgtgctgctttcatatctgaagcagcctatgtcactaggtggagccttttgttttctttcgtgttgtcagagttctcataataagaaacaagtcctctgtattgcctattatgatccattacttatgaattgatcttcatcaagaatgcacacagagttgattagcaaaggcaatataatggactcaaaaaataaatggtgttaaggttgttagtgtttttagttatggcaattcatggtacatgtcaagtggtccttcttatcttctatacaatacaagttcagcagatctcctgccgatcgtttcccaaaaaaaaagatacatgtcaagtggttggaatgtactcacttaaaaaaatagatcttggggggagacacctcctggcatatcgttaaggagaggtaccaggcttggaatgcggaccggcacaggggttccagtgacccctggggttttccgctctaatctagaagctggttggaatgtacttttgtactttctcttccatttcactacgcaaatcattcttttctgttctctgcttatttgattttcttggtttgttgtatactgattcagatatcatatatgcaggttcagagaagatcttcagtccatacccttggttccctgtttcacgaccaccttttctctatattatttatatttactgggattttccttgtgaattatattctcctgagctcagcagcagatgaatccagtgacacattggtcatgaactttcaagatgctatggagcaaatgcaccaggtttgtatctccagtttctgtttatttgtcaaatcgtgtcatctgttgcttttttaataattgccaagaaacagtatcacgagttcagcatgttgcatttctcctatgccttgcttgtttggatttgcaattgcctgaaatttttgtattataaatatgatgtctaccttccctcaacatgttaagctttttgatgaactgcttggtgcattgaacttgtatatggcattgtttcagtaggtcaggtttgggacctagatacctggctggcacaattttaagaaaatgataactgtaatgctttttagttcatccataggtgttaaggagaataaaaatatgtgcttacattgatttacaagcctattacttcccactcctaaacaacttaagttcctggttggtgcatattaataagtatttttagtttggattctgcatggaacccctttcctgacttctgtggattcttgccttctgcagatattcacaaatcctgcagcaccaattgtgctattagtgatccttctcttttcaagccatatcatctcattgacatgcattgttagtggtgatgtaatttcagagaacttctttggtgttaaactgcctctttcggcacatcatctgctacataagggtttggccatgattcttactatctactgtgcgaaggttgctggttctgaagggatatatcagttgcttattatgtgcccagttatccaggctatgcttcttccttcatcgattatacccattttacgtgtttcttcgtcaagattattgatgggaagatacaggatagctttatgtgttgaaatttttgccttccttgcattccttcttgcggtgttcacaaatataattttcacagcagagattctgtttggtgatagcacttggacaaacaacctgaaaggagatactggaagccctgccatacttccatattctgttatagtcctagcttcatgtgcctcaattggatttacactgttacttgctgttactccactaaaatcagcaagtaatgaagctcagactcatttgtcgtccgtgcactcacaaagagaaacattgggcactactcatagagaagcaacttgtcttgaaaaaaatgaggatgaagaatttgaaagctgttctgttggagcttttcttatgggttcatcggaaggtcatacggaatcagttcatgaacacacatgaagaaattaagaggtcttctgttggtgctgttctgagggattcattggaggttcctcagaaactagcttttgactgtggatacattggttaatcctgaagctgaatcatcaccacctataaccaatgtggtgccaaaatcagttggtgttgagtggacgcaagcagttccagagatctgtactatcatcgtagtagaacatagcgtttcagaatgtttcgagatgaagccctcaaatgaaatggtggttaaacaagaaggtgaagacaactcagatgagggtgacataggtggaagaatctctgagacaagcccttgaccaacttgacattcaacttgttgatgcctttccgatggtgtgtcggccttctttttaggctttgccaattgccttcatggttctcagtatttcatggtttggccagtgatgctagtggtgctcttagagatgatggtgtcttctcagttattttatagttgtcaactttcttgtttggatcgatctgtggtggtttcgcaagaggtgttggtggttgtagttagtggtgattttttagttaccatcagttttcatagttgtgtgttggttttgtcagctgtatgagttctttttagttggagatcaggacagtttcgcttttggaatcgtgcagtcgttcagtttttggggccttttttccaaaaatgggccaattccttttcttctaacaaattttgtaaattttgcagcaatgatcttgctgccctttcaaaaaaaatatgttaagcaaatgtttacacagatgaggaaagtgagaagtctgctggaggagatacgcctttgacttctcatgatccaccatttcttgcatgtagcatggataagaaaagtggtcatagtaatgccagtggtagcctttctaaagagtattgaaaccttggttatatttgttagtatcagctcttagaggagctgttctgctttggattgtgtaaccggatttcggtttggcctaagtgttgttcctgtactgtgtggctatacacattcactgttgaatgttggaggccggatgctttcccttaattaaagaaaagggcgtgcagcaaggaggtagttagcagtaattcttgatgagttctgggggggggggcatattttttacggagtattatcacggttcaggtgagcttacctacacgaaaaatgttcttccccacacgccgtctctccgagcgcccccttcagcgactcgggaagcaaccacgccgccgccctaggccccccaccggctctcctccatctgccacggcggcggcccgcggcggctaggccaccggcgctgccctccggcgtgcggtggcagcagcccacggcggccctaaaagtttgggtgctgttcgtgcctccgtggcggagccagaaataagataaaacaagggttaatttgtcaaaaaaaatcaaaagcatgcttctgcgcatgtatacatacagaagccaatttactaattgaatcaacataagtatagtaaaaaaaatagtgtttgtacttataattaagttccggtatacagaatgcaattagtacttttagaagaatcaacatgacttataacgacgataacaacagaagcaaagtaaatggtaatgaagtaatggatccgagcaacagcggtgggagcactgctacaaaactgctttttatttttctaaatggcgggagtgctacacggttgctatctaggggcatgcatggctgaccaatgatcatagcatcagccgatctagcctggtctgtcacagctaggccttgtttagttcgcgaaaaattttaggtttcgctattgtagcactttctgttttatttgacaaacattgttcaattatagactaattaggctcaaaagatttgtctcgcaaaatacaggt

SEQ ID NO: 3850 - DNA, 5853 bp, Sorghum bicolor
gcgaacatgtcgcgccggctggacttagaggagatcctgtactcctgcaccacccaatgtcgatgttccctttgtgcacgacccaatatttttaacacctaatacatacaccatagatagtttgaattgggacagcagtaatactcaatttttttattgtaaattgtttagagagatagtctgcctcttttttgtgcactcggcacgtgcaatctcttttcctgctagttaacccacaatttggacttttattctcttttattatatccgcttttcagttatttttaagcgtaatggtagaagctcattttttcatttaagaaggaaataaagagttaattgcaggagtgttaaaaagagtacatgatagactctcctagcaaatgggaacagaaagcccaagagccaaaatacacctaaaaacaaagcctttacaaaacctgagcaaatgacttccttctcaaccattaaatcctccataattttagcaacgagctgttgcgccgtttggagcttattgttggagattcctctatttcactctttctagacgtttcgatcaccgatactatattattaatatactccattgaaaatgcgttttttttttgtctttggttatggtcctcgtggcaacttcccagcattcaactttggtgtcaagatttgattgaagaatttgttaacccacattaaactcctcatcttgttccgagacaagcttccacacttcttgaacgtacaaacagcgaaggacaagaacacctattcagcatagcttcttcaccaacttcataagctattcaaagttgttttgtaccaagcatgtattttaaaaataactttactcatgaagctctagaaaaccagctctgacatgtgaatgggttagaatcaaactgaaaatagtagtcttttctagctgcacatatgggcctagtatgtaaaggtctaattaatgaattcttttcgtctaccataatgagctgtttgtcaaccgatctaataaaataacttcagctctattagagggctactcgtagagctgaagcaaaaaaataaaataaataaaaaataaaaatcaatgatgaaactgagttgtgctaaacacggtctcacttaagatatttatatgtgtttttattgctgctgtatgcattgaaaatttatgatgttatatagatattgaacatatatttcataaaatatttttttataaattaagacccgcttgcgtttttagtagagaggtttgggcatcatgttggagaggttccttctccatgagctagtggtgtccatgaggaagacataatgctttggtggactagttcaaggagatggctactcaaagaaattcgttgtggttttgactgccttttcgttcagtcagttggctactatggaaagagaggaacgtgaggaccttcaacaaaattatctcatcaccggtacagttgcttaagatcattaagctagaggtcaccatgtggtgtgccgctgggttcaagcatctagggatgcttgactcacaccgtcgttcagtttgaggtgtttgctattgtggttataaatttggtattatgtaatcacaaccacgtgtgagttgtctgagggcgagaacggtgagttttgtaatcttcagtttattgtaatcctgatactttgtaacaaaactttttcttctgcttaatccttgaaaaaagaaattaagactagcttaacatttgaagagaaaaatctcttcatattgatgggattctatatttgttttgcccgtaataaagcacagacacaatcctatagtcaaataaaaaggaatgcgcgatgtcaattattgagcgaatcaaactttgagtgcggtcctggtaacaaatgatttttgaagaacataccacacacttgcacctcagtccaacgcaggcactacatgaggcccacctaacagccactcagccgccgcctccttcccttaccccttctccctccacccgcgcgcggcgccaaagccacgccatgccgctagcttctctgtcgctggaccccgcccccttccctctcatccgccccgccgccggctggagcggacgcgtcctcccggtcccggggcctgcaccgcgcctatgtcggccgctgagggcggctcccgtggcacccgctaccacggatgagccctctgcggccgcgcgcggccggctggagtcgctgagccaggtggccggggtgctgggcacgcagtggggcgacgagggaaagggaaaactcgtcgacatcctcgcccagcgcttcgacgtcgtcgctcggtgccaggtctctctcgcacgcgcgcgcctctcgcgaagacgcaatgctcgctcgccgccgcgctgttactgttcgttggcgtgctggtgttcgatgaattgcattgcgctgggttataagttagtttcagggttcatgtacgcgtcagaggagtttataaccttgatataaacttgtttgctgtagaatgtctttcaccattttttttaacattctcgatccgctttcttctatcttctttgcatttggcgcagtcccttgtcgtgaacaatgccatcatcgcgatcgctgtagtacttccatcattccatggaggtggctagatattagctactccaggaactttgttaagtctccacaaaagcttttttagaggctcttcatctgcggaaacctgttcggtactgagtagttactacttaaatattgtcatgcaattatctgtaaaccatccaaagcacatgtcaaggtagtttgatcacaagttggtgagtcgtgcttcttaaggataaatcataccccccaagcttgggtgttttttatcctcagtagtcagtccccagttctcttgaattgtgtgaaatattgtcccgtgatggcgtcatgataattttaacaatattcagtaacgtggccagttcaggtaaaatatgtgaggtgcctgttcatgaacgtctgagtcatgggattgtatagaacaaacaacaggctgccacggtttttagtagaagactaacagtttattaaaattcattactgctgtttcttaccagttcttgtatatgatttgcattgcactgcatcactcttctttatgtaacttttctttttctcagtcatgctattgacttctaaaccacaatgattatggacttgaaaacgctgcattttctcaacatagcctttgtgttcctctgttcttcaacaagcagaagaacagttatgggtagtgaaacatcaatatggtttctgtggaagccaaagttttatgttacttcccacttatgctgtactcaacggtgtacatatttttgatggcatgtcctattaataaaaatgggatcatatgacttaacctttgcaataacaacatttcatcctctatagcaattcactaccaagcaaccactactaagaacgccagctactaacatgtgtagctccttacatatgatcatgcattcgtgtttccttgtgaataacattgcctgtgcagagtccactcaacttactatttcttctgctgttctatgtggttatttgaggatctgttagtttaagttgacccttcctctgaaagagttggtgacagtagtaccaggacctactgtttgcaataagatttgatacacgagatttttttttttgatgcacaacctgttttccccctttaacttgtagggttgtttatgttcttagggtggagctaatgctgggcataccatatacaattctgaagggaagaagtttgcacttcatcttgttccgtcaggcatccttaatgaaaacactcagtgtgtgattggtaatggagtagttgttcatcttcctggattctttaaggaaattgatgggctagagtctaatggaatttcttgcaagggaaggcttttggtatcagatcgtgcccatcttttgtttgatcttcatcaagttgttgatggtcttagagaggtagagcttgggaattcccttatagggacaacaaagagaggaattggaccatgctattcaaacaaggttacaaggaatggactcagaattagtgatctgcgacatatggatacctttggtgcaaaactcaacaacctactaagagatgcagctctacgcttcaaagattttgaatacaatagcaagattctcaaagaggaagttgagaagtataaaaggtttgctgaacgattggaaccttttatcactgataccgtgcatttcatgaaccagtcgattttgcagaagaagaaaatattggttgaaggtggtcaagctaccatgttagacatagactttgggacctacccctttgttacttcctcaagtccctcagctggtggaatctgtactgggcttggtattgctcccagaagtctcggtgatatcattggagtggtacgctcaattacttaaactgcttaaaacttcttacgtcccattcttcctgaacgtaatgtttttatgtccaggtaaaagcctacacaactagggttggatccggtcctttcccaacagaactattgggtaagactggtgatttgcttcgtgcttctggaatggaatttggtactacaacaggtcgtcctaggcgttgtggctggcttgatatagttgcacttaaatactgttgccaaatcaatggtttctcatctttgaatctcacaaaactcgatgtcttaactggactcaaggaaattaagctgggtacctcatactacactgatgacggtaacactgttcaatcattcccagcagatcttgatcttctagagcaaataaaggtaaggctcgaaacagtctatcctgttttactgagttgtgtttcattggtataactctatatgcaacgaaaccaaagcggtctctggcatggcacttaatttgggtattgtttctcttgacaacaattcctgtggtctctggttgtgtaggtcaaatatgaggccctacctggatgggaggaagacatttcctcaatacgagactacagtgatctcccagaaactgctcgtcgctatgtggagaggatagaggaactggtcggcattccagtccactacattggtgtcgggcctggacgtgacgccctcatatacaaataatgacccgtcttgtttctgagatccctcgcttagttcaaattgttttggttactaataaaacaggctgattgtggagggtgtaaaattcatcatcctttgctaaatgatttcagcttagcttcacgaaggatctctgtataaattgccttttgtatctattatttttactggccacctaatttaagcatctctttaagaaaacttgactggccaaatttggataagaattttgaagcaaacgaagcaccgaatgctctgattttttttttaattttgtttgaaactccagtatccaaataaattgaagcatcggatactccgaaatttctaattttgaatgaaccttctaggccttgtttagttgcaaaactttttgcaaaatagacactatagcattttcgtttgtatttgataaatattatccaattatgaactaactaggctcaaaaaatttgtctcgcaaactgtgcaatgggttattttttatctatatttaatgtttcatgcatgtaccatgagatttgatgtgtgccctgagtttgcaaatctaacctcgtacatccttagagtgagacctgaaacttccactaaccgttttatgccaccaccggcagtctttcccgcacctgagtaccaacatatcacgcacatgatctcttgctcaatgtatcgctgcttgcatcaaaagcaacgtttggtctcatctccctcaccttctactttaccacca

SEQ ID NO: 3851 - DNA, 3463 bp, Sorghum bicolor
taagtaattaattagtgctaattatttttatgagtggaaggttaacatggtaattgcggctcctcctccaccccttccccacgcacgcctcgcccacacgcacctgaatgacacaatctcatgtctccgcctgacaacaagccggttactccgatcaaggaatcagctaggtggttgagtatacgtgatcttggagggaccggctatagaggacaggtaattatggatcaaatttgtgtctccctatgagctgttactgtggttgaggtcacacattaagttcacaaaaatttctctctggttgtatggactatatcttaatgagttcgagttgttgaattgcagaagggagttatatatggttgcccacgtattacaggaatgtggtcacattttttatgtcaaaaatcataagcacgagaattgtttctggacctgagacatgatagacttgaacaatttgtttttgcattcatttcacattacctcaaacattggtagattggggagtaactcagcaaaaattacaagcagacatcaacttaaactgaaggtatacataactaagaggaatggttcgtctgatgatctgaaccttttgctcatttgctgcccatcgtatatcaatgagtagagttcctatatcaatgactaaagctaaagaagagagtgaaatattaatttccagttgaaggccagcagccacctatagacatctgatatgcaagttccttcgaagtggcaagctgcaaataacaaaggggaatgagattaatacaggtaggcaagtatagcataattttagaataataatcttgcaccataccttggacattgttggatatctccaaataattatttggttctgagaatacccaactggtaacaagctcatggccccatccctagcttgctactgtcgaacacgtcagaggtgatctggacggcctgcgcctcgatccccagcttcctgccgtcgaacaccatgtccaccgcgtaccgtccctcctagcgcacaatggacaacccgcaccctcctagcaatggggacaaccgccgcctcggcaaggagcacagacgccgccgagcccgaatctcccctattccaccgtctttgtggcggctgatttaaccgaccttggaccaccgcgttcgcggacgcgtgcatcacgccgcttgcaccctccgggcagctaggacagccgtcgccgccgtgaagaggagcgcgtacgccgccgggcccggatctcacctcctacaccgccttcgccagatctacacgatgcccccgttcctgtccgctctcgccctcgccctggtagccggcgccgccgcagccctgcctcaccctcgccctcgccctcaccctagcagccggcactgccgcaacacactctcggtgaaaaggaagaacagacagacgagagagtggataagattgaatttgaaaaataaacatgtgacaaactatactacttcaatcatttctatactacttcaatcatttctatactactcaaacattattttttattataaattttactattgtaaccttaattacataaaataatttcacaaaaagaattatctcaatttttttaaagggttgatcccatcaattttagtatacacttggtgcatatggttccaccatttaatatgcactaggtgcatctctaattagttcctcttggttcctatgtatttttagccgtcggattggtcctcgtgagccgtccatttttaaacaaccattgtaaaaattctcttttaaaaaaggaatgaaaaattggctttagcccgtgactgtgggtccaaccccgagccgtggtccgtggagtggaggtcgatcgtcctatataaccgggtccgggtgccggcgcctccttccccgtcaagcattccttcgcactttgttgcatttctgaatcctgatctgcaaagagaatccccaaactccagctagctcgtggtttagggttccagagtcggcgaagatgtcggcgccgtggtgggactcggactggaaggaccgctccgggccggagtaccgcgctttcgtgagcaacctaccctacagcaccaacgacggctccctcaaagacgccttctcctcctacggccccctcaacgccgatgtgagtgtgtctcttcttgacagatggcttcatcggttgctgtacaatgattgattacctggtcccggcgagttatgtttgttttggatgaatccacacgtgtttgggcgtcgttttctagtcttgcatgttgctctctctgggttggtccctgtctctgcacgtgttttggatctgtgttcccctatcgtcaacactaatttttaacctatttattagatgtgcccatctgtacctgtttccccttttgcttcatctgctaaatatttgtatttaaagttctaaactttgctaaatatttgtatttaaagttctaaactttaattaattttggcccgatagtttagatctgtccccctgcacatgccggttttagatctgctgatctgcaactgtttttcttctttgcttcatctgctaatacttgtagtactgattaaaagttcgaactttttaattaattttggcccgatcgtttagatctgtacttgtacttgtttccatcctttgcttcatctgctaaatacttgttgtgtactgattaaaatttcgatctttttaattaattttggcccgatcgtttagatctgtacttgtacttgtttccagggaagtttgttctattgcggctaaaaatctgcactttgtatgcaggtcgcgtatgaccgtgacacggggaggtcacgtggctttgggttcgtgcagttcgatgacaagaagtcgatggacaacgccatccaggggatgaacggccagcaggtcggcggccgcacagtctccgtcagccaggcgaacgagcgcccccgccgctggagggcgtgagccgctcagcaggccggcggcgcctggccagcggccgcggtcagggcgtcaggcaggcttacggcgggccagttatcatcacccttaccgttttttagctctctatcagtagtgtttggtcctctatcgttagcatttgcggtttgtcaagtttagtgtcgtgggatggaacttgccttgatggtgctaaggtgtaaggtgttcgttggcttgataatgctaagtttcgtcgttggctttgtgtgcctgtgaactcgacaagtcatctgtcgtcgtattcgtatgctttgaatctatgaaatggaacttatcgtatgtattatgtcctggccgctgggcgtatgtgtctttcgttttaatcgattgcaatgtctgattagctgattctgcgagttgcatgtttgcacaattgtttaaaaacatcgcttgcaacaatgtttttatctgacaacaatcagcattagcaacaccttttttttcagtcagacgaacagaagttg

SEQ ID NO: 3852 - DNA, 5791 bp, Sorghum bicolor
gtccagtgctatgaaggtcacttgcgccatggagtctgacgccatgaaggttggaagcaccatggagtccagtgctatgaaggtcacttgcgccatggaggaggcgctggacgatgcagagtttgcaacggactcggagatgacgatggcctccatcactgcacactcgtctccttctcctcaagctcgctcgcctgcaaggtcgtctggacactcaccgctagagatggctcgctcgcctccacgcttgccgctagctcaccgcgcggcgagctcgccgcacgctcgtggatgggttggactcagaggcgcacggtcgactctatcttcgtcgatgtgctggacttggaggcgcagaactccgtcgtggagtataggcagctcaaacaacgttcttcttgttctaaacgagtgagcaggcaacaaacacgcgaatgcaaaactgccaagtgaaaatgcatgcgctaacgcaaaactaccaagcgaaaatgcaggcaccaaaaacgcaaaactttcatctttgccatgcaaaataaaaaagtgaggctattgagattcgaacctgcgatgcagcattgaatcctctgtggactatccaattgggatgattaactttatgaaacagagagcaaccgtaactccatttattaggggtaaagaaggaaaactaacccctaattaattactccttggttaccacaatcatgtcctaaaggtcatgttttttagtatggagggagtattccagttcgaacttcttatgaatataaatatagttcatcactcgctagctagtgcctacaggctatataggttcactttcaggtgccaggtagaaacaccgttttcagaaaccaatacgcaagcaggttagatggacggcattaccgtggccggatcttcctaatccaggacgcacgcattaaatcaaagttaagctatcaccatcaataaagtggcctccatgtccccgtcagctttgtaacgccctgacagcacattccccggtcgctacaacttcagagctaccattcctaataaccaacctaggcggcgctccgatcaactgctcactggaaggcaaaatgaatcgagttttccactggaacgcactggaaggttaattgtacaaaattaacccagcatgcatgcatgatttcccataaaaaaaatgcatgatttcccagaacgcaagcgctttccactcgtatccgggtcgcatccgcgcccaggccgagcaacgcaagaatgcctgctgacgggcgctcgcgttcacgttgcatgcctggccgattcccgccgggcgacggacgggcgtctcttggcctcgatcatcgacaggtttccgatgaagctagctcgccaaccgcatctaacaaaacaaaaagaaagggatgcatgcgtgcatgcatgatgctatatccgcagggaagctgatgctgatgcatccggccgctcgctgcctctctagtttttcctacctaaaagtctcgtcagggcagctaccgaactgacattctcggctttatcatgccaaaccaatccagacccatgggaccatagagcaacggcttcggccaaatgtaggctatataaagctgttacatcaggataaagttgttattttttatgaattgttataattagttgttacatcaggattaagaagagcagatgatctgaaaacaaactggtccctgatgattacgacgtggtgcagtgaaatctgaaaaggcaactgatgctgcacagctgcagtgaaccggaaacgcacgcgccagcagaagcccgggctacagctacataaaggggagccgctccggcgattcttgccccgaccgcttcttcgcaaacctccccgctcccactccccccttcgtcttcctccgtctccatctcccacggatcaccctcttccttcgtcttccttcgcagacctgcatttgctggtgcgccgccgccgcgtggcgaggagctagcccgcgcggccggccagcgccatgcctatccccaaggccgacgagctggttgtgcacgccgtcaaggagcagttcgtcggcctcgacttctgcatcaccagccccccgccatggcgtacgttacatacatacatacatacagctgcctgtcaccatttggtttcgtttgctttgctttgattgccggctctgtctgaaccgcttgtcgttccgtgctctgctgcagtcacgacgatcctcgtgggcttccagcactacctggtgatgctcggcaccaccgtcctcatcgccaccatcatcgtcccgctcatgggcggcggccatgtatgtcactgcctgactgcctccttctctattccccttcattattagttatttcggttgcccgcaccggaccagtggctcgagcactgatcgatggacgcacgcatgcataatgcagtatgagaaggcgattgtgatccagaccatcctgttcctgtccgggatcaacacgctgctgcaggtccacttcggcacgcggctccccgccgtgatgagcggctcctacacctacatctacccggccgtcgccatcatcctcagcccccgatacgcgctcgtcatcgaccctctcgaggtgcggcagcgcacacgcccttctacttcctctgttctttgcttcagtcaccgcatttttagcagctgatctcgattccatctgttcagaggtttatcttcacgatgaggtcgctccagggcgcgctcatcatcgccggcgtcttccaggccgtcgtcggcttcttcggcatatggagagtcttcataaggttggtctttgagactcttttttttttttgtcgcctctgttcttgctcttgtactgacgctgtcgctgtgccttgccgtgtggccccgtgcgtttccaggttcctcagccctctcgcggcggtccccttcgtcacgctctcgggcctgggactcttctacttcgcgttccccggggtgactcttctacttctcgtgcgtcttcttctttttgccgccgcagcttgctaatcagtctagtctctcctgcactgcactgcaggtcaccaaatgcatcgaagtgggtctcccggccctcgtcctcgtggtgatcttcgcggaggtaacagacagcaaccgacccaccggtggctggcggtggccgtacggcgccatgccatggactgacatccgttttccgccttgcagtacgccgcccactacttcgccaaggggagcatcgttttcggccggtgcgccgtgctggtgaccatcatcgtcgtgtggatctacgccgagatcctgacggcggccggcgccttcaacaataggggccccgtgacgcagttctcctgccgctccgaccgcgccgggatcatcgagggctcaccttggtatgctaattgctcagctcacaatcagtgagtgcgcgcactggtctttgatgtgctctgtctgacctcacctgacgatgcgttgcgtgctctgctccgaacagggtgaggtttccgtatccgttccagtggggatacccgattttctgcttccaggattgcttcgccatgatggctgcttcttttgcatcacttattgaggtatgcgacgcactgtgttcttctggtaaagatttgagtgagcattgacaaccttccaagagggcacgaatatatagtctgaagcaattcagtaaacactggcaacattccaaaaggacgcgaaatagttaaagcaaatatgaaccccctaactcatcacaaagataaaatgaggatagtattagcatcttgaacaatacaactgcttgttctaagactgactaatatgtccctaacctaagagtaccttacctatgctgactctgatgacgaggaactcccaatgcagtctaccggcaccttaattgcagtgtcaagatacgcaggcgccacgttcaccccaccctccgtgttctcgcgtggagttggctgggaggtaatcaaatcaaataatccaaaagttcagttcttctaactgtcttttacaaggattttcactgactgggaagtaacttccaacgaatatcagggcatatctatcatactggacgggatgtgcggtacactgacaggaactgcagcttcagtgtaatgcactctactttaatcagttgataacctcagttaccaagccgaaagctttcaagtaacctgcctttgttgctttcaaagtgagaatgcaggcctgttggcagtgacgcgcgttggaagccggcgagttgtaaagatcgcagccttgttcatgattttcttctcattgtttggtaggctccctcattctccgaaacttaatgatccagcatttcatggttagtaattgcacctgactgatacgaactgcaaatcaacaggcaaattcggggcggttcttgcatccattccattgccgcttttcgctgcggtgtattgtgtcctctgggcttatgcaggtaaagccttactatcaggccggatccacgacagttttaaacttttacccatcatcatagtatggaatctggcgtttgtttcataccgtgttttgttgatctgaacttgctttctgcctgaaacagctggtgcaggcttcgccttccttcagtactgcaacctcaactccttgagaacaaagttcatactcagcatctcgatattcctgggactgtccatcccacagtacttccggatctacgagatgttcttcggcttcggaccagttcacacccattcagtcgcggtatgccaactcgatgcaatagacggaatgaataccattgaactttcacattctcacctctttctcctacttgccattgcagttcaatgtgatggtcaatgtcatcttctcgtcgccggcgacggtggccgccatactggcctactttctggacgtcacccacctgtactgggaggctagtgtgaagaaggacaggggttggttctggtgggagaagttcaagaactacaagtatgatgccaggagcgaggagttctaccgtcttccttatggcttgagcaggtacttcccctcgctttaggatgccgagaggaagatgacagaccaagttctatgtaactggtggagcgtagaagatgaacactagttcaaggcaatagaaccatatgttattatcaagcagttgggaaggagcttgatgttttgatttaccttataaagcattttggatgataaacttttgtaattactgggagagtaggatggtatcgccatcaaccagggggagaattctgcaataattcagtcaccatttttgcttcagattcgaaacagaacacaaatgccttgacagcaattgaatatgtttacaagtcgtctagtcgaacctagttgtcatgggatcgactaggacgattgttcgcaattaatcggtcgacttgtacaagtcgacggcacccctaatcgattaacagggaccaaataggacgaaccgcaactcggatgacttgtaatcattgaaattgattgaaaaacatggcttcgattattatcgcacattattcaccgtctattaaaacctacggcaaagcttttgccatcctttcgaggaaaaaattcccacatcatccatgcactagtcaagtgttcactaaagcaaaagcatagtcaagttactacccgaaatggcaacccaattatttgtcgccgttgccagcagatgatccagccgccgccgccgccgccgccgccgccttgggcacccacacacgcacgtggggctctgcagccccattgcagcggccgcgccagggttcagccgacctcctcccaaa

SEQ ID NO: 3853 - DNA, 8092 bp, Sorghum bicolor
ccgggcatcccgcagccgggcggcctggtccgcgccggcgcgcttgaggccgtcggcgaggtcggacttggcgcggagctgggtggtgagcgcctccagctcggcacgcaggtcgtccaactccttgctcatctcctccatttccgccgctgacaaaaaaacaaagccaaatgtcaacccaagacccaagcaaattaaccaaagatcgcgctgcagaggcgggcggcggcgggcacctttctgggaggagcaggtcaggaagaatgaacgggacatggaggggtcaggaggctagggggctcggcatggacggagcgagcaattgcggcgccgatccaaggttccgttctgctggcagtgaggaatggggatggcgaaaccctagcgtgtagtagagggggaacgagaaggatttgaaattttggggggctttacctgggagtttgaggacggaggaggtggcgcggcgcggccgcaggaggcggaggcggatcggatctgggcggcgggctccgttccgttttcaccggccctccatgtttgcaggatttgaaattggctgcgcggcgccgaggtctgccactctgcctggtggctggtgggagcaggtgctccggccgcttgtgctgacggtggggcgcgcaccaacgcaatttgggcctatctcagcatccacgtatatacctgtaaaactggccacgttaggcctaaagtgatttgcaggcttcagtgggctccacctaggcctaaagggatttgcaggcttcagtgatgtcgcgggctggcttgtacaaaggcccgacccatgagcttaggccctgtatagtttgaggataaaattttttgagtgtcacgtcgaatatgtcggaagaatatcaggaagggtttatagaaactaataaaaaaacaaattgcatagctcgtcaggaaactgcaagacaaatgtataattaatctatcattagcacatgtaggtactgtagcacttaaggctaatcatggagtaactaggcttaaaaaattcgtctcgcgattttcaaccaaactgtgtaattagtttcttttttatctacatttaatgttccatgcatgtgtccaaagatttgatgggattgacgaaaaatttttaggtggagaactaaatagggcctaagaagtagcagccttcgatgggactctgttagtatgagaagagatatctacatgtagcaactccagcagtagtccccaaaactaggcctctacttttaatttggttgctccccctacttcttggggctcaacttttttgcttcaactccaacagtagcacccaaatttgggcccccaaacctattccagagagaatgacagaagggacccactcgtcagtgtctttttcttctttctctttcttcttcctttggacatggacacagttagagcattgagccggttactgtaggatatcatgcacatacaagggtagagagagagcatacgctggggctaggacacgcgatggaggatgggggctgccctgttgggccaacatgaatgaggtctggaggagaaatatgggtgcccagccaaatatggggtgtggagtaggggccctgctggagtaatgtttttagactggacacccatatttagctattggggtttgaatagaggtcctgctagagttgctcttaatcggttactttttagctgacgccaacagcaagtgctccctgtaaccacggagccaccttgcctcaagtgatttgcaggcttcagtgggctccacctaggcctaaagggatttgcaggcttcagtgagccctaccgttggtgtcgcgggctggcttgtacaaaggcctgacccatgggctcaaaggtttggctagtcactgtctgtcgatcaggagcccacatggcgaggacccggggccggggttggtgcaggctgaggcggcctccggagtccggagtgaggaaccgagcattttatataatgcaaaacgactcactcacctgccgatcccaatcgcctgatcgtcgtcggtcagacagacgccgaaccgagaccgagagtgcaaaggggccaaaccttccaccttcccattccacgcacagacttttccccagctgcgcccgccccaactacctcgcgcgcgcggcaggtcgtgcgatggacgacgccacggtcgcatcgcggcagcgccagcagcagcagccggcctcgccggcgacgacgacgaaggattccagggacatgatggcggagctggacgcgccgctgcacgccctcgggttcgagatggaggagctctccccgtcgcggctcaccggccgcctccccgtcactcgcatctgctgccaggctagtactcctgctttgttgctacttgctacaagtcctcccttcctcctcgccggcgagcgcgagagcttaacaagctgacatcgccacgccaacctctcttgctgatatacatgaatggattatatgttgcagccgttcaaggtgctgcacggcggcgtgtcggcgctggtggcggaggcgctggcgagcatgggcgcgcacatggcgtccgggtacagccgcgtcgccggcgtgcagctcagcatcaaccacttccgcagcgccgccctcggcgacaccgtcctcgcgcaggccgtccccgtccacgtcggacgctccacacaggtccgccgcacatatttggttttccccttccatcatccataattgcatcatcccttactaccatcgtcatctcgaccacacctcacaactgctccccgcacgatcggtgaacttagaatttagcgatattaaacccccagaactaattaacttttagtcatgggatcaaacaccctctagttctacgtctctgttagtttcgattgcgtggggctcatcaccgcacgaaaccgcgtggattccattaaatttgataaaccatatatccctttagtgttttttcattttttttcaatcgaaatacattacaccatgtaaataaaaaaaaagaaacagatggagactttggtggttcgttgtcgacatgcaacacttacgatggcgatggctaacgttttcggtaatttccctcttatataataattaatgaaaagaacgacatgcacacatatacagtttatttttttttaaaaaaaaaagaatttggagggattggggaccagctgggccgccggctccgttctattcccaccggccgtccacgtctccagcctagcagggatttgaaatcttccgtcctttccagcagcaaatgctgaacgtgcacacggcccatgcactggacactggtgcgtggtgctgcacaggcacagcacagggcagtagcggcgcgcggctacctgatctgttcgtgcgccacgggacgcaccaccaaccaaccaaaccaaccggcacgagatggcagccgcggtcccagccattcaattcggataataacccaacgaaaaatctgaagaatacccgcatcgcatcggtgacctacgtgaccacaaccacacactagtgtagtgctgctggacagaagagtgaaacaattctatttcgggtcatctggccttgtttagttcccaaaaaattttgcaatttttttcagatttcccatcacatcgaatctttagatgcatgcatggagtattaaatatagatggaaataaaaactaattgcacagtttggtcgaaattgacgagacgaatattttgagcctagttagtccataattggacaatttttgtcaaatacaaacgaaaatgctacagtgtcaattttgcaaatttttttgaactaaacaaggccatgaaaaaaaaaacgggaaagatctactggcgctatctgaacgcaccaagaaattcgtagcgatccggtaaactagagagggcagaggagcccacacagctcggtcagtctcggtctcagttggtgcgtctgcgtcaggctcaggcccctccacacaccacggctctctttgcctctttcccagccgcccggcccaactaccccgtggcaggtgacgccatggacgacgccacggccacgtctccgcggcagccggcagtgtcgacctttgccacaaaccacttcaactgcaagcacggatcgcgtggtcggttcattccattttactctcagtagtactgttatatctgaaacgagatgtggttttcccgtgcgcttgtttatttcgttcgagagttctcctgtgtcctggctttatgggtacaaggactagacgggatatgaccatcccattacacttttgttgttttcaattatagatgctgaacgaactcattctataatttctgaaatgcggctgtccacttgagacatgagaatggcaatcggagtgacgtcctaaagtggatggcgccatcctattattggaaatagtgatgaaaccatcacatccttaataaaaattttaagagtccgattagttgatgaccaaaatttagttacgaagtactccctcaatttcaaactgtaagtcattccaagaatcttggagagtcaaatttttctaagtttgaccaaatttatatgataaaataataataattattatgataccaactaaatatcattagattcttcattaattatattttcatagtatattcactttacagtacaaatcttagtatttctttctataattttggtcaaacgtgaaaatgctttgactctccaagattcttggaatgacttacaatttgggacggagggagtaccaaaactttggcagccacttggtttgctaccaaaatttgctaacatctcacagttaacatgtcaaatttatgtcaagtatttttgcattagttttggcaatttttcttaccaaatctttggtatggtaacttttaagagccaaccatgcagaccctaaaaaacagggatagaatgatcatatggtacctcattctccaactagacacaactacccatgcttcggtgacctcgcttaattcgatgacctcgctcaatgaagaagcggttgcactgatatttttcattgcctctcttttttcggtggccactgatatttttcttatttcccctcaaataaagaagcggttgcattttctccaatgatatgggcaccgtctcaacaatcacttctcaaccatctttttctctacgcacctgtgaaccccatcttttatatatctgtcgaaggagatatactagggggtatcgattcacaaaaataatattgggcagcccaatgcctacatactgagagatagattatttagggaccactgaagatgctcttacacatgtttatttgatgggagggtagaacatcgcattttatgaccatagcccaccatcaatctcacgtccctactgaaattttctaggctctactcgtttagtgggtacggaaatattcccttttgagagccatcttatctctcatcatctacaccagccaatataaaaaataggctaagattatcatctgtctcatcccatcaactaatcattgagctacgcatgatgtttgcctcttggctatatcttgtagttaccattaggagacttattagggtataatcctgatgggacgactagaaaattcttctagaattgtcaaaaagccataaatttagttgactctaatcgccattgacaataatacatgaagtcttaacattaatcattagaaactattttgaagcctctagaacaatcctcatgagatgtgggaaaaagatatatattgtatttaaattcctaagaaaagacataaacatcctaccatcaattcaagagagtataatcattaataaaagcactataaactaacccataaatttatatctaaatgagctacatctgccattataaaaataatttacatatgacaataaagataatttgaagtgaactcctaaatctttatctaaataaccaactatggtcttatgaaaactaatataaagtggcccattaaattaatgagtaatatcaacaaaatccacatctaaatgacatgcctttgtattatttaaaaagtatcccaaatggcttcgatatatattattctaaattatccattttatcccaacaacttatacatctcttaaaattactagccccacaaggagcaaagtttacatgctgtttgatttgccggatgaagtagtcctggtcaaggtgactccggacgaggtggcccctccattttgctagggatgagttgattctgacttctgaggattgaactgcaatcgtaactgcttggtgccggacaatgccattccgtgaggctagtttggctcgggaatgggtgatgggtccgtgattcaatacaaaacacgctgttaatgaatcagtgatcaataagtggtactcaaataagtggtagtcggatagcatttaggagtacgtgcctaaatgctatccgtagtgtcgaaccgcgtaaaataattcatggatcaaatattaaagagacacacatatataacgtgtagtcggtgatgctaagccaataagccatgttcgttacggtcttagggaaagaacatagattccacacgattgcactaaccaccggttgtttgctagattgaacgctttgagcaggtgaccctggtgcaattaagtgaagcaaaaatcacagtagtggaggatgttggctagctcaaagaggatagctaattgagtctcggcacatctgaatcatctgaggtagtaacaaacaagcatgcccagatggacccctctttctgcactctgcagtcctccattgtcagtgactcatccctagtttagtgtctactaacaaaataagaaacggaaatggcgtcatcccttttcaaccaaacagaaggtagaaacatcccatctttaaaaactggaatgagaccatcccaacctacttgattcccaaaccaaacgttacctaaaagcaaaactgaagtgcttgttttgcatggcttacatttattttgtccatgttttcttttgtgagtgttgaacatattgatactatgatctgttactgcaactcgttcctttttgagaaccctttctgaaaaaaaataaatcgattggaaggtttgggaggtaaagctctggaagatggatgcatccacaggagagaaggggcctcagatcgccgaatccagagtcaccctgctgtctaacctgccgttgtcggagaagcacaagacggcaggagatgctctaaagaaatatgcatcaaaactgtagaaaagaaccttcaaactgatgaaaaccttgcatctcgcaggtttcacggatctgatggatgttgcaaaagcattgcctataatactatttcttataccaccaatttcttgttctgtgctatgtatgtaccatgcatgtgtcccgttggagccttcatcgcactacacagcaaaatagaagacctttcctgttgaacatacatactgtatgacttaatgccatcgtcagttgcaataacaggcggtcaacttcgttgtataaaggtgaaaaatagttgtaaaggtgagtaatgcaaaggtacttggaagatgtttgtctccccgaaagtaaaagattgtcaaacacaagtctcctagaaaaattcctctacaaatttggctgtgcttctcctacctcttggatcagttggctgtggcaacgctacggttggaaacagagtagaatgaggactttagttggccgtggcaaggtcaagcgcagcgacagcgaaaatggctccaaaaggccaaccacattcctcgatttagcacaacatattgctctccacaaagccaatttgattcctccatgatttaggccttgtttacttccaaaaaattttataaaatagaaatagtagcactttcgtttatatttgataaatattatccaatcgtagactaactagcctcaaaagattcgtctcgcaaattacaggtaaactatacaattagttattatttttatttatatttaatgctcaacacatgtaccgtaagattcaatatgataggaaatttgagatttttttaaaaattttttggcaactaaacaagacgttagcagaacagccgcagaccgcagtccacctcaac

SEQ ID NO: 3854 - DNA, 7161 bp, Sorghum bicolor
cgatctgactaaaattgtgcttgcagtggacaaaacagttctgttgggaaactcagatctcttgggaacaaatgtgctcagatctgactaaaattgtgcttgtagtgaacaaaaaactcttgttgggaacatcagatctcttatgaacaaatgtactcctaatttctatgttcataaatcttaatatcaattgatctcatgtgactattgatattttaggggggattattggtggaaaataggaaatcatagtttaattaggtgagcagttgtctgattaacaaaattttactttttctggtgctttctggggattggaatctgaacttgtggtctttgatttccaaaacatgatatgcactctgcccttgattctgttagtgctttcgaagaatggagcacttcaattttctttgaatgtgggctgggttgggtaggggtatacccatagcagcacctaaccacagcagcaataatgctgagcacctttctgtagcttttgtctatatcaattattgggagtacctatcacatgagaagagaatcatgtatgtattgtttttgttgagtgaattttttgacatatcagttcttttttcatgaatttgttggatgatgtattgatctgtgggtgcaagttattaatggttatttcttgataagtataggttgatacaagaaaatgctgaatagcaagtagcatctgacttgtatattctgatatttcttctcttgtggcaagagtgaattcagtgtcaaacactataaatacttgtctcaatgttattgtgttactgagatttccttttgatgtgtcaggaatttgcgctctctcagaagtaccatgagggactcctcaagttgcaacaaaaagactatgcaaaagctcgtgaacttctcgaggatgttttgaaggacccactaatatcaaacgttcaggcaatgtcaccttttttttatatgtcgttttattatcaaatccataacagcgattagtttactctacaggttgataacattggcagtgatcagcatttgctgcagctaaggtgttcttctctcataccttttttattcatggtaaagatgtatctagttggttgttggcttaaatgctgggcatagtactgaagtaacatacaaaatggaagaccatccatgaaacaatttaattgcataaaactctggtgcctctaaattttatggtacgggatattctagccttcttgctataagtgacttcagaagatcaattttgccctgtaagtgatcataatttgaatatctatgtcctaggtgcacaaactgcactagtacaaatgcaaaatatggtaatgttgtagtattatacaagaaagaaactgctcattttgtgcctatttcctcatgaatttatgatgattttggtatggtatttttagggtatttttcctcttttttgtttgaaaagatatcccttttccttgtagttattgacctatggttctatatatgtgataacatcatcataagcttactgtgcctgtaataatatgctttaattctattgtccaaatacgtataattactcacttggctggtgtcagctattgagtaagatatatagcataagtaacattaacttctactgataaaatgctgacacacttttttcaactgcacaggtttttgacattgaaaaaccttgcatctgttttccttcaacaaggtctggagttctatgataatgctcttcattgttacctacaagctgtagagcttgattcaaatgattcagttgtctggaatcatctgggaacgctttcttgttcaatgggtttgctgagcgtatcaagatgggcatttgagcaagggcttgtatgcagcccaaacaactgtatgatactcttttttactcattattatagatttatagttgaaattcagttcatctatcgcactcgagatacctattttggtttcttatgcaattattatttatgccttctatagggaactgcatggagaaattgttggaggtgcttatagcaataagtgatgaagtcgcatgcctttctgtagcaaatttaatacttaagagttggccatcacatcatcgtgctttacatgtgaagaagaccattgaatgtgctgaaccggtaccttttgcacctcggggtattgacatacttgaacccaagcatgcaaaactcatcttttccaataaaagaaaatctgtagatgatgaaatctgtcaagaaatagggacaaagaagagtaaacagagtgctacattgcaattgaatgaagcaaaatggttggcccttttagatggtatcctaagcttcataagtgcaaacaacgagaaggctggtgaatataattgcacaaatactgttgataggtgttcagtcagcgagagtagtgacaaggggcttgcttataacatgattgatgttgtcatatctacagatacaataaaaaatgtggaatctgctggtggaaatggaaatgattcacaccatgatggtcagattctgccatttcatgattgcaaaactccacttaaagagaaagatgctaattctgatagggaacatcctcatgaaagacggagcacgcgccttgagagactgcgaagtcgcaaatctggaaaagatgaaaatggatctgatggtaaagatatatcacatgctatgacccagtttcttgaatcatttattctaaaaggaccaagtcctgtagaaaaggttgatttttctggaaatgctgatgcttcaaatcctgacactctcaactatacatccgatgaggaggcaaatgattttaagcaatttctatgcaagatatccaaaaattttggccctcaacacattggttgtatgttacttgaggagatgtcttatctcaaagtgccattccaagattattttgtcaagttcattgaactggacaaacttactagaggctgggctgaagacaaatctgcactgtgcaatttatttctagctgaactgtactatgatcgggctttgtgttctggaagcccatcaacatcttctgagctgtctgagtcatcttaccatctttgtaagatcattgaatcagtagctctggaactgccattcaacacatctgttggagaaatgcattctgccaacttggatatgggaagtagtagggcaggtgaatcttcaagtgatgtaaatgggagaagtcatgaaaattctgacaaatctggtcacgttgatatgcttagtgatcaaaagtccaaacatgattcttcttcaaacatgaattgtgcattctggattcgcttcttctggctgagtggttgtctgtccctttcatcagactgcaaagagaaagcttataaggagttcaatattgccctgtcaatactaaaaaatagcaacaaaaccaaaagctatggagaggtcattcttctacctcacaccaagcttataaaatcactgacaactgataggattcttcgtgaaattaacttgatcaggcttgaatcactcctttggaataatgacgagaatatcaacaaaataactcatacagagttcatgcaattgctacctccacttttgctttccaccaaagatgcctatgttggatatgcatatggtccacaaagagaaagcgagaatgttatttcacttgagttgtctgccttggatgtcttaatatctgcatgtgaaaaagcaaaaccaatgaacatcaaggtatatcttgactcccatcgaagaaaaattcaagttctaactgtggcagctggcatggttggatcgggtacacccctgaaagcgaaaggttcaagcgacgtggactttgtggaagcaatgaacaggaaccggctagaaaatgttgtggaagcagtcaaagatgtgtctcgaaatgccagtaaagcaaaagacataattgatcaatgtgataattctgtgagttggatattcctttttttctcagatcctccttcatcgccctcttaactcaactctttttattcttggcacaataggtatcaagtatcactattgtgttaattcgtaacttcataagtatatcagtgtcagtgtgccccatgcaaaaatatattatatatgagtatagaatgagattgaaacttcttttttgtggttgattagtattttctgtggatgtgacaaagtcagactttaaaactttggcacatttagcaacttttgtatctttgaccactcatatatttatgaacatctagattggccttggtaaaaaagagttcttttagaatctgttattactttataatctttagtatttgtaaacatattatggtaaatactagtagtcgaacggacctgtgatatggattggctagctaactgaacgataacaaagaggtgaggcgaattcgccttctcgaggaggctctgaactgccgattaagtggcttacgataattctttccttgccttcattgaaaactccgtgctctttataatgcgctgaacaaactgtatacagaatcaagagcaaaccaaatgactaacaaactaagtaaggcaatggataacttggattggatcaggctgtggcttctgctgtcatgtctggtgccatgtgcacctgctcctccttgtgtgtataattgtatatgccttccccacaaaagcatcctccacaaacctgtatcttggagaccgtgcaaattaagcaaaaggaaactgtcttacgtttttttactggatggagtagattgctgatggggtaaaaacagaaagatctatacacttgcttattccatgtaattggttaaactgcattgtcttgtagaaaagatcgaaccaacacaaccagtatccaggaaatctttttttatgttctttgagtaatatctattctccatgtctctgcttgtactttcatcttgtgagaattgctccatgacattgccatgttctaattaaaggcattacctgaaattccatatattgctgtgccacctgtatcagttttcttcactgtatcagtttctctaacactgttatcagagtcatagattgatttacacaattacacatcttcaggatgggcaagatggctggagctcactagtttctatcgttggtgatattcaatcattgctcctgacaatcatgtgtgctgctgtcaagataatcctatcgagaaaactctcatgctctggaacctcctatcaggttgaccagttggaaagttcctgtctcatagatgcagcaattgcattttgcaagctccagcaccttgatcctacaatatccatcaaaactcaggtatgttccatgccaccttcatattgggcaaagttacagagctctttttttttttcctttttttctcaaacatgcaggagcaggagagctatgcatctttatattatagagaaaaaagggaaaacaatcccatacaaagcaacctttacctcacctaggagataagagaaggttgcagcaaagcacaaaaattaattacctaatatacatgtaaataacgtcccgaccttagtaaaacagtcgcaaaattagactttgtactgcaatatttgttgcaacaaaaccataaccttaagatagcactctcaaataataatccagtgatatcactctcgtacaacaaattttgtatcatgaggctaattacgggttgaagattacatggtttgaatcttaaaatttcatataaagaaatggaaggagtattgcttttcctattgaacattcaatcatccattcaccaatgcaggttgacttaatcgtcgcagtccatgatttgcttgctgagtatgggctctgttgtgctggaagggacggtgaaggggaggaagggacattcctcaagttcgcaatcaaacatctcatggctctagatgtgaaactaaaatctcaacttagtatgtttttcttaccaaactcttgtttgagaattttttcttaccaaaatgtgtcatgatagacatgttttaggtttccttgccaattaatagcatttgttgggttttttttttctgtcttgtttagattcgaatgggatggaagaagatgtagttccaaaagacggcagagaagaagatagtatggccgatgaaccatcagttagtgacagtaagcagaactctgatgatgaggaagaatcgggtaaaactggatttgcacagaccattttaataatatacagcggttttgtatttatcttgtggtgaaaataatgtataacttgagataatactgtcttgctatatctcgtatgaattatcatattgttaattcttggttttgcagtgaaagtagagcaatgaactctatagcatttaatttgtatctactctctgataaatttcctgttcatgcagaattggatgagatacagtcatgtcttgatagtgccttggaccaggcttttttctgcctgtatggtttgaagatcaacccggattcttgcagtgaagatgatcttgcagtacataaaaatacaagccgcggtgattatcaaaccaaagaacagtgtgctgatgtgtttcaatatgtcctgccatatgcgaaagctctatctgtgagtaatttctgataactacctttgtgtttcctactttcagtagtgtctaatgccttgtccattcttcatttgtgttttagaaaactggcttggttaaattacggagagtgctgcgggctatacgtaaacactttccgcagccaccctgtgacttatttgtcaacaaccctattgataatttcttggatggacctgactcatgtgaaaaaatactctctgaaatttgtgaaagcaatggatctagggaagctttcctgaatgtactgttcccaggtgaaaggggctatgaaacattcaaaaagctctccactgtcaggttggcttgtgtgttacacctagaatcccttctctatgatttctcacaaaactattggtatgtatacctaactacatgttccattgtttggtgcagctctgagccttactcagatgtttatgaaaacttatattattacatagctcaagctgaagatattagtgccaccgacaagcatgcaggttttgttttgaaaaaggaaggagaagaatttgttgaacagagtgccaatattttcaagtatgatttgttgtacaatccgttgcggtttgaaagctggc

SEQ ID NO: 3855 - DNA, 8018 bp, Sorghum bicolor
ttttgctgtataaatttggtcaaacttgaaaaactttgactctccacgattcttggaatgacttataatttgggatggagggagtaaaccctagaacctagatgatgcttcattgacttagagaaagtacaacagaaaagcgtatgtaatatacacttagctaagctcattgcaaattatgctaatacattccagagatgaggaacaaattttactagttttactgataggagctgcttagcatcgaacttagttacatccacgaaatcagggtgctatgataaattgataagtcttgttcacataacatgccactccttgatttcttaagacgtttgattgagcatgtttacatatataaattataagactttcctgtcatcatttctagaaataaagggaaatatataatagttattcacattacataattttttttgtgtgctctgtacacaacaaataggctgtttttctgacatgtaatgtttcccatgcttctttaaatccaccaattgagtgctctaatatcatgtgagggaaatttctttatgatccatgttggcgaatcaaagatatcaatctttttcagtaaagtacctatctaatcccttagccagtcaaagtgatctatgaacttgattatggcaggtgcataagatagtggacctctcttcccagccagaccgtgaagcaatgtggtacatggaagttgctgaggcttacaacttattttacttgccattctcagccgctgctagtcccgctccaccatcatgagccctggccggctgtcccttttctccggttgcttcgacaccttgcttattagcagtaaattgctctaagcaaccctcctaaatatttagtgatcctagcttgtatcaccaccgttgtactgatccagacattataaatcaccatgctaaacagttcatcatgagcatcatctatctatcaccgtgcttacttgattagaatcaataaagcttgaattatagggataagccctgtttccagccttgcacgctcaggctgggacctcacctgacccccgggatagacgacctatctttgaccaccacgtcaacgtcactaatttgagtcaacactggctcggtcacactcgccacgtagactcggtcagacccaccaactatcgtccacctccgtcgtcatggtcgtccccgtcgaccaaagctggagatgagggggcagtttagttggtgaattttttttaactattgtaccacttggagagacggaggagggagagttcagattttgcgtttccactgaggccttgtttactttcactaaaaatctaaaaattttcaagattttccgtcatatcgaatctttagagtatgcatgaagtattaaatacagacgaaaataaagattaattacatagtttggtcagaattgacgagacgaatcttttgagtctagttagttcatggttgaacaataattaccacaaacaaacgaaagtgttacagtgttacgaaattttttcgttgaggaagtaaacacggcctgaactcggtctttccacgctgggactggacaccttttctctctctctagtgtttgggtgttaaggcgacgatatctgagaaaaaaaaagtgaaaaagatgctaacattatgcaagcaaaagacaaactgaagttgacgccggcgtctcgtgtgcgcctggcttcgccggcaactgttctccaccgcgcacttgtcgctctcgctcgcccacgtggacgaacgccagcgtgtccagccgtgggatggaggatcggacggcgcgtgtctccccggggaggagaacgcacaaccaccaattcaaccacaggtccggatagcgtctcgtcctcccgcgtcccgcctcgctccctcctcccccgtcgtcttctccaacgggaaaatagccattaccgaaggccgtcagcagcgttgcgtcggggaggatttttcaccgcgcgcggtcccgcgattgatgcccccgccatggcgtccgtggcgctgtcctcgtcgtcgcaggccggcctcctcgtcctcccgtcgccgctcctgaagccggccgtcggcgcatgcctccgctaccgcctgccgaggctgcctccggggctctcgagcgtgaggaagggagggatcctgccgctgccgatcctggtgcctccccgggccgtggagggcaatgacgggcgggccgcagtgaccaaggaggaggtggaggaggaggaggaggaagaggaggtcgaggtgaccaaggagggcgaggaggatactcaggagaggggaggtactactggttccacgaaggaggacgcggcaaggggttcggagcggttcgcggcggactacatcccgctcggcatcagggagcccgtctacgaggtaggcggctagcaacctagccggaaatccgcaaatggcttctcactgattgttcacatgctgtttcatattccacattgttgccagccggtgaacacttttttatctgagcatcgcgtatctgaatctaaataagcatacgtgcttttaggttggctttatgatgaattgacgatatctggccgttagatattttgtaatttacaaaccttgcaaaaatacatatggtaattaaccttcgtcccgaaacttactttatccaggcgatagaagtgagatctaatgggaggatgtccaccaaaaaaataagcaggcggcagctactgaaatctagtggtatgtacaaggaacatgtttctcagcaatgcgcacatgccacatacatcaactttgttttgtactactttttaactgtcaaaagctcaattcgtgtaattgactatctatcttatggttccatttacatgcaagacttcttctgatttccatcctttgtcatgctaggtctccgcctacgagatactagaagcgttgacccatcactatggttaatgaattcaatgccttccctgctggtaatagaacacttttatatatatagctgtgttgagtttcctttgtttatgctatactgcattttccagttgtatactgatgatcaatattaccatgatgtacacaccagatgactagagtctgaaagggtgatcataccatttctgtcatgctttcacttttatagtagatcatggagggcacaaatgcttgcatttgagaaaagggtgatcataccatttctgtcatgcttttccagctcacattgtgttcagcaaactgttttagaaactgttcatgatatactgagttaaatattaaggacaattactgcttttttacatctatagaatatttctgccttttcttaaccttttttaacccatgtattgatgccttttagttgggatgccattctttcctgattttgtattttggtgtactttgtactttacattgtctccttgcaccttcattcatatggctcttaaagaccatcctttctatagcatgtgaaaaccctgtttcatcatttgctgtctgtaggtacgtgagcaagctattttgctcaatcttggttccttgcgagcaattgctatgtatgagcgtgttcttatattcaactataacaggtcagtgttcatcttataataataagttatttccttttcatgaccttactatttttttatgaacttatcaattatccttttaacttgtgtagcccaggagggaaggcctttctagggttattactgcctaggttaaatccaagaaacatcaatggtgggcctgcaatgccttttcagcttgaggtaatggatatatccaataatccatattcgtggtcggggagtagctgtgaacttctgatatactgatattctgccaaataaaatgcattttttctatgttttccatcaaaagtttgctgcgaatttaagttgcatagaattccagaattattaacaacagcacatatttctgtttacatctgcattgtaatttcaacagatacgctaagtaaacatcaataagtgcttcttgtgaaaattaaatttgcgtcaacacccaaattaattattgaagcaagattttcctgttatccctgatctatttatgaatattgagcaattgtacatgcatcagtcattatacactaaacgtatactattctggttgatcgtatttaatcatacacttattttgtttaaaatatttgtagcacaatgtggtatttaattgtatgtcctctgcatttaagaaaatgttatgtgcttgcattttcatgtaaattcatagtgtcggttggaaatatgaactgatcttcatcatgatttccatgtattcaggttgttgaagctgcacttatttctagaatacaaagattggagcagagactaatgaaaattgagcctcatgtgagtaccaaagaagtctctgtgtccttaaacttttaatattacatactcttgctcttcttgtagaaaactgtacactatgatgtattttttttttaactgcatactccactcaagcattgtcactacatgcttctcaatcattggcttcaaacctttaagctgttactcccatcccctatttccttaggatttcaatttaggcaactttcattgttgtgcacatagtggaattcaaacagcaatgcttccagttatttccatctcttatatgccttccagaagcccaactgcaaattcacagtccatccctttcctgtaacgcatttcccatcttaactaatccaagctcttgatcttcagatacatcaaccagtataaagaataagagattatatactcccaatttactaactctacagcagacctcatacaggacatgctgtgccaaatgccattgcagcactttcagaaagttaatccattaatttgtcgtcagcttttgactctgctcctttgagatacagtaggaagacccctaccaagttgattctgcattttcaatgtgccgatctaggtatggtgggacttagtagttcactactgcagttagtagttttttgctttcatttcattgtgaaatgaagtttatgagctgtttggtggtttaaacgtcaccatatatctctgcatttgtgttgaatcatatattattcgagcacttaaaactttgatgacaaatattgctttccacttgcatctcaggtggctacattgctagaagttctaccaaatcgattgacagctgatgtgctggagcagcttcgtctaagtaaacaagcattggtataaaaactacattctgaaatcaatttcaacagccacttctcaaactttattttggttttatttatgtatgtactcatgtgtcaaggttgagctgggttcacgagcaggtgacctcaaacaaatgcttattgatctcctggatgatcctcatgaaatccgacgaatatgcataatggggagaaattgcacacttgatagattgagtgataacatggagtgctctgttcctttagagaagcagattgctgaaggtacagctgtaattcatcattgtaactttgcatatttctggagattatgactgttgtatttatctcagtaaagcttgcatctttagctggatacttaatacggcaattgatgtcatgctattagactagttgtgtagttaaattgacatatgccccccccccccccccccccaaaaaaaaaaaactgtttagcaaggattttcacagcttagtctatgtgattctgtgctactccctccgtccattagtatttgcttaaactacggagactaatggacagagggagtatttatttatctggaagaaatcttatagcagacatgtatttatagccatatgcttgtacaacatgtataaaacagtttatacattactttacacaaagatttcatatgtcaaagaacatgtaccatgtaatattttataaaaaaaacggttttggtgaaaataaagaagacaactagaataaaaaaatggagtagtttataattttattcaattaggagattgtgtttctttgggtttttgtttgattgctgagattttttttcttacagcattgaagtttcctttaatgttctgtgatctacttatttttggaagcaaattgttgcttttgacttgattatgagtaacttgtttggctttaacagaggaagaggaagaaattgaaatgttgttggaaaattatcttcaacggtatttctatcatttctagcaaacactatgttttttggttcttaatctttttcttgctggcagccattatcattttattgtgcattctttcagatgtgaatcatgccatggtcaagcagagagacttctgaattctgcaagagaaatggaagactcgattgctgtgaacttaaggtctgtccattgtcaccagctgagctcaagagtgttctctctttaactaatgcctctcttactaagctgtagttgattatacatacatttgtgggaactattggcttccctatagatttgaatatcaaaataaaggcaccaataagagtttagtagatgcaacaactatgaatataaaaataaacaagtatctgccacatgaccaatataatagtatatttattgcttctgccagggtacaaaaaatgatattcgtcattcctactagtttctttttctaaatttgaagctgaccaagtgtgtatatagaaacatgctcatcaacctgaattactatgagtacataagacagaagtcatccaaaatatggccaacttattgtgtagtgtctagatgcctcaaaagtgaagacgggaagaaatactgcatgttacttgcctcctctcagctctcgttttctgaatcctgcatcctacaatcaagaattatgaaatactgctaattataaattatgtcatgagaaatggatgtgtcagacttgctctaaatttgaacatataatgggttatgttttgcttggaatccttgcagttcccgacgacttgaagtaagtagagtggagctgcttcttcaagtgggaacattttgcgttgcaataggggcattaattgcaggtatataggaatcttaattttgttataatttgtaaatattatgttttatatcaagttcttttttagatattttgccacaccactcttagactaaagggaacattttgcgttgcaataggggcattaattgcaggtatataggaatcttaattttgttataatttataaatattaggttttatatcaagttctattttagatatgtttgccacaccactcttagactaatgccgggtactttgtttgtaggaatatttggcatgaatcttcaatcatatctcgaaacaaatgcggtatagccttacactcttgaccattttttttttggttctgtgccgtgtatcggcactatccatagtcaatatagcatgcctgccccatcgttgacaataagtttgttttcgagcagtgggcattttgggcgacaactggtggaatagttgttggagcagtagctggatttttcctcatgtactcatatctaaaggctaggaagatattgtgaaccctgtaacgtgtgtacgtttgaattatacttagaactgtaaataaagcaattttgatgtcgtttgcacatccagtgatggatatgcatgcttattcttgatatggttttgggtgctccaaattattgcatggttgttgtactctgtactctggcgagaatgttgccactctatgtacttgagttgcccgccgttgagacaaatacattacggtgcctgtggacttccgtaaatagggtatagtaactcagaaacaaatatttgatttccatcatagatgattttccggaaggtctattttactctcttatattgaaaattcgtgtctacatctgacagagtcttctacatctggtgacgcactaatgcttgtgcacctcgttcatgtcatcatgtgctatcttgaacttgaaggtacattttactccaaactccaatgaagccattcacaaagccctcaacctgccgcaatcacaggaagcaataacgccataaccac

SEQ ID NO: 3856 - DNA, 5250 bp, Sorghum bicolor
aactggttttctataggatttttcatgattccaccaaagatataatttccactgaatattgttccacctccctaaaagttttcaatgcaaaccacatcatctttcctaaaaaagtctggagccttttggaaacattcttgtacttttacctaacatataatataggagtatatactgcatatgactttatgcttccacatttttaggggtttttgtgtccttaattaactgaaccatggactggcggatcatctaatggtatgaaaaaaaaaaaccaaagttgcacaacaaaatcttattagctgatgtgtattgtggttgtgggtataacatactcttgtcatcggggcacctcgaatagttagagctactttctagctttaaggtctatgtgtcatgtccatcttaacaagagctatcctaaaagatcatatctcccataatctagcttttactcattgctccaagttaatttggccctaaagaaaagaaatataattggatgagccacactaaacatatagagagatgcgcaatatattagctcatgtttaagagctactccctccgtcctgaaataactatcgctcttggtctgtgacacaagtttgacttaatttgtaaaaaatatgtaaaaatttatatctctaaataaatgtactaaaaaactagattcaaagatttttctaagaatactaattataggcattgtttagttctgaaaattttttggatttcggtactgtagcattttcgtttttatttgacaaacattgtccaatcatgaactaactaggctcaaaagattcatctcgtgatttacaggcaaactgtgcaattatttttgttttcgtctatatttaggccttgtttagtttccaaaaaattccgagatttcccatcacatcgaatcttgcggcatatgcatgaagtattaaatttagacgaaaacaaaaactaattacacattttgcctataaattgtgagatgaaattagtctatgattgtacaatatttatcacaaacaaacgaaagtgctacagtacccaaaattcaaaattcatgcctatgccgcaagattcgatgtaacagaaaatcttaaaaaatgtttagtttttgggtaaactaaataaagcctaatattttttaatgtatatttagtcgaagttatttctcgaaaacgcaaacgacgggtatttccctcagcctttcttctccaggtaggaaaaaatgatgatatagatcttgtaaactagctgagttggcaacttagcactgttggaggcattttctacagtatgtctttctacagtacctctgttgtgcttcacgagctttgtttttttccttcgccttttgatctggcagaccgcagcagagactcgccaatagggaagtcacactcacatcggccttgctgccctagtgccctacaaaacttttgctaccactattgttgttatccaccacgaatcttgtgcggattggcatagatcctggagagataaaaaaaatttaagcgtcacatcggataggttatatcatgaggtttttagaaactaataaaaaaacaaattacatagctcgtcaagaaactgcaagacaaatctattaaacataattaatttatcattaacacatgtgggttactgtagcacgtaaggctaatcatggactaactagacttaaaagattcgtctcgcgattttcaaccaaactgtataattagtttattttttatttatatttaatgtttcatataagtgtccaaagattcgatgggatggatgaaaatattttgggtgagaaggtaaatagggccagccacgcaaatacttcttcacgtgtccgtgcagttactcgactattagagttgtcgcatcgattgcatttttccttgataacatcatctgaagctttcaggcatcgacgatcctttttctgattcatatatataggaaaggagtatctctaggcagctcgatcaatatctggcaacatggaggactcgagccagttcttgcagtgggccctgagcacactgcagcacgacgacctcccaccggcaacgccggcggccaccgccgcctacgacgataatggctgcaatactgccgccttctcctcaatcccggcgttgggatactccgctgcgtcagtgaacagcatggtcccgggcgaaccaccagcgcgagaaggccaccgggccgccgccgccaccaacagctggagctcggccgacaccgacagcgggagcggcggcggtggcaccgcgtccgtcacggccgcgcagcgcgacgcctggtcgccgtcctcgcagcagaacttggtcaactgtgccacgccacgcagcagcggcagtagcggcgccaaccagcaagtgggctgggacttcaattcggcgtcggcgcagctaatcaaagaagcccaggccaactctgccgccgccgccgctgccgccgcaagggcagagagcaacggtggcggtggcgtgccggtgccacagccacagatggtgcacaacaacgggccaccgccgacgaagagagcctctgccaaaatgtcggcgccttcttcgtcgccaccgtgctcgcaggatcacatcgtcgccgagcggaagcgccgggagaagatcaaccagcgtttcattgagctgtcagcagtcattccctgcctcaagaaggtcaatccctagactatatatatatttcatcatcgtatctctgaccaagattttcacaatgcatcatcgatcggttactttaatttgtgatggatcagatggacaaggcgacgatcctctccgacgcgacgaggtacgtgaaggagctccaagaaaagctcaaggcgctccaggaagacggccgaggcatggagtcggcggtgctcgtcaagaagccgcgcatcgcggcgccgggggatgacgaggacggcggcgcgccttcgccttcgtcctgcgcgacagctggggctgcggcgaccgccaggaacgcgctgccggagatcgaggcgaggatcttggacggcaacgtcgtgatgctgaggatccactgcgaggacggcaagggggtgctcgtcagggtgctggccgaggtcgagggactctgcctcagcatcacgcataccaatgtcatgcccttgtcggcttgcatcctcatcataaacataatggcaaaggcaagttcttaattagccttttcttagctaggtttgatttggagatgatcgtacaaattcacttcactgtgctaatcgaaatgaaaatgtgtgatttatttgttgatttcaattaatatataacggatcgaaaagacaaatagattacggccaccagcaccagcaccagccccaacgttgaagagatcaatccacggttacatataggacttcttttttttgttggagtgaatgctgctatagcattcttttatttgtttatttatttttgacgaattgctatagcatttttttaggttttagttcaacttagttgatcttggagatttgcatcttttttaaaaattaaggtgaagatttgcatcttggttccacaggaccgtagtcaattaattaagttttaactagctgataagaagtgcctcagactgcaagttgcttttgaaatgtacaactatattactataccaacattttttttttgaaacttctataccgagaatttaaactgaagcataataataaacttcgtacttgcaaatgtaagctatgatacctatatccgattttatatgttcctgctctgatccattatattatggttgtttaaacaatttctttgtttttttatcaatttatggattggtttagtcctcaaagcctttgtttaactctatatagtgcttgtttggatccacaaactaaactttagcttgctaaatttaactactataggaatccaaatggtccagttaaaaaaccagttagagtttagctacttcaacctatctaaattttagttgagtagtctattagttggaggatccaaacatcccaaataaaataaaactttactaagaggatttttaactggctaaagtttagttttaaaatcagggttcaaaatttcagcgaaatttcaccgaaatttcgcgaatttcggtaatttcagtggtggccgggagaaaaatctaaaattttattatatactaatacatgttctatataactttagactcatattttttattgtttatattgcatattcttctattcaatagaagtgtaatccaaaattttattatatactaatactgatacttgtttagatctaatttttttaaaataaaaacatacttcagtgctagtctctaaaaaaattttgacgaaactttggctgaattttgcaagattcggtaatttcgatggtggccgaaatttttgcgacatcgaaattaaaaatcttgtttgaaattttagcaagctaatacgtggatgcaagcaggccggacgaaagctcttgctgacagtgttgtgttgtcgcttgttggtgatgactgatgagtagtaaagggcgcggcgtacagtactcgactagcacacgtggtgtaaattttcattgaagaataacttagtggtgatgcatgcgccacgtaagtacgtgttgaatcgagcttgaaacctggagagctgtgtcgtcctctcttttttcaggtgttggagggcttcaacgccacggcggatgacattgtagggaggcttaatgctgtgcttgctggaccagcgtgttagagcgagattggtgtgcagaaaataacaagaagttttgttcaaaaggactagcggcgccgaataaatgtctggatcgatcgggtctgtacgtgcttgcatgtcgtcaacaacaattactgtggcgtcctatcgcatgcatgcatatgtatgcacgcaggtcctcttcgatgtgaatgatttcggtgtgtgtcgaatgtttatttcttcaccactgcacacaccttgaagctagctagttgtagcttaattatttgatctggtcggtccgagtttagtttgttcaaacttgtcaattctcgttgctcgatcaagccaaattgatcatgtttctcttgcttccacgaaaatgttagagctgatgctgaggccttgtttagttggggagtgaaaactttttggatgttttatagaatgttggaaggagtatttggatactaattaaaaaattaattacgtaattcatttggaaactgtgagacgaatttattaagcctaattaa

SEQ ID NO: 3857 - DNA, 5814 bp, Sorghum bicolor
atttgtcaaataaaaacaaaagtgctacagttccgaaaacttttcagttttcggaactaaacaaggcgctagctagctagctagcagtagtagatatagctagatttctgaaaggtcacgaggtgagatgtttatatcaaccttgatccaacaatgatacacttaattaactcgtgggcggccttctgccctagtagctactccttgttattataagggatactacgacgcataggtaaattaagggaaacatacacggaaacaacgttaactccatgcaagaatagtttcaaattaaacagagcggttggatttttgtatttagctagagtgtgtagtatggccttgtttagatctaaaaagtttttgtatttcgacactgtaacactttcatttttatttgacgaacatagttcaattatagagtaaatagacttaaaagattcgtctcgcgatttataggtaaactgtgcaattagtttttatttttatttatatttaatgttctatgcatgtgccgcaaaaatttgatgtgacaaaaaatattaaaaaataaggcctatatatagcatatagctagctcgacaaagcaaaagctacgtacctgcagctccagcgacccaatataattagctagccaggggcgtgggccgggtaagcccaggatacatcaatttctatctatactaaaattttgtaggccatagaggtaggagtattattttacggactagtatctctctattgcttaggtaaaacttgctaagggtatgtttgtattttttttaaaaaaaaatagagctaaataaagctttaaataagtggtctaaaattacttctaaaactttaactccggtctcacattagagctttagagctcaaaagtgagctaaaatgttctaaaacttttagagctctaaagtttagcggagagaatctaaataaaccctaattaagttgtagtgtacaggattgctccgatccatgcggtatttccgtgtcaacgctaatctttgcgcgtggatcggcaaaggtcatttgtacaaaactagaaatatgcatgtatgtattattggttaatcaataatggctacaaacaagtccagatatagctcaccctactttgattttttttttttttgcgagcacaccctactttgattttgacagaacgccaaatcggcgacatatttctgtacttttacctcatgtgtgtatcacctttccctggtggtgttgtgcaaactatcattttcacctgattttaggcacaaaacatgaatcccaagaaacgaattttatatcattctccttgactttttggatggggagaggccacgaaagaggagctaattaacctttatataaattccgatgaaagaaaaaagaatagacaatagagtgatgacctaacatttctttacaaagaactagcaccattcattatggagacaacattttagggtggtgcagtttgcggcggcactacctataaaaaggggaactccctcccatggcctttttggacattattgtctggaggggagtacactggctgctactactatcaatctactcattatattttgcaaatatttgcaaggatctgaggtaacaataatctaggcaatttcttgatcagcactactgtagtagcacatttgttgtcgttggcatcctcacttatgtatagattcattattattccttccttgtctatctagttctttcttctttggacttgtgcaaccacgcatttattctccatcttttcccctgaaaagtggctatccaaaaacttttttattggaaatcatctcggaaagaaaacaataatttcttctactatatacttttggaaaacaaacaaatgttggttttaaattatcttggtcatcaataataataaggatggtatcatttgctggagcagctgcgctagagtgttagaccaacgtaaccccctgcggtcagctgcaaaatggaagactcgagcatattcctgcagtgggcgatgaacacgctgcggcacgagcaaccagcggcggccgccgtcaacgacgactgcagcagcgaggcgacgttcccctcgctccaagcgctccgggaggcctcacacgcagccgagatggtgcaggagctgatcgaggaggcccccgcgaacagctggagctccggcgacaccaccgacggcagcagcggcggtggcaacaacaacaacaactcggcccctgctgctgcggcagcggcggcggccatggatcacgatgtcgtctggcctgcgtcaaagacgacctcgccggtcagcaggcccaccttgagcaggagcagcagcgtcaccaaccctcctctgagctggaacttcagcgccgccgcctcggcacagctaggcagcgacggcggcatgctgccggaattcgcccacaagcgcgccctaccgctggaccaagtgtacggatcgccaccggcgaggagagccggcttgaggagcccggctggatccatgtcggcgccgtacgctcaagaccacatcatcgctgagcggaagcggagggagaagatcaaccagcggttcatcgagctctccaccgttatcccaggcctcaagaaggtcctgatccaaattaatcatatcaaatccattcgttcgttcgtcaattatatttctgatgtcacggatctcttaaacgcaacgtttaatttctgatcagatggacaaggcaacgatcctttcagacgcgaccaagtatgtgaaagaactccaagaaaagctcaaggacctggaggctggcggcagcaacggacgcagcaggagcatcgagaccgtggtactcgtcaaaagaccgtgcctccatgctgcggcggcagcgccagacgacgatggctccccattgtcagcgtcgtcgggcacgtcgccggcagagaggaagacgcagctgccggagatcgaggcccggttctcggagaagagcgtcatggtgaggatccactgcgaggacggcaagggggtggccgtgaaggtgctcgccgaggtcgaggagctccatctcagcataatccatgccaacgtcctgcccttcgcagagggcactctcatcataaccatcacggcaaaggcaagtttttttttactaataaccagtctttttttccaagaaaaagaaacagttttggcatcatcgtcctccactgcacacaatctaagaacgttttgaactttggatggtctttttattaaaaaaacagtatgctgaaggttaggagttcctaataatggaagaacataatattgaatacaaactaacagtacaaaatgaatggcagaatgcagggttcaacctttattcaatgatcaatgatgatcagttggccggaaataaaaaaaaatcgaaacactgcagtaccacatgttttaacaagactaacattattgaactttaactttgatttcatttcgaaagagtgaaattgcattcatgatcgacctgtgcctgacaacatccatcttgagaataaggttcagatcacatatatttaatatatctttatactgtatggtgcatatatagttgtactgatgaggagttttgattcttatgtatgttatagaaagcaagcgtgtggtggatattatgatcattatggattttcatatatgttactaccaaataaactgtttctattaattttctccatctataaatacttttgattcaaagcacctctgtcgacatttgaacctcaagtagacaattagtattccaacattagtgagaacaagatggttttacagtgtttatatattttgatgtggtgactcttgattaaggagagagaatcctcatacaagtttacctagttggttcactagtagagaacataccttcgattttcactagttggttcatgataccataatgtaactgtggtatccctctgtttcagtagctaaggtgttttagtttgatttaagtgtcaaacttctctacatctgcaatatcatgttagtttaattaaatccaccatgaaatgtcttcattagtgcatttatttggtatatattataggtgtttataccatgaaatgtcttcatctgctacagtgtttatacattctttttgttagaattagagaagtttgacttaggataattgtaaaacaccttacttatagtacattatgcacaacaaacaacagttctgattagaggtaaacaatataatatagggtgtatatattaaatatgaaaagacaatttaaatccttgtatactgatagatacaattcatttcaatctttctagttgtttcacgcttccagattatatatcactcaatcatctatactactacaactacacaatttaatagttattttggataatgatcttacctttgtttgaatggtcaaggtggatttctccacctgaaattttcatgataataagttatggcacaggcggtgatgtttttttttagagaaaaatgacacaaatcccttcaattcaaggaaactacctagttaatcaaagcctcatcatatctcacttgattgtttgtacagaaattggccatccaacgtgagaaaggaaataggacgttgatggcaccactatcgtctatatatatatacaactattgggttttcacctagagagaccctcatgattggggcactatgacaatgtgtacaagtacaaaagtggcacccgatgagagagtgtcaataatatcatcagcacatgcaaaaagttcagcagttttttccccaagggtttatctcttccatagaacacagtcacaagcacacgatgcttgcttgtttggcctctgccacaattgtggatggcatcatgagggtcgtcctccagccgagcatgtagagtagaagcacatgacaaccattggtcagagcaacccactaaaaccccatagccaacctcattttttttctttttgatctcacaatctatattttttatctataaaaaatgttagttaatgtgccaaattacgtgcaattcatgttgatataataaaagaaaattgttttgtcaggtggaggagggattcactgtaactgcggaggagatcgttggcagactgaactcgatctggactagtgcacaaccagcataacagatgctgcaacagcactgatgagtgatgatgatatgaaacggtaaactctagttaatctatcgcacgccctatatatatgtaaatatccgaggcggtatgaaattaaagtcagacggtatatatgatgctgtggagtgtttcttcttcttttggtaacaagtttacggctttagttgtttgttttttaactgtacgtcgtcccttgacgtaacttgcatgggattgaccatgcacagtgcatgcatgcatgcatgaagatgcacactagtggtagtggatcgatgtgctcgcgcgcaacgagaattcctgcgccacatgttttgcaataatataaggtcttgtttagttcatcccgaaatctaaaaaaatttcaagattctccgtcacatcgaatcttgcggcacatgtatgaagtattaaatatagacaaaaataacgactaattacacagtttgtctgtaaatcacgagacgaatcttttgattttagttagttcatgattggataatatttatcaaataaaaacgaaattgatacattagcgaaatttcggaacttgcgcctcgcagtcgtcgcagcatgcaacgcacccatgcgcgcatgcacacccaagaaagtggcgccttcactattgcacgtttgtgtcacggaaaagcgcccaagaaagaaagat

SEQ ID NO: 3858 - DNA, 2815 bp, Sorghum bicolor
aaatccaaaatccaaaatcttttcaagattcttcgtcacatcgaatcttgcggcacatgcatgaaacattaaacatagacgaaaataaaaactaattgcacagtttatttgtaaatcacgagataaatcttttaagcctagttactctatgatcggataatgttcgtcaaataaaaacgaaagtgttacagttgcgaaaactgaaaagttttcggaactaaacaagacataggttgtagccgcattgagcataggttttcagggtattccattatttggatggggcatttcttttacaccaatttgagcataatataagtttatcttcccttttcttatcaaatcaaatacaccaaataaaaagcatacggtaacctcaatatacttttttttttgcctcgtgttcttccactttgtagtgtatattgaccaagaaattgatccaaactaagttttcccaaaagcatcagttctggtggtattaccaccacgctttacaaaaagtgtctcagataacattggataattggaactgtgagcacgttcctcccattccgttgaacatgcatgtttcagtctccatgtcattaagtgggtatcacacctgcagatcgcacgaccaaatctatctagtagaaagtaagaaccgcggtcacgattcacgtacaattaatgcatacagttattagttcatactacaatacacgcacgttccttgatccctgcatgcatcatatcatgttgaacacgtttcaatctccatgtcattttagtttggtcatctctcatacgcaccacacacctgatcgcggatcgatcacatgaaactaaaaaaacggtcacgatgcacagtcgtcgcggttcctgtttgagtccattcatggcgcgccgtgtgtcccaaagaaataaatgcgaggccccgcaaaacttcaacttgagagcatggatggcagcaaagtcaccgcccggccagcggcacgtgcacgatccaaacccatctttttccctggactggaaagtctggggcttcgtgcatggagcattaaataaaaacaaacttaaaaattaattatacattttacctaaaatttatgaggtaaattttttgagcctagttactctgtgattggataatgtacgtcaaataaaaacgaaagtgctacagtaaccaaaaaaatcaaaattttgtgaactaaacaaggccagttccgaaaaaaattcagatttcgggaccgtagcattttcgtttttatttaacaatattatctaattatagaccaactagtttcaaaagattcatctcgtgatttacaggcaaactgtgcaattaaattttattttcgtctatatctaatgcttcatgcattcactttaagatttaatgtgacgaaaaatcttaaaaaaaaatagtttccagagcgaactaaaaaggcctgcctgaaataatcagcggctgtcgactttttatacaggaccctggccggggccacgccaggaatttgccccagaaaagtcatgtcttgtgatttgtcgtgtattgaatgacttgcagattcgacgacgaagctaacacgctcttggtcggaacggatgcgccgcccgccaaggaaggtgcctggcatctggctcgcgttccagttgctcaaaccgtagtcgtcgtccaggtccagcccgccaaaaaaatattcaatctcttctccaggacaacgaccggccccgtgtgttgcgtggacgccagcgacgtcgtggtcagttcgtcgatctcactcgtcgtcctcgcgtcaaacaaacctgtcacgcgatccgtccggcccccggccccccaatccccaccacccgaccaccctataaattcgtccctcctacgtcttccccgcagctgacgacgaccggatcgatcgacccagcgcgcgcatgaacgaacgaataacaagcgtaagcgatcgaacaccgacttgaatcgcaagctcgatcgcagtcgcagtcgcagcggcagcggcatggtgtcctggaagagaaagtgcggcggcggcggggagtcgcccgcccggggcgccggcgaggagaaggccgtcccgagagggcacgtcccgatgctgctcgccggcggcgcgaacggggaggaaggcgagcgggtgctggtgccggtgcggctgctcagcgacccttccgtcgcggagctgctggagatggcggcgcagcggtacgggtacggccagccgggggtgctgcgggtgccctgcgacgccggccacttccgccaggtcctcgacggcgccatgcacagatgcggcggcatcagctcgtcagcctgaaacgagatggctggctggctggctgtggctgcccatgaccatgatgacgacgacaacgcgccccatgaggggacttagctagtaatgcagagcagcttcagtttattatctgtatgtagtactagtacatagatatttgaaattagtttgttctttcttaggtcgattaaattctttgatgaacatataaatatatacgacgatcgatggttataattttgaacatataaattaaattctttgtggaccgttgtatgcgttgaagaagggccccggcctctagctagcccattggacttggcgcactcctaagaaatggatagcaccatggactgactgcaacgtggtacaacggaatacactgttgttgtgctcttttcggatccaaatgcaaaagataattaaataaagtgtcaaaccctttgcgaattgcgacaccatttctgtcgagccatcttcgaacctcgacctatcaccgagaaatgaggatctcaggggaa

SEQ ID NO: 3859 - DNA, 3788 bp, Sorghum bicolor
ggtgaggggctgaccgctttaggccttcggtgtggggttggggttgtgaaattaccataatacccttgaaagaataaaattaactaaagaaaatatttggtgtaggcacctagaggcacccccaaataccaaaaaaggtctcatgcattaacacttcaaaaccataaaaaatccttttgaagggatgcgattaaagcaaatgatgaaaaattagcattttcgcattggatgatattttcatatgccactaacataaagcatattctcttcgaaacaatcaaagtgctagccacatcaaattcatctactcaatcttgtgtactgctcgaaacttgctataagcattttcactaacgacaatggctacctgtgatgacgtgtctacactatacagaaaccattcgttgcctcatgtgcttcttgtgaccgctaattgagactctgtttctatatatacccgtcataacaagaaaaatccccgcaacactccgcttatgaacctcaatccccatttacactaccgctccccttctcctccattccactacctacacccatgtagtgtcaagcatccatccccatctgcgaccatggttggtggctctagagcaccgccgccaccatcccttcttctttgccttgcctacctcttatctgtcgggttcatgaacctcgccgcaagtttcatacatcatgtgtgtgccccttcttcatcgattgtttatctcatctctcatcctcaccttgttacggatacactaccgagatattatcaacaaatcggcaacctcccccaacccaatctggcgggggcatcttctggccgacaacatacatcgccgctcatcgctgcatcacaggtaataaaccacatttattttatgattcttttggcaattatcttacttttttacttggtggtctctctaatctggcatagaattcagattttcaatccagctttgcccttgcaaccataaaaaatgctagatagttctttgtgttgtcaatctttctttttcgaaaacaagtgtaaagttcctgtttttttttcttgaggaaaacgagtgtaagcaataatcaagagcatgacatcatgatatctatctatctatccaaacctttgaacaatgtttatcctgcaagcaaatcaaccgtagatccagacacaccaccaccagtccaccagatgcatgatcgagtcacaagatgcacatgtacccagcagtcagcacacagaatgcatgggcagcctccggtgcagcccacagctgcacatcgtttgctgcctcgcgttgtactagcgcagaaacacacaggacgcatgcactcacgtttttcttcctcctcgctctatcgtctagctactgccagtctgccgtcccagctagctaatcgatgaatatggcagcaattgatatatagatgccgcctgctatcttttgcgcgcaccagcagctaataaaagataggatatgcagctggaactggaaacggcatcggtttcttgttgccctttctcgtcgccgtcggtcggtcgatcgatgccgcagcacaccagatcgatggagagaactgggtgcgatctcatttggaaaacgagggggcgctgctggttttgtccaatccaccatgcgtgaataatgctagctcatgatgtgaacaacgtttatctgctgaacgacgtcgtcggtagtcatctcccccccggccggccggccggttttggtcgcgagggactcgagtcgacagatgcgtcgcgcgcgtgtataaaatgaccggcccttgctggcctatttcctcatcacccatcgagctagctagctgtgatttgctagttttttttttactgaatctgtgctttctcggaggtgcggcgatctttagctagcgtgcatgatcgatccggccaggagttaagttagcatgtcgttgctgaaacttacctgattttgatttctttctggttgcaggagcggtgcttccagtgtggtgcgacaatggcgacaaggagcgcgggcgccgccacagagatgctcatcaagaagatcgatgccggcggagccaagaggtatagcaggcatgacgagatggggagcgaggttgtggaagatgtgaaaagacaaagaagggtggtggcggatgcgctgccgtcgggcaggaagaggaagcgagacgccgatccagagcacgatgacaggagcgtgagcgagagcggcggcggtgaagggccgccgcagctggtgaagccgtggctttgccctatgccgcctctccagcggctcctgaacgcgtgccgtgccttgttcacgggctcctcctcctgcacaccaccgacgtcgtccgctgtcgccttcgtccgtggcattatgggtacagtacgcatacatgcatgtcccttcaattccttcttgtcgttgattcaagcaggcgatcgagcatttcaaatgggatttttatttacgctaatactacctagtggtaccgtgtttttttcagacaagattggtccaaatgaggtcgggcttaaggacgaggtccgttttttcaacaggatgaacactgctggtcgtcagaaccctcctatcatcacgtgcaaacctatttacgaggacaccaactttacggtatgtatgtatgtatgtgtaactataatatgtgtccatatccaaatccaaagcgtattttttatgtatatatatatagctgatcaggcgtgacaatgatgcatatgttttgttcatgcgtcggcagatcgcggtgttctttctgccactcggagcggtcatgccgctgcacgaccacccgggcatgacggtcttcaccaagctgctcatcggctcagcgcgtctcgaggcctacgactgggtctgtccccatgccttccctggcttgggctcccgttcacatcgtcgtcgtcagatgctcgcgcagaaggtgcgggaccatgacgtcgccgcggcggcatccggcacctgggtgctcttccccaaccacggcgggaacatgcaccgcttcaccgccgcggacgatgcccactgcgccttcctcgacgtcctcacgccgccctacgcgcccatggaccaaataaggcgttgtgcctattaccaggacgtcgaaatctgcccctacaagcacaataatccctgcaagtcctcgacaggggctgtcagctgcgatgggcttatggaggagcacacacaccggctggcatggttggaggaggtccccaagcctaggaaccttaggattgtctgcttgccataccgaggccctacgatcttctaggctcaatggcctggtccgtttggcagattacttcgtgtaactctctagctagctaggaagattttgatagatcaaaatcatgtcagctgatgatcttctaggctcaactctctaggaggatttgatagaccaaatcatgtctgcccggttgcatacaattctttagcagtagcaaatgataacagcaacacactcttaggtcttgtttagttcaccaggaaaaccaaaaaaaatttcaagatttcccgtcacattgaatctttcgacacatgcatgaagcattaaatatagacaaaataaaaactaatttcacagtttacctgtaaatcgcgagacgaatcttctgatcctagttagttcataattgaacaatatttgccacaaacaaacgaaagtgctacagtagcgaaatccaaaatcttttcgcatcaaggggttactaaaaatgatgtctgtcttgtcgctgacttgtcgtcaggcttaaatctccctatatttta

SEQ ID NO: 3860 - DNA, 6332 bp, Sorghum bicolor
gctttccttctgatgtctcaacatgtgcctgcctcttgctttggccttgtttagtttccaaaatttttaagatatacatagagtgttaaatataaataaaaaataattatatagtttatttgtaatttatgagatggtttttttgaatctagtcagtctatgattattagataataattactaaatacaaacaaaagtgcgtagccaaatctaaaaaatttcatgaactaaaacaaggccttttttggtcgctccatgtctttggatttctatccctacgtttctttccttttgcaatacgtatattagaccaaaaaaacttctctcgcttccgtatacaatttaaacgcaaacgctcacatacattgcatatatactttgtatggtcacatatgagagatagagaccgggcttgcatatatcttcaaagttagttcaaacaacatatgcatcacacgcatgtaacttcgctaccaataatggccatattattatcctaaaaaatggccatattttctaccataactagttaaaaaagtgtaggcatccaatgtgagtactaggagattggaatagatagacatgtttcaccacaggtgcatatatagctgacctaacaaataatggacagtcttttttttccatgccgtggattccatggatgccgtgcttattgggctacctatccatagccatatctatcccgggccactatcactgggaaaggacgacgttaatcattggaagtttggaacggaaccatagattcgtgtccaccgtgactagtgtggtcgcatgaatttatcaagctgtgtgtactccctccgcggagtacaactctacaagtgcatggatttacatgctaatgcgtgatatacatacgagatatggcatgatggtcaagtaaaattactggaaagtcgagagcgaatttagacctatgtgtgtaaagttatggtaattaacgctgaagaaaatctgtatcatgaaatagagtttattctaatggccttaatgaagctagatccgacccttgaaggattagtgtttggaggttatatttatttcttacattattttaagtaaaatcattactatttgatatagtatatacaagcatttaaaaattgtacctgaatataagagattctagagatagaaaatagctagttttatactaaatatttgctatttatcaaccaatcatcattaatcatattgatgataacatctaatttggaaataaaataagggtcatgcttattttgtgttctctaaaaagttggtagttttatgatctgaaccattaaaagcaacatcaaatcatgcttgtgagagaagatacattgactgcataccatatccattttcgggtgcaaaatgatttccatctcattctatcaacagaggtaattttgataccaatgggtttcctttctttttttaaaaaaaaaaaaactgcagcagtgtctataaggaggcagacactttggaagccgaacacgctgacgtgtaatcggtgcaacggcctccaccaaacgtccaaacccaccaccaagtcacgaactccgccggccccttttgccccgtcaccgttacagtcaccgcacccaccatacaggggggtaggctcaccgcctcaacctccccgcctgcgactgcgagctcgaagcagcccgacaaggcaagagaagaagccaacaacacagcacagcgcgaagaagaggcaaccaacgacttaccggacggtgcccgcacacacccccacgaaccccacttcctcctcttcctctcggtcctgtcctgtggcgatatccatcagacagggacgaagcagagcaggcgaagcaagcgaaagccacgaccgccgcgcgaaagcgaaaggcggaggagcacagggaggagatgaggagacgagaccactaggctagactaaagcaaagccgcggacactagagacagagagacacgcacagggaaaaggcgcgtggggcggccggatggcgaggcagggcggcgccggcggcgagatcacggcggctttctcaggcggcggtggcattgccgggacttccacggcccgcacgacgccggtggcgagcccgtaccaggtgacggacgcgctccatcttctcccccttccctccacttcttcctctgcctgtgtgcaactgaaactgacggtggtaactgaaattgtacgcggtgaggtgggtgaaacagaaattcaccactcaagtggttgggggttgggtggcatgtttgagattgcaacgatgcgaccccgtggcttcgttgggcttccacgtagttacaattttgggtcgaattgaatcatttggtgacaggcgcacttggtacggtagcgcagacacggctagctgtttggcgtttgggtagaaattttgaaaccaccaggtaggattgcagttggttaagcctttaatggtgcatggttgttgagtgaccgtgcagtagcgtgcatgtatagctggccattcagtgcttgtagtgcaattaggggggagcatgagatacctccatgcagttgaagttgaaatactgctgcagtgctgcaagccgttttaatgctgattgtcatcatcaagcagtagttcagtaatggaaggatattagatagtagtccaattgtggaaacatgggagactccaagataattgaagtcaaacagtctgtgttgtaatggtaatatatattttaatacatctaaaaatacatgttagttttggttgttattgttcctgttattcccttcggatgtgcatgctattgcctaatcgcccatcatgaccattgcatgtttatgcagtgttactgtgatagaattgcttatatcctcataatgcaatgactcgtggtacttgctaatctaccttcaaattgcagcctgaacgactaaatgtattttaacccaacaaacagtgttttaccatcccattctagttagcttaaccgacctgtggtggcttcaatgtacgacaaattaaaaatagcatccgagcaatttcatttttttgacaactatgagcaatttcagttgtgttcgtattgggaattagtaattgttgcttatgtttttaaaagaatattgtatgactgtattttaaggggaaatattgtggacatttcactgatagaatggaagttcccccctaggcattgctccaatatgaagccttcgttaaggttcattggcttttccaaagcaggtaaactgatgaaaatgcttgccttcaggtgaaattagttaattttctgtttatccgatatgcaataagactaactttgccccactccccctccctcaataatcttttttacattaagcactatcttctgttcttcactaacataacacacgtatgacattgctcgatttttttatataccttgtgggtattgacaagtcattgctttgggcatgagttttctgtttcatagttcacatccatttattatatttgtgttatggctttaagcacagtataatgctacagtagcactcttatatgtcttaaattgaacaaaagctaacaactaatgatgtagtttagatgttactgagtttgcttagttaaaggactcagaattctattgctttgcctattgacttgagcttgtcagaaatgaaagagcacatttcctgttactgatttttcgtgttttctgattgaattggcttcactttactaacattccaaatcttcctcaggcggcggttgaaattgaagagcaaatttattctccagcatttggcaacattgaggtccaggatagtcgtggttgctgcagtggtttcacaggcagagtaacaaagttgctgttcatctttcatctgcttgctttcattgccctcacagcattcctaggcgtccaggcctcttcccaccagaaccctgcctacaagcccttctccaacttcattcctctggtatcctctgtcatagtatccacaattgctgcctgcttctgggttatccttgctgtcacaaaccctccaaaagccatcaagacctctctctgggctgcccctgtttctgcacttgcttgtgatgtagtcatacttctagttggtaatactgctgcacttggtataggagcgctcgtagttgtatttgcaatcgcagcaggattatacagttgttgggccactggtccacgtcttaagcatgcctctgatatgctttctgtttctgtcatcggagcacatttaccgcctactacttcatgccttgttgtctatgtccttcttgcaacgtttgggtatatggccttctggacagttgccatcagctgcattgctgctgcagaagggcacttcatgaactaccggatggcttatgtggcagcacttctagtgagcatggcatggaccatgcaggtactgcgctacattgtctatgtggcagtggcaaaactggcacatggacgtctcatctatgggattcgcatcccgggtggtgctgtggatgcattgtgtgacacgatatttggaccagcctttggggacatatgcatgggtgcaatggctgtgccggtgaactcagcagtgcggggatttgctcgagcaatgaaaacggcaactgggggcaatgacgagttcattttctcaggacagggctgctgctttactgtatcagagaagatgctgggacgtgctaaccgttggggttttgtgcacgtgggggcgcgggggaaagcattctgtgtggcttcgcgggatgtgtggtcactttttgttctccgtggtgtagcagagcttgttgattcagacctcactggttcattctgcttcctttcttcggttacatcaggcgcattggcctcactggtttctggatcatgggcactagccatggataaagatcagaagaaactagctttgcccatatccatctatgcattcctagtcggttattatatggtattgcactcaatcttacttccatttttctctgtgtttatcagtactagtgcaacccgattgaactagctatgtacttttgtctaaaagcagcatatatctgcttatttcaacatttgtatgccacaccatgattttaataagttttagttgataccatcctaaggcttgcatattatagtgtgcatgggaaactataaattagtaaccaacaagcaacctcctagaaattttgaattttatattgctttagggtctccaccctattgttctagattcttctgctatgaggcaatcagggttacatgaaaatgatatatcattatcttccacacacaaaaaagtcgaatagatactgttatctatgcacttgctttcatagattacccagtgtagatgttgttttgctgtttgtacaccctttgtttctgattttgttttcttcctttttgtggcagtgccggatgatgatcgcgtggccacaagcatgtgtggctgcataccatgtcgcgtatgcagagaacccgcagaaccctcagctgggcacgctgataccagaacatctgcacgagctcgaagcaatggcggcagatcaagatcgtcccagagttatccattcttctgacgacatcgacaattcatagattcttccattctttcagtcatttcccccctggtccctagagggtagacacctcggctgcagacagatgcatgctgatggttgaggactgctgctaggctgctggctggtgcagatgatagtgtgtgcttagttctgtagatattggtcaagtggacaactggggaaaaaaagtggttagaatccagacaaaaagctcatagaagtacagagtttagtaaatcaaacaaaaatgcagaattagatcattgtttcagattctcccggaggcgcgcgtgttcttgtcgtcgcactgacactgaggtccctgtgcttgtgccttttgctctgacggaggtggctctggtatggccaggaaatggaaaaccattctgtgcttggtaataaaaaaaaaaagtgggaaagcaaaagaaaaaaaaattccgttgccgggactcgaacccgggtctctcgggtgagagccgagtatcctaaccagctagactacaacggaagttgcccaaggatcgatactaaaatttaaatcagatgcagaaagattttagcagaatctgcatccgtacatctcattgtttgggcgagtttgtcggggctccggcttaacctacgtcctgtactgtagcagcgctgtttatagaaattagaaaattgattttggtcttgtttagttcccaaaagattttgcaaatttttgagatttcccgttacatcgaatctttagacacatgcatgaagtattaaata

SEQ ID NO: 3861 - DNA, 4956 bp, Sorghum bicolor
gaaaaagaaatgaaattgctcggtaccaataaaaaaaaactttttgtagaaacatgacgtgcaatggaccagtggataagaacatggctgaatcccatatattgactgataaagcccagtaaagaagaaaaacacatagggtgcgtctggaattggcctgctggccaaaaccagctggccggccaaattctggcgcaagaattggccgccccgaattgacctggaattggttgaaaaatgaactcgatttggcgcaagaatctgcttttgtaaagtgtccagccgaatatcggcagccatccagtcaacgacaaaatattggctcggctccagatggcctcaatccaaacgcgccctatagtattaattattgttgacattgcaactgaactgagttggttgaatccgaggaaggaaacagaataggagggaggagaagagcacgcagagacagacgaaaaagaaacgacaacaaagacatgacgtagcgctttttttttttggtattcctaagaatcgaatccgctgaggacgaagagacaggagaggtttgaaactccgggggtttggaatcgggaataagagttcaaattcgctcggaccactcccaaaatcccaaatctcgtctgtctaagccagcacaacagaaagtccgcggaaccgcgtaaacgatcacggcggccgcgccgacaaaatgcatggcgcgttagagaaggaacagaatcggacggaagcagcagtagggcacggagaagccattgcggccccatgccgcagttacctgcacggaccgccggcgccggagcgcggcaggacggggatcaggatcgccggtgctcgccgctcgccgctcgtgcagagaccggcgggcgtgcggcagcgtcgacggcggcggcggcggattgcttgggcggaaatcaaacgcgggagagatatgctcgcggctcgcgctggcctctctcgctgctggcttgtggccgccttcccggttccgttcagttgcgacctgcgcagcaattaaaagaggggtgggtgggtgggtcgttgacgccacgggtttcccgtttgtccaccttggacgggccccacaagccggacggtcggctgcaccgggcccaaccgcaagtgacagtgcggcgtcagatgtgttgttggtcttggccttttcctcctcctcctcctccaagaattccttcctgcgtgtgcggtgtgcctgtgtgctctgtggcagcagcagcagccgtggaggaggaggaggaggaggaggaggacccgcccaggccatggccaggtgtagcgtagcgatagagtagacaggctttcacggcggcggccagcgggggcactctggacgggtcaggggcgccctgggtccacctgtctgcgtgccgcgcccggatgctgtgctttttttcacctggcgatggtcaaagcggcgggccagcaacggcacgagcgccatgatgattaccagggcagcagcggcagcggcagcggccagcgatgaatggatggacggcgcggggcaggacatgcttttgacgctactattacgctaggcgccactctagagctagcgttaattaacggcagagcttcttccagccacggccagattcacgcagcaacaccaaacattcgattcagatcctgcacacggctcggagatcatgagtgattcttctgtctgtgtagtgtagggttggccacggcaccaaacgcttcggtcataggggcacacacacaaaagtcacggacagtgcccgccggtgaaagtggcggagaggcccaaaccgacgacgccggccgggctctcagtctcagctctgggcactgggcagtggccgctttttgagtgggccgggccgcaccacgcgaaacgatgagatgggatgggatgagtcgatgaggcgtcgtcggtgacgacggtccaattccaatcttagccggacgcccgcccgcccgcccgccccggaccggaggcagcagcgacgccggccatgctctccgccgccgccgccgccgccgtcatacccaagctccgcttcgcgacgcggccgcagctgaggcggccggcggctaggacttactggccgcggccgctctcctcctctagccacgtaacgcccgcggcggcgggggcgggggagctggagccgccggacctcacccgcttagccaacgccgcgcgcatctcgctctccccgcaggaggtcagtcgccgtcctgctttctttctctggatgccaacatctgatactatatgttcacatgagatgctcacgatgatttgcttgtcttctctgtgtgctcgctcgccaggccgaggacttcgagcccaagattcggcaggtcgtggattggtaggtttttgctacctattctcttctgtttgcgcaggtggataatccaagggtcggtttgtagtgcttgcagattgcagctcatgaaaattctgcgacacggtggagcctctctactaagaatgttctgccgtgggtttagataattccgtagtctgggtgttttaaattggggaaccaatgaacacatgccgtagtgcattgccaatttcagactggaaatactgaagcaatgctagtgccttttgcagagtgtaaatatatcattctcacaacttaagttaaggattcaagtcacactatgatccctctaaagtcagcgattcaagtccctctcacttaagttaagaggggagactcatccctaaagtcatccaaatatacacattgttctcacaacttcaccatgaagacaacatagctgccaattgttgtagaagatgttgagtagtagaaaactcattaaaggttgaaagcggtgggagatcaaccagatcaccatcctcagtcaacacccatgcaccaatgaaggcacctttctaggatgaatgggacactgtttttaaaagatgaatatggcagcgtcaatttttctagggaacaatgcaatatgaacatcttaaagatcacatttagtttcctgtggcagaacaccacaaatgtcacaagctccgtcacaattaatttaatgggtatgttttagatttgatcttgtagttttcaagctaaaattgatattaggctgattttgtgtagctatgtgattcttaaacacaaaatgggaagaccatgaatttttcacactatgggggtgttgggttttgatttctatttgtatgcactggtgataaaatcaaagcttgactggttattttggggtagaacttagctgctcttcgtttctattttctttacaggtttgggcaacttcaggcagtagatcttgagtccattgagccttcacttagagctggtatgcatcttggtgattgattattgtttattagaatctcttgatttgctagaatttggaaagcataaagtctttcccactccagtaagcatgaaaacttgatttactaatactaagttccctatcccaattggttttgacacgatggaaggcttctagtacaagagaaggattataatgtcatcagttaattatattttaaacaattagttctgaattctaatgctttcatccaaaaaccaaatattttatttgattccctacccccaaaaccccaaaagagttcctagagctgttaagattaaagagttcctagcagcccgctacacaattcttattaactgttggtccgtttctgtatgtttatttcagcagattaccatttttcatgttccactatttcatccacaggtacaacagctgatagttctttgagagaagataaacctgaaacattcgataacaggtgagcagggcaatggctcttccatgattttcactaaagcactacatgctttgcaaggaaagcctgagtgtcttctttttcgttttttgctttttttgtcaatgcagagatgccatagtggaggccattccaagttatgatgatccatatatcaaagtgccaagagtgctgaacaaagaataatctgctgcctgtatatcaaaattgttagaatattaaaactctgcgccatttgtacaatgcagcatggttaaacataatgataaaatctgcaaaaagattgaacgagccatcagcaagctgaattttgattttgcgtatttcaatttgataatgctgtgattgaacagagcaatcagcaaccttgacacagcaattcttgttgctgtcctctgctctggagcaagctatcatgggtattggatgagatggaacaatcgagtagagcaggcatcgatgagtatatcggatttgactcagaatttccagcggatttgattcagaatggctaggttggatgtctgtaagattgagttggttgttccctttatttagcgaggatttgtgggcttgtggctgttttgtaatccgtactgagcttgaacctttcttctcccccttaatacaaaacatgtcgttttgtaactatactgagcttgaacctttcgtcttctcctaaatacaaagcgtgctacacatgagcttaaaaaatctcatagataaattaacttttcagtttgtagtaattatatttcttagaatgtctgggagtatcttcgaggtcatgcccactctgaaagagtcatttatttacttctactagctaaaacgggtcgaagaaatcttcatttgtaagatccgagcaaatcaatataatagcactatttttttttatttgcatctgacaacattgtcattttagagtcccatttacagacatctctaccactattgatatgttcatgccatctttctcaatataaggaatcactgcagctttctacaactaacacagtaacacctttggttcttgaaaagaatcttcatcccgatgttcacaaaaaaatgtatgatacgccaatttattttagctttgcagattatggataatttttgcaggttgttcccatgtgaaaatacacaggccaacctaa

SEQ ID NO: 3862 - DNA, 8121 bp, Sorghum bicolor
gaataatagtattttggttgtaggtttacgaaactgatattacaatatacataaaaatacataaatacatgatatagataaaaataataataaaatctagagtaaaaagcataaaaaaaataaaaacacaaaatggagaaaattttcaaataatgtcaaagggttacttttcaaatatcgtaaatatatttatagaacattaacatcactaaatacatcatagaacatcattaaatatattatagaacattacatctattatagattacatgtatactaagtgaacatcataagaaacatcataaaatatcacatatatactacgtaaacatgacattacacaacatagaacactaaatatatactacataaacatctcatatatatagaaaataaaaataaaaaataaatacaaagaagaaaaatataaaaataaacatgattaacaaatgataaaaaatgcatagagcaaataaaataaaaaaataatttaaataaggataaaaagaaaattaaaaggaattaaaatataaaataagaatgaagaaacatagaaaatctgaaaagaaaaaaaacaaatagaagcaaggaagaacaataaaactaaaaccaaaagaaaaaataaaagataaaattaaaataagaaaagaataaggaaaggacaggaaataaaataaaattgaaaaacaaaaaatggaaagaaatgaaaaaagaagaatatagagagaaaaaaataaaataacaatgaagaaacaaaaagtatgcggattttaaaacccgtaacaacgtacgggcattaagagctagtaatcgaaaacaagttaaaggtgttacaatatacgctttgtcaaacgatcatcaccgtactcatgggacgccgctggcgtgcttgttcgcccctacaattcaattttgaactagagtccaaatgtcaagtcaaagaatccaaatctgaattgagggcataacttagttatatattttatttaggtttatgtttgttaaatataaataaatctataactagactatacatgattcaatgagtataaaatttttactacagtttattcatacaataattagttcaccataaaaaatttattacaattgaaccatagaaactgcagctatgaattgttctagatctaaagttacaacaaaaactttgtactaaaacatactatattatatgttcagtgtgtagatctattcatgtggagtctaataaaattggattttctattttatgatttttctgtgatttactatgattttttaaaaattcagttgaagtaaataataaaaaaaaagacaaatccgccttcaaaactgcttacaagaggccgtgagctaaaatgaatgattttaaaagttaagggagatgttttgtctagttttagaatttaggggagaaaaaatggagtcatgaaaattgaagaaggtacaatagacttttcataaaattttaggttttggttcatcattttgcataatagaactaaatatcatgcaaatttttttttgcaaaaaagtggttattctccattttggattttggcctcaagagacaaaagaaaaggcccaaaagagcctcaaaaggccctcatgaggataataaattatgcattttggatcgaattaaatataaccttaaaatttttagcattttatattccatcattctaaagtagttgatattttgtattttgtatttcatggggaaataaacgcccctaagtgttgaaggagaaacggctcaaggttgaaggagagctgtccgatcttgatcagacggtagggaaaagaatcaagtgttgagctgctgtagaacatccgtgtcatgtgttgggtagacagcttcaaaaaatacagtgaaaaagagaattcactgcacattagtacatttcttggaaaattaccgtgggttttcctacgcttgctttatataagccggggtggtgcacgccgtgccaaacacttgaacctatcttctccccatttccttttcttctcttccaagtacgtaacaaactcctgagtgagcgcgaggggatcgagttgcgcccatggcgaggcatcgccgtggcagagggcgccgcggtggccaccaggcctacccgccggtcgatgaggcgcgggtctccggcgacaacgggcgagacgaggcaaacccgagcggcgctgaggcggggaaccgcaacgagaaccgcgatgacgacccgtcgcgcgtcggccagagcctgcccgccatcgctgccgatatccgccaagccgggaaagccgtcgtggaggaggccgccgcgccgctgtggaaggagttcgaggcgctaggcatccacgtccaccgcgccgagcccgtattcccgccgcgaccagggtacggcgccgaggggacgccgtgcgtcgtcagggccaaccgcttcctcggccgcctcgtcgacgagggcctgcaccagtacaacgtaagtgctcgtgctctctcgtccagtactcttcgttgttggttttgatctaatctgaccgagcgccattgctgtgggttcccgtgtttatggttgttcgtttcgttgtacttgtaggtaaccatttcgccggagccgacgcccgagagcgcgtacagggaggtcatgacgaagctggtgtccgagaaccagcacacggagctcggcggccgcttccccgcgtacgacgaccgcgactctctcttcaccgcgggcgcgctgccgttcgacgccaaggagttcgaggtcaccctctctgcaggcggcgacaaaaagtacgtgaactctgcttctcccatcttatgtcggtcgctgcggagatgcgatgcaaatgctcgacgaattgtgcaggatggacaggaagtacaaggtggtgatcaaccatgccgcaacgattagtctgctacagctgaggatgctgttggcgggctaccccacggacatccccgcgcagacgctgctggtcctcgacaccgtgctgcgtgacgtcgtctccaacaagcgcaatgacatgaagtaataaacggaacattcgctgtctctgattatctcactgtgttcatgatttgggatgataatgttattcgtctctggactgtgaacagatgtgccgcgattgccacaaaggatcgtacactgggtgttgacgcatggaaggggctctatcagagcatcaggtcaacacagaactgcttgtctctgattgcaggtcagatatcactcaacttctaaatgtgggttttcctgtttagttatgtacagtatggtcggaaacacagataggatgtttagatggcagaactggtcaataggggaaatttggatgcaaatctgtacttgtataagttcatttcattttcatgtggttggtgcaaatcaaattcagtttcaatcaagtggacactgtagtttcaggtgattggttgaaagaaaacctggcgattgcacttcgttattgtagttcagatctcgtgtctttaccgaatttgtaacgtacagtaatttttccattgcagatgtgtcctcatctgtattcgttcaacccttgctattgattgaattcgttcagaagttcctaaagatggatgtcatggataggaacttgactaaacctgagtatgacaaggtattcatgctttctccttccttgatacaaaatgcactgcaaatcagaacttatgtatgttgttgttttctgaatttcagctcttgaaggtcctcaggggtgtgaggattgaagtcacacacctaggagataatagacgccgtaagcacagaattgctggtttgtcagtggatcctactaatgatttgaggtaggatacctctcgtttgcatttatgttcaacttagcctctctagttcagaaatacatggtgccattaaattcggcaaacagcacttcttttttactgatcaaacgtttcatggtgccttttaaatatcagttttcaatctagtggaagtggagctacaacgacagtcattaattacttcagagaaatatacggcctggacctgaaatacagatctctcccatgcatcatcgctcgcagcgagcagaatccagtctatcttcctatagaggttggtagttatggacttttttttttgaaacatggtagttatggacttctcaacttcaacatgatgtcttatgcttctatactccttacccttccttactctgctgctatttccgaatgtaaatttgaatttcaggtttgcaagatagttcccaggcagtgttaccagaagaagctggaagctagtcaggtttctactctaaggaagtcagcctgcatccatcccgaaccggagcaatcctgtcatcaggttcatgatctcactgcacttcgtgtaattgtgacatctgtaaactgataaaaaatatctttaagtttttgctaacctaacttccacttgtcttagattgttgatcaggagcagtacaaacgcaccaaacgtgcaaatgattttgacacagaagttgatgacaatcttgcaacagttgatgctagagttctgctgcctccaaatgtactcctgcttccatgagttcttatgtagtactttgggtctaaaaaagtttgtgattgtattatatgctctgcttttgttgctgttgtagcttaagtatcatgattctggatctcagaagatggggtttccaatgaatgggtactggaatatgaaagacaaggtatgtcatgaactgctaaaccaatcttaatgttacagcttcaatgaagatcaattttgagaacctttccagtagtgccattctatcatttacttgctattgcattcttcagtgaagtaatgaatcaagaaaaagtttgattaacttcccatgaattttgattgtacatatatttgttcttaatctataaccattgcttgaatattttgtttgcagaaagtaataaatggtgccaagatcagcaactgggcatgtcttaacttttgtgatgatttatccaagaaagatattaaggagttttgctttaagctggctgaaatgtctcgtattactggagtggtaatatgcttttccatcatccttttttactgtctctaggtcaaaactgtcttgcctaccccttttcactttaatttcaggaatttgccaatttgaagctcccaatattcactgcacgtccagatcaagttgaagatggtattcgtaaatgctatcaggaagcgaagaacaagctgagggatcagaagattgatttactgcttgctatactaccagataaaaatggcagtttatatggtagtgtctatgattggagacataatttcttcacttctgttacatatatgtgatgcctgatatttcttcaaaccacaggaaatattaaaaggatctgtgagacagatattggtctcgtgtcacagtgttgtcgaaggtcaaatgtcttcacggaaaatagtcagatattggcaaatattgctattaagatcaatgccaaggtaaacctcacattcgcttcttcatgtatattgttttaaaaaaactggcagttcaacatgataagatatattcaccatcttgataggctggaggaaggaactcagtattcgatgacgtgcagaagagtttacctgttgtttcaaacaagccgacgattatatttggtgctcatgtttctcacccttctaaaaaaaaatatggttctgctgccccttcgattgcttctgtaaggtttccttttgtttggtaaatggacacagtgccttttccattttcatcttattaaactaacagatgctgcctgaggttctgtttaggtcgttgcatcccaagactggcatgaggtgtctaagtataatagtgttgtgcgtgcacaaggtcacgctgaagagatcagtggccttgaagacattgtcaggtaagaccttcaatctatgtaactatttgaacatgcatgccaccatattaggttgcattttaatttatgaaacttttgaagggagctccttcatgcatttgcaaaagagtccaacaagaagctccagcagctgatattctacaggttcaaacatctcatttgttctgtgatgtgctattttgatcatcatcccatgaaattaacagttgactgcttttctctctatgtccttctgctatgtatttggttactagggatggcataagtgagggtcggttcaaacaagttttggagaaagaaatcccagcgatagaaaacgtaaagtgatttgtgagcaaatagtgcttgccaatatcatatttgattagaacatttggtaacaactctatttttcttctccaggcttggaacgcactgtatgataatgagaagccacaaatcaccttcattgttgtgcagaagaggcatagactaaggctgtcacccatggacaacaaatataagctccgttctgttacaaagaaaattattgagcctggttagaacttagaaccatgagaatattcacaacagtcaatttatggtatcctgtttcataagccatcttaaccacatgttcctgaaaaaattgtaggcacagtggttgatagtgagatctgtcaccccgcagaatttgatttcttcctttgcagccaagttgatgtcaaagtaagatgtccacaatatcacaataacttgactgtcttcttgccaatttgtatccaaggaataaagatttggatgactgtggaaaatgcaggggccaaggcgtcctgtgaagtaccttgtgctgcgagatgataacaacttcacggcagatgaactgcaggctctcacaaataacctgtgctacacgtaagcgtgctgttacttggtgtttcccttcaaaaccttcccccccccccccccccttttttttttttttcttttgcagtttgtgctgttcaggtgtctgacagcttgtcctgttttgtttctcatcagttatacaagcggcactcggtcagtgtcgatcggtatgtcattcttctctgtattcacagataatttagttttaacgaacttgccccattttttttactgctcaagcacggtatctagtgaaatcaacatccagactgcagttgaactggacggttctgtctgaatctctaatctacatccatgcacagatgcagaagcacgactgttaacaacaaaaataaaaccttactaccacaattttgcatagtgcgtggaagaaaatgttaacgtgatgctatgctgattgtttgtaatggcagctcctcccgcattctacgcccaaaagctcgcacatcgtgccctcgcctacctcgccaaaggctctgacacggcgtcagcatcaagctccggcagtgcaggtgcagatgcagctgctcctggtgatggtccgaagcaacttccagagataaagaaggagctgaaggggtccatgttctactgctagtcctttgccccctgaatagacgatgcattgctctagtgaaatatttctgagtctctggctgacatctggtgaaggatggcatctgcaagagaatagttgtcgtgttcttttcagtactggaatggatggatgttttttgtttggtggtgtgatgtttcccttgaacagagcatgtttgtgaacacctatgttgaatcagttttttttgcagtattatttcagaatgtgtgagatagttatatctttcaaagtctggtggtctggcatgcaatgcgcttcttcagaaaactggagttggaattcaactactcaaccagggtggcctgcaaaggtacctaaaggcatcatcctctgccttgtttggtgtgagagaaacttctgagcttcgttctctgtcagtggcgtcaccaaacacgatgttttgatccaaattggtaacttcaagttctaataatgttctatccaacctggattaaactctgctgctgtaaaaagtcaaggcagtacagtactacctgatcttcctgtcaactgccaactgcatgaatctatcatctcttgtttcctcctcatagttcctgctagcacgcagcctgtaatggtgggtagtgggtacacatcgactgtggctttcaaggagtcataagaaaatcataactagaactggtcaactccacacgcaaactactgcaggagacttgtgccttcatcg

SEQ ID NO: 3863 - DNA, 6656 bp, Sorghum bicolor
tgcaaatggcaacaatgagagggggattggttgaccacctagcgggattggtcaccccctatggcatgtggggccactcttctccttctagaatcgtggccctagatgggttttggatgcttggaagatagttgtcatgtcggtttgttttcttgtgggtccattggatccatgtgacttgatcttgagccattgagagaaagcacaaagctgatccaagggtggagatgtacttgagagtacttctcttagatcatggccagctcgggggctggtgggcctatgagggatcaatcggccccttatgtgggttctactagctctatttgttctatttagcttacacctacatagaaatactccaagacatgtggaactagttaatatgctcatgcaatgcttatcttccttctattttgaggccttgatggtgttttgggtatgtgaaattatgacattttcactgtcaacaacaacattatgtgtttcctgtagggctgatcgttcaggagtggaccgacatgcttatgccaaatgatgatcggcagcaccaccgcaagataaagaagcctgattaggagagggttatgcctctcccaactcatcagcaccaccacaacaaagatgaggccttatgtctctgttgtggtctccgatgctattgaggacgaggataaggagacttttgagcttgatgaggatgtagatttagccttgtgcacaacccatcaacagatgcactcatgttcgactcaaagggacaagttggagatcatagtggtgattgtggtcatcctagcccttgtactagcccttgtctgctgtctagtgtgtgtaggtcctaaaaaccatctggcaagggctcagctgttgacagagatgatggctttgctcttgccacacatcctagctgtttggaggggaggaccagtgtaggtacaacccacgactactattggtggtggtgggtcttcaccaacgttctgttggatgccctgcactatgtagttggagtgatggttcacacttcacactactgagacccgtaagatagctacaaacaactgaggcactgatgctattggatagatactctcctcctcctcctcttgtctctctcttactctctcgacgcgctatgctagctataggtggtcgcaacagcccgtgtcgtgctacgacctcaacacagccatgttgttcatgctctcacgtgccgacgccatcgagagtgacaacttcaactttcgcttgccatcccttgagcaataatttctagtgtgtacgagtatgacatagataggaggaggtgtgaactgagctgagccaaggacgaagacaactatgcgagtcatcttccgagttcccgatacggtttatataatgctaatgtatatctggatacactagttaaataaacccaactagttagttctaatgtcctttgatctctaactaagatcccttaaaagttaataaaacaaaaagaaaatcaaaatttgacacttaatattgccaataataacatatcacgaaggctcttattctttctaatcccaaataagtacatacttatctcatattgcgagtactcaactaattttaagtatggtatttatataaaacaatatcaatatttataagtctaaatagattttacatgaaaatgtatgacatggttaatcaaatgattttttatttggtatcatgattattagcacattttgatatatatgtatatagttagatttggaatttgttttctcaaaatttaaaatatatatttattttatgatggaggagtattttatttcgggaaccaaagtttttttttgagacatgggtgccggttctgccggagatggtgggccggcatcctccgggctcccaagtcatctttccatcttctgggtgcctggtcagtttttcttttttcaatcaaaaaagaaaaaaaaagtgcataaacctctgctccctccctcctccggtcctccgactccgacccctcggccctcgcgctcgcaagctccactctgcccgtcgcagcccctgtctgtttccttcccctcgccagctcgccgccgccgccgcatccactcctgcaccgccgctgtccacattcctccgagcccactttctcctcgtagccgtctcctctccagtatccacagctaggccgaagccgcagcccccaatggcggcccgcggccgcctcgtcgttgcgtgccgcggctttagccgccacatgccccacagcgcgggtgggatccgccgccctcagatctgtctgatgcacggctggtgcgcttgaagtttcgctgacattgggggtggtttcccgtttcctcagcgcctgagggccttgctcgttgctgcggcggggtggccaggtccggtgcgatgcgttcctcatctttcaattctaacttggtgtatatcacaggtgtactgaactgtatttttcgtctgcaggggagcgtgggttcgcatagcgcggtggcgtccaaatccggccgacaagtccgttagaacttagtgtaagtccatatcggtatctgtgtgttcgaaaattatgcgtcaggatgcatacagaacaaacaatttcattggttcttgtttctgagtaaccagcaaatttacttcactttaggttaggtttgatttcgatatctggagccccgacttgattaggactagtctcgttttgcaactttttggcatactggtatccgagatgagttggaactagggagtgtgaaagctgcattgttgtggagcagaaaatggcattcaacctataacagatggccagatgctttgtcctgtgtttggttgtgttgaagttgaaatgatctcagttaaaggctaaggtccttagccattgttcgcgtcaatcaattgctgtcaaaagtataaatatatgtagatagatgtattcaaatattcctatcatgtgacctagaggtttcaatgtaaaagtacaatgagatagaaattcaaccattcatctcaattctcaagcccccaaacggtgaggattgaaatttctgtaggctttggagtctgttggcatgatgatattccagaacattgtgtaggtacctagccatagcaagaactagaaactggcctcattgtggagaatcatggaaggagatgaggcatatatgggatgttgtttctttctagagattaatttgagcaagaatgacatgctttttttcttctatctatcaagcatgaagggtggtgtggtgctagttctatctgggtggggtggggtgatggtggtggtggggtggatgatgtgcgacgagaactttaagtgatagatgcaaagtggtgcccataaagaaggtagaacaatgaatttggctagaatggttcaatgtacagtttgcttcttagcataagccttagattattgtataatgagtaagtgataaactaataactttttaagatgaagtaacttcaatatgtgaatattttgtacgttcttcatttcgcgtttaaccttatgatctgatgaagcttattttgttacctcaatgactagatctattttttcagaggtgacagaaagtaatatgtcattttatcaacatagtattttgacttctttatacctcatctaaatctgagtacaagctagggtcattggctcattgttatgctaaatatgtgcataaatgtttgagtttataagataaaaattgattaggcaaacctcgttctttttataaaccatggtatgtaacggtgcttcaccctgtgggattaaagaagaaaatactgcttaattgtctttgcttttctctttataatatttgacatcagtatagcttttgtgaaagttcagataagggaatagaataacacattagaatacgttttaattatttcggccatagtgactaactcaagttgatgaaagtgacactatcaaaatctgaggacatgcggaatagaatagcccattagaacaaagaggggactaacattagttcatgaaacttcatctgaatccgattaaggctgtggaggtcatgtggatattcttgtgaaggtagaagtgattgttcatagagtaaaaactagaaattaatgatctcacagaggtttgctgtattaattcataatcctgtcatattatcttggatgctgttaggtatctttcaatacgatcctttgcagactgtattcatagttccatcataatgaaatatcataacataggatttgtcttggtgcattgacttctactcaagatctaaataacaattttgtgttatatcatcatctttgtttgaatgtgcatatatatcattagttattagttacttcatacctgtttggctgtcccaaatcttctcccaattagcctttgatttttggtttattattttgataatgatgaatcatgaatttcttgttataatggaaaacagaaaactgcactgtgaagtacagcaggtcgatgtccccaaagagcaaccctgttcttttgtccttgaccatctggcttattacatcaactgtcccctgaatatacatcacatagcgaacaccactctacttgtccttgtcccctctctctctcccccccccccccccctcgcaaattcacagtattttgggcctcatcagctgtagtttgatgtcacagtgcagatttcagtatggcttccaagatccagctcttgtcctccatcgccattttagcttttgcctcacaccttcacccttgtgtgtccattgagtttcgccatgagctctccagctggaccactggcatagctacgtggtatggtgatgctaatggcgctggaagtgaaggtaatagttacataatatccattgtctcaacagtcaccatataatagctcatgtcaaactggtgtatgccttgaatagttaattttcaacgcatgcatgtctcagttacaccttttgtaggtggtgcatgtgggtaccaatatgctgttgaccaaccaccattctcatccttgattgctgccggcagccctttcatctatgactctggcaacggatgtggctcttgctatcaggtgcgtgtacctctttgtgattgaggctcttgcatgtatgcatgcatggctgctatttgacatttagaaatgctgattgatcaggtggtatgttctagcaatcaagcttgctctggttacccggtgactgttgtcatcaccgaccagggccctggtggtggtccatgcctgagccaagcaagtgatggcatgtgcctaaatgagggagcccactttgacatgagtgggactgcatttggtgccatggcaaagcctggaatggccgatcaactccgtgctgctggcctgctgcaaatccaatacactcggtatgtacactctttcttcatggacttagcttagctgcaccaaaaacggctgcttgcaacgaactatcccatgttttttaactcatttatttatgctgacctttgtcatgatgcatgcatatatggatatacagtgtgcagtgcgaatggcctggagttgatgtaactttctctgttgactctggctcgaacccgaactatctggctgtgctgatcgagtacgaggacagtgaaagcgatctttcggccgtcgacatcatgcagaactcggcaggacaatgggtgcctatgcagcattcatggggtgcgatttggaggctcgactcgggctctgcccttcacggcccgttccacctccgcctgacattcagctcaggcagggtactcatagccagcaatgccatacctgcagggtggactccgggtgtggcgtaccgggcaggtggagtggcggtgactagggccaggcccaggagtggtggcggccggatccatgaggctgctggaacatttagcagtttggtgtatcaccttctgatgtttgtggtattggtgttgtgaattctgatgcaaatacagctttggtagttttgagaagcaaatttaaccatttaggactatccagggatttagatgtgcattttgatgttttcttgtaggcctgagagagttgagtgttgtgattgtgaacgtttttgttgtgatcgagttaccagcatgatcagttggacgagaagtccttgtaaatacgcgtttggtgaaactgattgggttggttaagcgccaagcggcacactcaattccttttttatttgatttccatgcattttttatggatcgaatgtcactagtcattgaactagtgaacaatttatttttctgacagtatcgaattgaaatttggtgttttcaagttaaaaggtttgagtttgtatattggagaggcgagtctttaaacatatgctttgaattacaaattgacaatcccacttttcatgtggagagacgtgtgtttggaagaatctagattctctctcttaaaaaaaatcagatgatgatttggaatcacttgaaaagccgttttgcaaatgtaattttcttactgtacagtgcattgcagtgagaagcataacttacacaactgaaaatagtcgtgatctctatagtctaattcctaattcaggatcaacgagtttggctaaactttcagcgttgggcaactccagtgccagacggcagcatgcacaaagcactgctgaatttcacaccacaattt

SEQ ID NO: 3864 - DNA, 12639 bp, Sorghum bicolor
tgctgctcgtcagcgccgtcggccaggcgcggtacctcacgcacatcgcccggacgcacatgatgccgccgtggctcgcgcaggtgcacccgcgcacggggacgcccgtcaacgccaccgtcgtcatgctcgtcgccaccgccgtcatcgccttcttcaccgacctcggcatcctctccaacctcctctccatctccacgctcttcatcttcaagctcgtcgccgtcgcgctgctggtccgccgctactacgtcgccggggagaccacgaccgccaaccggaacaagctggcggcgtgcatcgccgccatcctcgccacgtcgacggcgacggcgacgtgctggggcgtcgacatcaacgggtgggtgccgtacgcggtgacggtgaccgcgtggttcgtgtccacggtgtgcctgtgggcgttcgtgccgcaggccagggcgcccaagctgtggggcgtgccgctggtgccgtggctgccgtcggcgtccatcgccatcaacgtcttcctcctgggctccatcgactccaagtcgttcatgcgcttcgggtactggacggccgcgctgctggtttactacctcttcgtcggcctgcacgcgtcctacgacacggccaaggcgctcgccgccgagtctgccatcgccaaggtggagaacggcgacgacaagccggcacgaggcgccgtccataacggcgtgtaatgaagggagatgtaatcgtgaatataaagtgctacactatggttgttagtcgctgacaggcgaacataagtttgtacaaatcttcagacttattcgtgttgagttactaggtccgtacaatgtatattggacaatgtatttttttttcgtctcctggtgaccagccgccgttgttgagacgtagagtgtgctcaaggtgtggttaaccgttaagcctaatgcattcattttcaacaataataagttgcctttctgtgtagctacgtggaagctgctttttgcaagtgaagttgagcttcatttgtaccgtatcccacctgacctccatcttttagtcatgacttatgaattggctaacctcttttgtagtatgttgattcttctttcatttgtacagcccagataagttcatcattcacactttggtatacaacacaaaaaagggatttgatcgacatatttgaatattcgcatttagctgttttatatatgaatttttgtatcaccaattcatcaaattatttgccatttggcaatatgccgaaagatctatcatctgcaggctctgagcccccccgcaagtacacatgtactccctccgtctagtaatataatatatcctcaaacataatacattcccgagaacaaaaaccaattttacattaaatactttttgtttatcgactaatcaccatcaatcacgttagagataatgcttgatcaggaaataaaataaaaatacatacatctttacgttttttcttaatttgtcttagaaaccctaagatgtactatattacagaatagagggagtatatctttcataatgccaaaccgttcatagttactggagtagctgtggaagaatcttattagggtttggattgcatctaattgtaagctgatccctctatcgatgctgcttgcttgcctttggttgatcaatcgggattatttcacccatctgaattatcttgtttggtcaactattgtcgtgtgaatgagaatttttggatcatcatctatcctcattcctcaattcctcattcgttgctatcctaaacttacggtcggccgtcgagtgtgcccccgttttcagtcacagtaagagggcccaacaaatgtagaaaaatataggagcaaatcgacccaatttacattccgggagaagctcggcccagactctattcaaccccatccggcccaaaattcaggttagccgccgccgaccggttaagccctcgtccgcaactccactcctgtcttaaaccctcgcctttccgccgcccgtcgcttgactcgcttcccccaaactctcgtgctcaccccccggcggcggcggcggcggcgaaacaccgcgttgccttccaccgaaatcctagcgcaagcgtgagcgctcgctttccccaccagacaccatggcgccgcgcccccgcaagcgggcctcgcgccccaagccccgcccgggctcccgacgtggcggcggcggaggggacgacgaccccttcttcgagtccgagcccaagcgccgccgcgggggccgtgacgaggacatcgagagcgaggacagcgacgacgacggcggcgtggctgcggttggtggcggatttgatgaggatggggacgggggcggcgaggaggaggacgaggagacggtgggggagaagaagatgcgtatggcgaaggagtggctgcagaaggtcactgaggtcgctaagagggggcaggaggatgacgacgaggacgaggacgagtcgggagggagacgggtggcggagatcctgcagaggaagcagctcgaggagagcggcaggaagcggagggagattgccgcgaggtcagaaacaaattcccctcgagttatctccagaatggtagtttgtcagttgtactacgtatctgtttatgtgggagtttactgtatttacccgctccactaccattgagtaactcatttggggtttgcatgtgaccccagttcgtaatttcacaaatgaaggaacagaacctcttttggtttagggtagtgattggagtggagagtgctctttagctactggttaattccccttgaagcaaattacattacaaccctgtcttggggttgggagagggggctgcaaatcagtgcttagaataggaacaccatttgttggcccagggattaattaagggggtgtttagttccccatagaatacaaaatgcaaaatgccaactactttggagtgatgaaatgcaaaatgccaaaattttcagggtcatgtttagagttccatccaaaatgcagaatttattgccctcataagagcatcttgaggctctttttggggtttttttggcctcttgaggccaaaatccgaaatggagaatgactacctttttgccaaaaaatttgcatggtgtttagttccattatgcaaaataatggaccgaaacccaagttttttttggggaaaaaggggaactaaacaccccctggcggctgttcgaattcgattcctccagcattccttgctctgaggcccagcaactcgaactttcctaagcagggaggaaagatagaatcaagatctttctttattattgcattcctctagaactcgatgagaaaagaataggtagaacccagtttcgcacgattccgattcccagcctctcctctgcacttaatgcttgtattttgaaattaattatttgaagtgaaaaaaaataaaacaagttgtattaaagttttcctactcccacagaaagttctaacattttttgaagcatattttcatttatatatttttctaatgcaaaaaacaattttttatgtggaccggaatccagtctaacagccaaacagtttcacaaagtgattctgattcatcttttgaaacgtttctggagagaatctggatctgaaacgtttcaaatctggagccctaccaaacgaacattaagtgtcacttctgcatttatttatacaactcctatacatcaggcgccgagatctgtgatatttcaggtgatggcacagcaatgtcgagtggtggctggtaggggttaggtttttgggttttcacttttcaggctactgggtgattttggcttagaaagaagcagaaacttgtgggaggcaggtggactggtgaggcggggtgccgccagccagcagtgggcggtggactttgagagttactaatgtggcagtggggatgccgtggccacgtcgtgaggagaacagaaggggggggggggggttagctggaaaatgcttcagtttcatgtttgatattagaaaactagatgcttgtagtatagcaggtccctgctgattttttataataagagatagcttcaatacttgaggattactgaaatataccaggaaaccatagagtaataacctcaattcccacctagatgctaaggccttgtttagttcaccctgaaaaccaaaaagttttcaagattccccgtcacatcgaatcttgtggcacatgcatgaaacattaaatatagacgaaaacaaaaactaattacacagttcagctgtaaatcacgagatgaatcttttgatcctagttagtctatgattggataatatttgtcacaaacaaacgaaaatgctacagtaccgaaaacttttcacttttcggaactaaacaaggccggatgtgtttgtttttaatgcttgaaagtgccctcaaacataagtttttttgtcatattatttacaaaatgggcaatttagttagcatgaatctgtttgcatgatggggactaaggttcatctccacccctttctttggcgctgttggttgcattgagtcatattttagtccaggtgggatctgttttgctagtgtacataaatctgttgaaacttgaaacatagatgaaatgatactacattttgactgcttggataccttatgatatgattaatatattgaagtggaaggtgctgaagttgtcagtattgaatcagttatctgagatggaatatggttatggtctccactggcataacaatgatggccttattaaaagaatgccatgtcataacaattgaatcctttatgcattctataagcttttactaaacagccttattaaaagaataacatatctatttaagtttagcattgaaattcaatgtgtacagctgaccatagcaactttgtgtctggactagtgcaaattactaaactttgtgaaactgttgcagggtattaccaccgggccctcaggatggctttaagtttcttgtgaagcaccggcaacctgttactgctgttgctttatccaaggatagtgataagggattttcagcatcaaaagatggagtcattatgcattgggatgttgaaactgggaaatgtgagaagtatatatggccaagtgaaaatgtgttggtttcacatcatgctaaaccaccagtatcagctaaaagaagcaagcaagtgctggctttagctgccagttctgatggtcgttacttggcgagtggtggcttggaccgtcatatccatttatgggatgttaggtcacgggaacacatacaggtatgacacctattttggagttgtactttgcaagtttgagatatatttggaaggcagtttggttggatcaaatctacccatattctcgatgcactttgagcatcattcatcaatgttcataaatgccttgctagatatagtacatgctgaacatttcttatgaaattcagttgactcttggctatacacaatattgtttagaaattgagttacatccaattttaatcataaattaaaaatggtgaaacaaaaccagatccaatgcttccaggcagtgttcaaaaaggcgtgattccgcagtcgcctaggcacgcttatgcgctaagcaatggggtaccgcatagcctaggggggtaggcggtacctatgcggcgcccgtcggctgtggtggctggacatgccattcctggtgttcctacaagcaaatccgccaaggtaaggatgctgagcggtgggggaggatgtgggaacatcaggggcaccggaggaggaggtgggaacagcgggggtggcgggggaggaggcatggatggtgggctgcttacacgcagagacagcaggcgcggcggtggagacggcagtcgggtggaagctagcggcggcggagatggaagggaggaggcaggcagaaagcagagtctttgagtcaactagataaggtggatgcgtgcacctaggaaggcaaggtgggctgggcttttttggggctttttgtctaactttcagtccacaatcccctgttttttcttttatttaaggtaacatatgtatatgggtagaatgcctagaaacttcctcgacaacgcccaggcgtgcctaggcacacttaggctctaggcggtaggtcaccgcctggcgcctggcgcctttttgaacattgcttccaggttagaatataatcagtgtaaatataagagaaattttgtaatataaaagaaactgtaggtatagttaagctgatatgctttctgagccaatagttatgctgaacttcttctggagccagtctacctagcttgctaactctgttcaataattcaattatttgtttttgcaggcatttagcggccatcggggaccaatatcatgtctttcttttgcaccggactcttcagagctattctctggttcttttgaccgttcaataatgcagtggaatgcagaggatagaacatacatgaactgtttatatgggcatcagaatgaaatcttgacaatggatgcacttagcaaagacaggattctaactgtagcacgggaccgtacgatgcacctttggaaggtaatgttgtaactaagtacatacgtgattcgtgtttgtcacccagctgtcatagagtgcagaagattttcttccggtgaactggatcgtgtttgtcacccagctgtcatagagtgcagaagattttcttccggtgaactggatgaaattatctaataaaggatcactagctttatatggaaaatctggtttccataccactatggtacccattgccgaaagaccacttagccctctagttcacagcagtaacactggtgccatcctgtatgacctgccttccattttccttcggttttcagagactacatgcttttagttagaccaatcactactggatgctggcataaatgctacagttttgctgaggtttttattattttttataaattttgattattcgcaagttttgctgaggattcacctaaagcaatgccacatgcactattcttgtgaaagcaatgacaaaaatagttcatgagaagtaatgtagattctctactattagctacatggcattgccttcatactgagtaatttgaagctgtgctttgtttgtgtatgatgcaaacctctagttttttttttttaaaaaaagttatttaggatctaggaaacctctaggttaactactatatggcagactgtggtttgtaggagcatccttcagttagttatttatcatttaataaggggatgtgatgggttcatgttgtagatactgtagtttactctgtcaattgaagtctctttgttcttggacagattccagaagagtcgcagttagtgttccgtgctcctgctgccgcatctttagagagttgctgctttattgatgacaaggaatttttgtctggatctgatgatggaagcattgagctttggagcataatgaggaaaaagcctattctcataataaaaaatgctcatgcagtatcatgtactaaccttaattcagttgacaatgatgatgagtcacctaaaggtaagatggcatcccctttatgtttggaacgtgggaaaaatcccggttgctgcgtttttcctgtgaattgaactgattcctgtgaaattcctgtgttcactagtctgttttcttttcatcatcttttcaattattgttaagacggctttcagtttagtagcactttgcatcatggtactatacttgtaccttatatttgtggaatccttaatgctttatatatcatgtttcaatgcagaaaatggaatacataaacctgaaaatgtgccatccgcagcccagtcatgggttggtactgttgctgcaagaagaggttctgaccttgctgcatcaggagcaggaaatggtttagttcgtctctgggctgtcaaacctgattccaagggagtcgagccattattcgatttgaaactggtatgctactcttgttactcgattcattttgctgaatgtagtcctgaatattatatccatcatagattaagtgatcaatgcattttcatcttgctatctattgttgagacttgacatgtacatgtgctcaattaaaggacattaatgggatttcttaaatcagtctaggtcctttggtagtttctaagtcgatcatattcgctccagttacaaataagtgatgttctggacaattagacacagacatgatctccagaacacaattttttgaccactaatgtttgctacagtatgtttgtaacacatggcatacatatactatcatgtaaactaattttcaacaggaatcttgtatcatttcaatatcctaactaatacaaaaaaacataatttctaataaaagtttgaaacggttgacttaagataaccccaaaacatcatttatttgtgaatggagggagtagaagtaagtagttgttgctttggaatgaccagggatttatttgtgaatggaaggagtagaaggtaagtagttgctgctttggaatgtccaggggcatatatgttctctgctgactgtgcagataaactatttcaaggtgttcattaattggaagtctttagagtgtaattctgaatcagacattcttcaaatgtacaatgtattgtcaactctatctccttaagaaatctaatttgtatctattgattcttttaatactttgggtaccttagcaaactttagcctgtatagctatttgtcggagtccatattatggttcatttgggttggctacaatctgtaaataagggagtggaaaatatagagttttagatggttactccacctggcctattatacaagctaaaccagtcttttgtgttaagcatgtatgcagatttggtgccactttctcatttttccccttatttattttactatccatagcatcgcctactgatctcataaatttcagaaacactcaatagatggcgttcgcatcattttcttttatggattcttcaagtttaaccttgtgtgcttgatcaaatacaccaaaccaccagattgaaatcctgaccattgtgtcgctgccaccactgtacttaatcaggctttcgatcttagtttttttgtttcttgtttcttgtttttttttttcgcctgagctccgtgtttttggctttgcgtttgaatctgtggctgttgttgtgattctaattcgtgggggttaaagaagcaattgtctttgagagaactggatggcttctagctcatgacatctcagttccgttgcgggcgtagagaaaatcaaaattctctctgctatgtcccatccttcacatcgtgtcctattgtgagatggcagatgagttcttgaacaaatctttgtctttccgatttcttttttcaatgagcagagccgtggtttcgtttccagggcgtgccattgacaatcccagacaagcttctcatctgaaacagacaaggcctagactctttggagccgcttgtcaatttatctatctgcctcttcgatctgctttgaggtggacccatgtggctccacatattcttcgatctgcatgcctactgctctgtttctgacttctctgtgtgctcaaaggctcaaagctgagtgttgatttgcatacatggccttcataatcccagattaactcgcttagctgttcttctgattcatgggaggccaagatcgatgttccctggccatgttttcagatcggacgactaatcgcgattaatcgtgattagtcgtccttatcgtaactgcgtgcttgataagtttcgtcgattcgatcaggtcgatcagaaaccttatcgtccgattagatgcgattagtcacgattagtcgtccgataagtgtagcaggacgataagttgggccagtacaagaatattgtatttaggcctgtaggaagaattaggcccaccttaagccagccaattagggtaagaaaagaacaagagtgagtgagtgagtgtccaggaggcaggagctcatgtttgtggccaaatcaggcatcagcaagctggaattacatgtaagtggccaaatcaccatgataatgattcattatgccatgaattcatatatttacatcatatatatatatatagtatatacatggtcgatcaggttatctaggcataaggacgactaaatgtccgatcagcccgatcagaccgactaatcgaccctgatcgacgactaatcgcgattagtcgtctgatcggtggtcaaacaactagattcgataatacgatctgaaaacatggttccctgggagtttcgctgatagcaccttcttcattggggaggtgctttattagtaactcaccacacaaacactgctttgttcatatgtttttggcgggtgattgttgtattcctctgtatctgcaattttttcagtcgaacaaatttttctttgctgttcactgtaatgcccacaagcgctttaaactgaagatcaagggaccatgcagctgatgatgttactaattgatgatggcaatgaaacgatgaactaaaaaacttgcaaaaagaaacacctagcaaatggatagattgtactctatcaagctttggagtccccttagataggtttcactaagtacattttttattcatccttcagttctgttcactagcacttttgtcagtccttactttctgggaatagatatgctggaatagatatgcttgcccactgcagtgatatagtccacagtgactatcatattttataagtcagagcacaactgaaaataatcatttgtagctcgctaaacacttaataaaaaaattgaacttttttcagtctgtacaacccagctgctttagaaatcagcccctacctagtgaaagaaattcataagcgctttccgctatcacctctgtagtcttctttctcccttgcttttccatgacaatgttgggtatgtcttctctctctcctgcttttccataacaatgtgagtatttgagatactattctccaacatggtatcttttccatctcgtattaagcttaggctcgggtaaatctgcaagctgtcagatgtgttttccaacatatactggctttgttgtcataatctttcatcctgtgtattcctggaagttcatggaatcactcatttagtagaagattaaaaaaaatgcactgtcagagccatgaaatcatttcaggtcaaattgcgggtcacaatgtaatttctgagccatgcgctgatatatgaacccttgcctgtggtttcgggctggataccaatttgtttttgtttgatttgtgataagttttcccaaggagaggtcagacatttcgtctggaatttgctcaagacagatactgcacctgctgcatgttctgctgattagctgtcccaaacccataccatgcaggatctactgtcatagttttctgcaattgttaattaaaatgcattcctttgctcaatttaatttttcattctagcagtgtaaaagaatgttgaacattgtacttttccttgctgtgtcactgatatatgttttttttctcactccaggatggatttgttaattctctggccatagcaaaatctggacgttttattgttgctggtgttggccaggtcagtatgtcatgctccctttgttactactgctcagatactttgtagacgagatcctttatattctactaagctctacaagctgaaccatgtggaaggacacaatttcttttcatccttttgcaccacaacactctgatctttgtgaatgttggaatctcaagctcagtactaaatttctgttccatcaggagcctcgcctgggaagatggggacgagttcgatcggcccaaaatggagttgcaattcacccaatccgactaaaagatgagaaagaggatttgtagagtagatgattgatgtcttgccccttagatgttgtagaaggtcacacaagcattacagtggaacgtccatccatccatcctgcacttttgcacccacgacacagaagaaaattcgtttcgagaagctaaatggatacctgcaagcaatgcgaatttggagggtgctacagatgatttttgaggtccggaggtgtgtttacatgtggcaagagaattcgaggcaattttgtaacttcaactgccttccgaagcgacaaaagaattaatttatgaaacaagaggatccatgtattttttgttccccgatgttctagttgactgcattcttttttttcttctttctattagctagttgccgccatacgcttgttgtaggggatttctccttgatttgattgaatgcagtgcacacaaagagtttcatctagctgcatggcgtttataagcaacaaaatgttgcggttttattagtctggtggatctaagatgggctgtgattatgtctgcatcaaagagagtaaggattaggcccataaaagtcaatagggctcggtcttttgtgttatccctgaggcccgtatagacctattttgtatatatataggtttagagggtgtttagtttctcttccatttaaaaaaaaatagattaaatacattgcaaaatttttggcaaaaaatagttatttttcattttggattttggtctgaagaggcaaaaaaaaaagtccaaaagagcctcatgggaacaataaattctatattttcga

SEQ ID NO: 3865 - DNA, 8617 bp, Sorghum bicolor
tgagctattttcagtttgtggcttaatgcaatagcgacactgagagcctatttggttagttaagagcctagaaattagtcaagcgctgcaatcaaacgtcccagaataaggttcttttaagtgatagtataataaggttttcataacagaaagtaaaaggaaacataccactagtttttattaggtgcaaaactatatatataacataataagtggacggacctttcatacaaaccttcaacgtaatcactgatcgtgtggtgtggttctaccttctacggttctaacgttctagaatacgttggagaaacgtcaagacctattagcgttgtagcgttattatccactccatccgtactactcgttggatgacacacatgacacacgagcgttgacatatatgatactccctccgtcccaaattataagtcattccaagaatcttggagagtcaaagtttttcaagtttgaccaaatttatatagcaaaataataatatttttggtaccaactaagtatcattagattctttgttagttatattttcatagtgtacctatttcatgacataaatctttatatttctctctatatttttagtcaaacttgaaaatgctttgactctccaagattcttggaatgacttataatttggaacggagggagtacatactaatacggaatggttttagtagtcatagccttacggagcaagtaaaagacagatttttttttgttataatatacggagtatactatcaattatcaaccgaaggaaataacacgtcaagaaaaacgtccaaaacgaccaagcggtgtagtaaacgcggccaggattccaaattaatttgatccgaatatacctttggccttgcctctttgccgccacgaaatgccattgttctgcgtccggtcagcaaagtcagcatgcgaatatgttgtcgtagaaataatgccatgaatctggtagagaaaaaaaatcttggccggcatctgatctgtagagggtggtgaaagtaattgttttgtataaaaaatcataaatatatatatataagttttacaaaaaatggtaattcttttgtgggcgaagaacaatgttcaataaagcagtttaattggtctctctttgaacagggccactacaaatttttctaaattagagaggaggtatgaaaggaagaatcagaatcggaataaggagaaactaccctagaggtgattttgatctctagagcatatacaaaataagaatcatattgcctttgactgattggcagagtttctagcgattctttagagaatgggaactgattctcatattcaaaccgaccaaatttatttcattagattcttcatatgactttgaactagtaggtatcaaaatattcttaaagtatggttaaagttagttaaatttaatttaaaacgaaacgaaagtgagctatatataatttagaacacatggacagttctaaacatgttgggcgttcaactcgtgtctcgtcctggggatttatacaaaggtcttgtttactaaaaaattttgcaaaaaaaattcagattccttatcacatcaaaccttacggcgtatgcataaaatattaaatatagataaaaataataactaattgcatagtttgtctgtaatttgtgatataaatcttttaagcctagttaatctataattggacaatatttgtcaaatactccatccggtctattttatcaggtttgaatcttgatatgcgtgtacgtcagataaaatggacctgaagaagtataaacaaaagtgctacgggtctatttcgtaaatttttttattaaacaaggccaaatttattcaggtattcaaaccaaagaggaatcggtcacggattcaaaggatcacgatcgcgcaatgctcccatccgaatcccgaaatccgaccgtctcacgaatctcgaggcgaggtgttcggccacccctattatcttgctcggctcttcttctccctttccagtttccactctccccgcgggcgctcgccgccgccttcgagcttggagcggagccacgcatgccaatggccgtctccactgttaccgccacccatctcgctccctcttttccagcccgtagtcgccggagacgcgccgcgccccgcgccgcggcaggcggcctaacggcgcgcgcacggcggctgcgctgcgagttcgtcgccggcggtgggaacggggcgctctccggagaggacgaccctcgcctcgtcgaccgcgtaagaatatatcctcttacttctctattgctcccctcttcggcttgtcctccctttcttcttgtcctctggcatttcgtcgaacgagtgagacgcagtccgtgagaaccgctctttgtcgtcttcgcgccgacgtatgaggtccagaactcagagtgcggcgcggtgtttgctgcggtggagtattgttagtgttcttatcccttgagttgtcactgcattgcatctagcacacggtgtgcgaagtggcgctccagctgcggtgaacttctgttgctacgcttgtcaataggaacggaaggcatcactgtgctatgcttatagcctgcgcttgtatatcaaatgaatcgcatgggaaatttaacaagcttgaccccctactgcatgcatcaggggcggacttgtcttactgttaagtatttggtttctatcctagtaatctatcggattaattggtcctgttgttatgccattgaccagttgaactaaaaataattatgagatatgaacttcaaaagtttcaaatagagacaaacatgtatgaatgtcttcagtgtgattgggagaatgtatgaacgtcttcagtgtgattgggagaagcattccgttgcactacacaccattcatctaataaactactacagaggaatttaatccctcaagtcaatgcaaggactcctgtgaactgcagcagtccaggtgaaacaaaatggcatgtttgcctattagtacaatatatatctatgatcttatctgacatgtaagaggaaggagaggtgatagagcagtgtgctatgcctcatttttggtgagataaaaaggagggagggtttggattttcattatgagatgagtcccacattggagtaggagaagctaaattaaatccatatcaacatcgtgatccccaattttttactcgagtctgttttgctgctatgtactcaaaatgcacaaaatcagttgctgtactattgctagtcacagacatactggaactgtgatgacataatgtgaatcaagtgagatgctgcaacccataggttttgatctgatcaggaacactagtagtctttatcctcaataagacaactctttacttcgatccacttaggttgaaaagttgacaatactgctgtcagatatacttgcattggtgtttcgtttggatgtttattcctgcttttcttgagcacagctatcttgaattggaaaggcatttgggtatctcacacttcttcaccttcttttaatggatgacatatctttgtgaaatagtattgtaccttttgaatagtgatgtattacattattggcttgttgctttggtttgtcattaagagatatttattcacaatttcatctgcagcaaaaagctcttgatgcagctatgaatgacataaacagctcttttggaaaaggaagtgttacaagattaggcagtgctggtggtgcttttgtgtatgtttgtagtttcttgatttcttcactgaaaagttcattagtattcacatttgttctgtatttctattattctgattattactgtctccaacccagtgagacattcccaagtggttgtctaacactagattttgctctgggcggtggccttccaaaaggaagagtagtggaggtaatttcttattttatgctttctgcaataatacagctagtgtagttcattcattctttgatctaagcacattcaggtcaaaccatgatttgtacaaaacactttagtggtcttacctgtattttggattttgatctcctatctttaaattatttcatttgtaaaaccttgcaggtatatggtccagagagcagtggaaagactaccctggctttgcatgcaatagctgaagtacaggtttgtgatattattattattagtaatgactactttttatgatctagcattaaacaattatggcaataaaagttgttcaatatccaatatgcagaagctcggaggaaatgccatgcttgtcgatgcagagcatgcttttgatccagcttattcaaaagctcttggggtagatattgaaaatctgattgtctgccagcctgacaatggagagatggcactagaaagtaatccatttcacacatacagggcttaatgcttctttgcataatattgatcctccctctactttagtattactcatttactctacagattttatctagtaaaggactcatagagtcatattcatcctttttagtttttgtctcaattcatatattgttccactcaagtttgatattcatcctctaggatcctatatctaaatttaacatatgagagtcctgcagagatggcttgatagtgcaataatttttcttccctaaataagcctcattcagttgaggtttgtataaactttcttttggcagatgtctgccatggcccatgaaggtttactttgtcattttgagatggtattagttgcagcctccgccctaaaaaatagtgcaattcttggtttggactaagtcagattttcttaagtttgactaagtttatagaaaatagtatgaacatttattttccaaataggtttactatgaaaatatattccatgattaatctaatgatacttattcggtaccggacatattagtattttttgtatagatttagtcaaacttgagattgattgacttagggaaaagctagaattgaactctttttgggatggagggtggagatttagaaactgcaaatttagtgattatcatctgatatgaatacatattaatatttattttctaggctgtccagtgatctggacatgcttttgtattttcacatataatttaccattttgtactcatttacaaccctacttgtagtgttgaaattttgccagcaattggtatttcttctcaaataaaatgatagcacatactggattttgagaagtataagtatttttttcctcgaaaaacgcagttgatctgcatctcattgtattaagaagaaagacggtataagaacccaacacttacaagacacccaaacacaactcactcacacaacacaaactacagcagccaaaacacagacgcacctaagctggctgcaaaacgacccacacagacccaaagcactaatctcctgggagatgggctgacaagagggaaaggcctcgagctcctgccgtggtccacaaccggcgctcctccccagccactactaaattcccagcaacactaggagccgctccataaaaaacacagctattatgatggttccaaagaatccaggccccccagaatgattatggaattaaccccttgccttaccatattagaagtagcattactagctgtctcccaccaatcaaggaaggagttttcagtaggttgtggcgacaaggcccggagaccgacctgccgcagcaaaataaaccaaaactccctagcgaaaacacattcaaccaggagatggttgattgattcctcctcttggacacaaagtggacagcattctgggttaagcctgtacatgctgtgttgttttattttgtttgtgggcttgtatgtcagtacaatttcttccttcatttgttaaccttgaagatcactctatcactatatatttagatctttgtttagatgaaaaaaatgctaacatattcttactgtgtatcagttgcggaccgtatgtgcagatctggagcaatagatcttatctgtatcgattcggtgtcagcactcactccacgtgcagaaattgaagtatgcccctctcccattttttttcttttgcgctaattctgtatgaaatgctgcattggcaatgtaatttatctgtttttcagggtgagatagggatgcaacagatgggtctacaagctcgtttgatgagtcaagcattgagaaagatgtcagggaatgcctcaaaggctggctgtactcttatgttcttgaatcaaataagatacaaggtgtaataatactgaaacagttacattgactcccagctaattgcttatttccattttgttgattcatttgatggatttggtattcaacagattggagtgttctatggaaatcctgaagtcactagtggagggatagccttgaaattctttgcatctgtccgccttgagatacggcccattgggaagataaaatctgtgagatcaataaagtaaatttcatctatcctgaaagttgaggtgggaatgattgtttatggttgtttttcttttactaagcccaagggagatgaagatgttggtgtgaaggttcgggtcagagtgcagaagagtaaagtatgtccaaattttgtgtagttcttgctctgtacttatgattgacacttgtacagtaggcatgatatcctttttccccttctttacaaggtatctaggccctacaagcaagctgaatttgaaatcatttttggggagggtgttagtaagttggtaagtttataattttttagccttttgtcattgtatcatacactaaacaaaatattgggcaggggtgcgttcttgattgtgctgagctgatggatgtagttgcaaagaagggttcatggtatagttacaaagatataaggtatgccgggagctttagaagagtttaatcttcagtgaataattgagctttaaaaaatatatttcttatgggagctatctttacatgtcatttggttttgaaagcaatattactttgacaaatctttctttgttccattttcatatgttttttaacctatttgggctaattatatgagacccatggaaaggcctcaattccttttcttttaatactctttttttgtgcttacaatatataataataagataactcaagatctgagccttcttgatatttagttttccaagtaaaggatctaaaactattttaaaaattaaatgcagatgtgagttttttcccctcctttgctggacaaaagtagtgaccttctgttatcaatctgtcctgataattagataaagaacttctagttatcattaatagacgttctgatcatactgtatcagaattaaatccaaatattcagaaattgataccattgtttaaacaacagatattacttcgattcaaactagggagttactttgtccttgccagtatcattctactttaccttttgcctcattgcttaggtacttaggttggtaggagatcagtgttacagtagaattatcttcatgttttggtcaaaagattttctccatgtattgatgtagctttgatatgtgcgcttttttttttttgcttgaacaattgctcagattgggccaaggcagagaaaaggcactgcagtatctccgagagagcccaaccatctgcgatgagatagaaaaggtttgctggattttgcctgggctttctgcatgagcctgctacagttgacaagattcaatcaaatccatttttcgctgctttaaagcttcaaactagaggcttacatgtatatgttctttatgtgatctgatcatacaatctctttcaagcatatatttgtcttttacaggcttgtcataaaaatatgttataatgtcgatttttatcaggacttcttggattcaacactagagccatgctcacttttattgtttccttaatatcaatatgttacatataggaaaaattatttatagatatcaatcatctgatgaactgttagttttctttctatacttgtgggcactagtgtctttgttcatatcctattcctcagacatgcttgatgattgtgcaggtggttcgtgctatgataccagaaggatccagacatatgagcctactagctttcgggcagacatcatcaactgaagatgaacaagtgtacgatgagcaataatggcacacgacgaggttccaaagatgaacacttgtgaagccgtcaagcaccataattctgggcttgtcttagagataacagaagatctatcagaggtaatcaaccaatatgcaggcgtgtgggcgcttttggaggggagtttgactgatgtgttgtacgcgtgccaccactgactcactgagaatgatttaatttgtgtgggtatttagtgtaataaccaaggaactgatatttccagttaaatgaagctaatctttatctgcacatctgcatgtgttcaacctgacttgataatggtactatgagatctgtggagggcagatttgtaatattacaatgagctgtaaattcctctccaacgaaggatcaggtgcaaatgcttgccttaccaacggttttttattttttattttttggaattgccgtcgatgagcatgccaggcacctgctccatgctaatcccaaatctaaacgagtggagttctgtaaaaggccgctac

SEQ ID NO: 3866 - DNA, 14075 bp, Sorghum bicolor
ggttttgggctgtcataatgggcatagattgttttataatgggtatgtgatgtttactgaaaccgatactcttcataagcaagtggagggttattctttagcggatccagcctatcggggtttattattcattggattcgcattgttcatggatccaatactattcacaacatgacacgcacacactgtcactggatctgttattgttcaacacaacaggtacatcctatcgggttcactgttcactagattcgctaggattcgatgttgttcacaacatgatgggtatgcactattcactgatccgttactgctcaacatgacgggtacacactgttcgctgtggtatactccctccgtacctgttatagttgatgttctgaacaactcaagcgttttcacgaagcttaacattgtggccacgtggggtttctgaataactcaagcgttttcacgaagcttgacgttgtggccacgtggggtttctgctgaaatgcacgtgccgcctgtttacccctgcccacgtgaggttactgctagacctctttacccctgcccacgcacggctcgccacgctcagccacttgcctgcacgcgccacctgtttacccctgcccacgtggggttcctgttggacctctttacctctgcccacacacggcgcgccacgctcagccgctcgcctgcacgcgcccaatcgctcgcatgcacgcccaaccgtaggccccacacgctcgcattcaatgcgctcgtgtgctatgcacgcccaaccacaggccgctcgcattcaatgcactcgttgcctctgcgcactagcgagctgagctagtttattttctggtagctatatttattagggcagatatgaaaaactaatctctaattaatatcttcttggttactataatcatatcctaaacgtcaagaattatagatatggagggagtatagctttaaaggtaaaggatagataagttaaaataatgtaattgtgatccaaacatactagtttctaaggtgaattatcataatcaaaacaccagattaccgttaatcctataatccacttcaaatatgcttttttgttgattatgagcatttgtcacctgaagcaagaataatctagtatagtaatttaggagtccaaacattctaattattatagttcataatccatattataatctactcaatccaccccaaattgtaagtcgtttgactttttttaatatcaagtttgaccactcgtcttattcaaagttttgtacaaaatatcacttttttttgttgtgtattggtttattaataaaagttcttcaaaaatgacttaaaatttgactatatttgcacaaattttttgaataagacgagtggtcaaacttagagtaaaaaaaatcaaacgacttacaatttggcatggagagagtaacttttatccaacggggcctacagcaggaatgacacatctcgtgtctaccatccaaactccctcgaaataggggtcgatctattctcagaaccaaacacgtgataaatttgcaatatatttggtgataggaaatagtaataaaaaagtacaaccttatgaacttttttttacgtcatgcattaaatgaatttttttaatcgatatgggtagcgctacacgagggagaataatttatgagtttagaggctgaaataacacacaatataaaacaagtgtgagaatgtaaactgtcgatttacaagtttagataacacgggctaacatggactttatcgataatataatcccgtctactaccggcaaaaagaaaaccttcagccttcaggaccgccgaccgatcgcctcgcagccggttccggttccaccgcaagtccccaccccgccccgctcgtctcccccggcgccagtgccgccggtaaaaccgtaaaaatggaaaccccagtaatactccgtaaaccgcagcacgcacgcaactaccagtagtacgaagaaaaaatgatttgactgattaatctcttcccttccccgtctcctgcccagccaccgtcacgcccaccaccaacctatccccccgccccaccgcgtcacgcctcacgcgccccccacctcctcagatcggcggcgagccggggggcggaggagagctcgaggcgtcatggcgaagtcgagcgcggacgacgccgagctgcggcgcgcgtgcgccgcggccgtggcggcgtcgggcgcgcgcggagaggacgtggccttctccatccgcgtcgccaagggccgcggcatcttcgagaagctcggcaggctcgccaagccccgcgtcctcgcgctcaccggtcagcgcccccccacctcagccctctcttctcctcacttctgcctccgcttcgatttgctgtgctgcgctcgctgcgagcgaggggtgggcttgctgagcgcctgagcctgagcaccaagttgggtagcttggggcggattccgtgcctgcctcagaggattgtgccgagttcattggtgacttgctgctgaatcgccattagcacgactcttgcccggagggtcgtgatctgggccgcctggatctccacgagtccaagtgttgctcgttatgctgtttattcactcttgttgctggagatccgtgttgcttatctcaagctacttggcgctagctgtaaaccacgaagagcggcctacattcaccacacctggatccactttgcatagtttaagtgcacacaacttgcctattagctgttacctcgcaaagctctagatcaagaaagtacaaatgagggaacccaaacttcacacattgatcgactataacaactaaggcgcagagaagatgagcaattgctaactgccaaacttgatgtgctggacctgtttgataagtcattctgaggttagctggagcctggagctaccatgactggtcagagctgatgatgtacagttctagttttacatactgagaatgacactgttatgagagagcccagcatataatctagctcgaaaagtagcctgcattcaccacacctggatccactatgcatagtttaagtgcacagaagttgcctattattagccgttacctcacaaagctctagatcaagaaagtgcaaatgagggaacacaaactgtacacattgaccgactattacaactaaggagcacagaagatgagcaatcgctaactgccaaagttggtgtgctggacctgcttgatatgcccttcttaggttagctggagctaccacagttggccagaggggatatacagttccagcttacatgctgagaatgacgttatgagagagctcagcatatgagccgaaactgttggcttcgaggattgcaacaacaatgatttatttgttcagataacagctgttctctgtactgactgactactgaggcattgtttgctgtatttgcatattcatacgagtagatccctagcttagccaggattttttttggatgaatgaaacagtaatctgtatgcagttgtcattcacttgattgtttgaagagaaattgagcttaacgatgtagtaccagagtctaattggagtgagttgcctcttgaagaggatccctgattatgcttcggtcattatatctgcccaatacatgatttggtttactttgtatttattaccgttgccagtggcagtttgcttatatttctgttcagtagctatagctttggtggcatatgataggcatctattaataaatatgtcactatgtgtttgaaaacatagggtagtaactgtgttagtgtagaaggtatatgcttgcaacatccgctgaacaattttagcttcatgcagttaaacaatcatcaagaggcgaggcaaacaaagcttttctccgagtattaaagtattcatctggggcagtgcttgaggtttgttttctgtactgacaatcttgctatctaatagttgtccagtacatcacaggaatagggttatcttgtttggtgccttaagctttcatgagggtatagaagctgttgttgaaagatggaacactgtttgatcactctgtatttaaattgcatgcatgattatatatactattgtcttctgttttcaatcactcgcggttgattgcatgaacactacctcaagctagcattgcgtattgcactaccccttcatcaataaaatactgtactagtttttccccctcttgctcttggtgaaggttactgcttactttgctacgaaaaacttagtcttctcctgtttttttccccttctatttcagccagccaaactttacaagctgaaacatctaacaaaggttgaggttatttctaatgacccaagtggttgtacatttgttctggtatgtactttgatctcctatgcaatgcttcttgtgttgtatttttgaagaaaacatcggttatatccattactgactctttatgttttgtgtctggactgcagggatttgataaccttaggagtcagagtgttgccccgccacaatggacgatgcgtaacatcgatgacaggttgttgcctataaagtttgctgtgtggtattagactctgctagactgctacttttatccatctccttttgtctcctctgcttcacatcacattctttactatatattttgcagaaaccgtctacttttttgtattctgaacatgtgcaaggagatactcagttatcttccgaaagttgttggaattgatattgtggagctagctctttgggcaaaggtgcatattaaaaccttttctatccattgtgagcatgccttttttgtgcccttgacctctctctctccctctcacacacactctctctctctcttcattgcttctaataaatagaatgcctatgttacacagtgatttcttggaactaatttgacagaaactgtctatctacagtactttaaaattgagattatgtttagttcctacaagctgatgatatatagtatgtacagtttaattattgattaagaaagtattgttgagaattttcaatcaaattagtttaagcaccactaaagcaacatgcaaagttctgcaagatttccaaatgaagtccacaatacatcaaacaccaattttttctcgaaggacgcaggagagctgtgtgtcattttatttagaaaagatgtacaatggagagacaaagccttctcctacaagcccaatgtagttacatttgtgccaccacatttaaaatttgagttttaaactgatttatatttggagaaagaaaggagacatctttgagggtctctctacatgttgtttgcttggagtcaaactttttgaatttgaatgtggacatcttctggaagatcaagattgtatgttagaaaaatgatatgagtaaatttgtcttgaaaattagtctcacaataccatattttttttttctgttttgtgtaaatagattgtaatatatactgctgatcaaagttatgttttgaagacctggtcactttttttttatttgaggaatacaagttaaagaaaatagagagatacagtgttagagtacgtaagggacctagtgggactgggctggtgccatagcccattagtgttagggttaattagagataagggtcgcttgcttaggggtaagtaagccttgcttgtaagtcaagtaaacctctctatgtaaggagaggagatgcatcaatctaatcaagcaagagattagaaggaaatcccttctctcttgccggccgtgggcagagccccgcggccggtgttcctagcgcccaaaaccctagcctcctctctcgctctcacagccgccttcctgtgaacagtacccgcgggcactgtagcacaggtactgttccgccacagccgccgctccttcaatcccaatccatctcccttgatccccagcagccacataacatacagagttaaagtttgcacttcgcaaatccgacattaagaaaaggaagtactatttatagcaactttctcgtttttgtaattcctagctcatttttagtttaagctttaaacattaaggcctgatatgctctacagatatttcatttttggggcaatatttcacatagatttggtgctcactaatttgatcttcacgttttcatcaaaatgatggttttgcttgatatgccccttgatgtgttgctgtctggatttttttctaatgaacctgaatccttttcaggaaaacacactgaccatagataatcaattgagtacccaagatggtcaagaaacatcagttgctactcagaccgagaggaaagtaacagtaactgttgaaaatgatctcgtgtcccaagcaaaggaggaggaagaagacatggaggcacttcttgacacgtaagcacaagctatatcttatcgtacgtagattttgccccctaattattgcaaaaatactaccaaaactgcatacagcaactatttcttagcctattagttcttttagcagtacacctataccattctagtagttcattttgtagttttcaaactttttatatgccatttttttaataactctaggagttcatccctgacctgttgagattaaacctagtcctggtctgtgttttccatgttaacaccagttgaaacatcagggaactcagttggtcatgtgccccatcaatttgatctcatggggcaacaaccgataactttaagttcaacattacgtgcacttgaaggaccagactagactcgtacaaaatctcactgcccaaagacccctttgcctttccaatgttcccacatgtaattaatttgcatatcacttgcatctgaccttactattgctgaaatgcttttggtagcactacaagcttatagtgtaagtgatgcaggtatgttatgggcataggtgaagcagatgcgttctctgagagattgaagcaggagcttgtggcattggaggccgcaaatgtatatcaattactggaaagtgagcctttaatagaagaggtattgcttttatcttcctttgcagtgcagcattaaccttttgtgcactgatgataatgatatagtacagcatctgactgccattacacatctcacatttattctggagtgaatgttttttctttttttggtaatggaagcttatccattgactgatctagttgcttggattttcaggtcttgcagggtctggatgctgctagtgcaactgtagatgatatggatgagtggttacggattttcaacctgaagctgaggcatatgagagaagatattgcatcggtatgtttgaggagttctatttgttagctgcctgatttgaagtggacatatacttcttctctagtttattttatttacttgttagaagcatagctatgaaaagttgaaaaccagacagactaaaaaccaggattagtgtgtgcccaatcaggtatgtgaagtttactgataagggaaaagcagtgggatatactccctccattccaaattgtaagttgttctggcttttctagatatatagcttttactatgtatcttgacataacctatatctaggtgcatagcaacagctatgtatttcaaaaagtcagaacaacttacagtttggagttgaggtagtagatgttaattgaaaatattcctctgtgcctccatagatcaaaccccattatttgccagtcaaaacccaaaggatcttaccacccgtgctatgcttcacatatcatattatgctactgtgatgactacacatgcattcagaattgtagcccctctggcctgattgtctgactgacccttctgaggacatgtctggctggctttactagtttcagaaaaacttaagaaaaagacaacttaccaagctgagtaacactagcaacttttactagttctgtagttgtaactagcacctgaggtagaaggtcttttgaatcaactcaaatactcactcggaagctgaaaggccctgaacccttgcttgctagttatcatcagtttcagaattttggtaggattcttcctttgggtaaacgtggcctcttggacttgccattttgaaaaattaaatcttgtgcctgttttgtgatcctgcaatcaattgttagcagaagacattcttctagatgctgataagaaagaacttcacttaactggtccaatgctaactaattctgcagattgaatcacgtaacaacggcttggagatgcagtccgtaaataacaaaggacttatggaagagctagataaattgcttgagcgtctgcggattccacaggaggtatgatggagaggaataatgttcatatccttatattgaggtcttatatttatttatttatacccaattcagtttgcagcatcattaactggaggctcatttgaagagtcacggatgctgaaaaatgtcgaggcatgcgaatggttgacaggggccattcgtactcttgaagttcctaatttggacccatgctatgtcaacatgcgcgctgtgagctatctttatctttctcgttttctgctacaaatttacaatttactagtgcatggaattgatcatgcattcatgctaacattacagaatagttaacgttatagagttgtgacactgaacattgaataacattacaaaattgttaaaacttgttttgtaaaggcatccacctgtatcggttaaggaacaaattttaagagcttctaatagtgttgtatttcattacatagagccactatgcttaaaatgctttggttgtcaccgtttccttgataaaccctatttaagtttttctctgtggtagcttaaagttgagaactgtacatctctgataaaatacttttgtataacatattttcaggttagagaaaaaaaggcagaactggagaaactgaaaacaacttttgttcgacgagcatcagagtttttgcggaactacttctccagcttggtagacttcatgattagtgacaaaagctacttttcacaggtttcttcatagctccatttttcaaagcaaatatttcctttcccatttgagatgacctacagagttcacttttaactgaaagcagcgaggacaattgaagcggcctgatcatgcagaccttaggtataaatgcaggacatatgcccgacttctgcagcacttaaaggtaataattgccttgatcttgccagggatctgcctagatagtacatattttactccattgccacatttatcatctcttgctgctaatttactgcagagtctggacaagagctgcttaggtcccttaaggaaggcatactgccattcccttaatttgctactacgacgagaggtcagatatggataatggaatgtttttttaatatgataccatagatttcacttcttgctgtttatctgtttcaaatatgttcattttgtttcatctcgcatttaacaattcaattttttgagtctgcttaatggataattagtttacaatccattttcctcctttatttgattttaaaggattcacaattttggaatttactgtttaatttggttcaggcacgtgaatttgccaatgaacttcgtgcaagtacaaaagcacccaagaatcctgctgtttggcttgaaggttctggcggctctggtcataatggaagcagtgctgatacttcaacagtctcagatgcatactcaaagatgcttacgatatttatcccacttcttgtggatgaggttgctcctttcctttcattaatgtagtgactatctttgtttttactcgatagacaaactaatagctaattagctattacctttgcagagttccttttttgcacattttatgtgctttgaagtacctgcacttgttccagctggttctcctaatgctaataagagcaaatctggaggaaatgacgccgatgatgatttgggtcttatggatccagatggcaacgatctgaaacctggtatcttttcttgtacccactagtatgtgttgtgtggatgtaatgttaatgctctatttctgatgtgttgttatcctgtttccagatagtacctctgctgaactgggtacattgaatgaagctcttcaagaattactcgatggaatccaggtatatttcatgatatagaacactgcaaccctcgctcttccatactgacggaaagaagggtaaaagaagaattttttttgatatgacaaacatgaagtacttctgatttaaagtcaaatgtgcaatcttctgtttcttcatatctacattatagtgcagtactgcagcttccttcagtgactgaaatctttttccccttctattccaggaagacttctatgcggttgtagattgggcgtataaaattgaccccttgcgttgcatctcaatgcatgggattacagagcgctacctttctggacagaaagctgatgctgcaggatttgttcgcaaactacttgatgacttggaatcaagaatatcagtacagttcagccgggttagttcccttgttgagcctaagctgctcagtgtaactattcataacaggctggctttctgcccactgcttgtttagaactttatttcttctcttctttcagtttattgatgaagcatgccatcaaattgagcgtaatgaaagaaatgtgcggcaaactggaattctagcctacattccaaggtatttgtactggatggattagcactgtgatttatttgtaactccagcgtagtcgcctagtattatatttaataccaccccctgttctttttataaggcatattgggatttgaagaagtttttggaagtgtactttgaccatcaatttttgatataatgcctcattaattactacaaaatcagtgtcgtagtcgattgatataaactacataaactaagcatgcatatcattgactaagttggtaataaaaatttatgaagtttgacattttcaaatcctaatatgccttgtatataaacaaaggagggagtactttctgatacagaaatgctgattaaacattccatgcatgttggctcaccttttgtttattgtcttattaaatcctagtatggcattattattttttaaattttaattttgttacacttagaccgaattcctagaattattttggatttcattaagatacataatagctcataatattcataagagcatacattttaaacgttctcattggtactttgcaaaaccttctttaaatgttgtaacacattgcctatagcgttatattccctgtgaaaacaacagaggataaaattggcatgactcagcaggttctcacatatgttttgcctatgctcagctcttacccaaaaacataaaaactggcaataagcagcaagactccggtgctcttatccttggcagtggtgattatatgataaaagctcgcttcaagataacaagagcactatggagaaaattgtgcttattgcagggtgtactgtgacaagtttgttgtcttgagattcttttcagaagtagcaaacagagaccaatctgactgttctgtgtttcatatagatttgctgtccttgcatcacggatggaacagtatattcaagggcagtccagggatttaattgataaagcatacacaaagctagtgagtttcattcacttgcaatctggcacttgtttgcattcttggtatcacgtattttgcagatttagttcataaatttgtagtactgtatatgaacatatggcatgtggtatatactttggcttgtttcattgatgtttgcttgcctatcaacacttgtagactccattggctttataggtgccactgaaaggtgtctttagtgaacagattttactctgaaatatacacaagtatttacaaatttcttccattgcactaaatggtgtatgatagtttttttataccccaagttctttcagtccaatgggactgtaatttagattttagagatacatggcataatcttgccattagtcagtagtcaaggaagatttcgtcctaagattttgcattgttgcaagatttctattttacttggtagctgtatttttatagattattttttgtaagttgagtactttttttcaccatatagctaaattgctttccatattatggaataggttagcacaatgttcgcaactttggagaaaattgcacagagtgatcctaaaactgctgatattgtgctgattgagaattatgctgctttccagaacaggttatgtttcttctttcatctttccttaacttgggcttgtcctatggttgagaatatgatctttcacttatatatatccttgccttttcattctttaatgcataggtgggtctacaaaactaacaatatattgtgtttgatgcagtctttatgacttggctaatgttgtgccaacgcttgcaaagttctaccatcaagccagtgaatcatatgaactagcttgcactcgccatatcagctcactcatttatctcgtatgtaaacacattcaaatttcttgtgggtatattgtatttctctgacagatctaagatttcttttggacctttggcagcaatttgagaggttatttcaattcaaccggaaagttgaagaattgacatacaccattgctgctgaggaggtgagctaacttatattgtgattgggaagtgacaataaatgaactttgaatattcattttttattaagccattaacttttgttgtcaaaattctcagattccgtttcagctggggttgtcaaaaactgacctaaggagggtgctgaagtccagcttatctggggtaagtaaatctatatctgcttaccaaagtaagtggcagttgtcactctcgccctaatctgtgagcatatttccttatggggttgtcacttctcgccctaagctgtgagcatatttccttacggggttacagatttattgtcttctagtttcaaataaattacagcaatttaatgcccagattattttgtttgatcaagaggtgaccatgtgaactcactcaatgtaaaactctgcagattgataagtcgattggcgccatgtacaggaggttgcagaagacactgacgtctgatgagttgtttccttcgctgtgggacaagtgcaaggttagccacttgaccatcctgttattatggatgtttagttcagtattgtctccattgcttcagacgaacctataagttccatttaagctgattgtgtaatctgctcaacacttgcagaaggaatttctggacaaatatgagagctttgttcagatggtaacacggatatatgggaatgagccgatcatgtcggtcaacgaaatgaaagaagtccttgctagtttttagatacaagtacagcaccatgtattccattcatttcattgaattttgcactcacttgcgttaggccttttttggtttaatgtgtgtatgtgtatgtcctctgtatagaagtgaacgcggcatgctttccctaattatacgtgttctggtgtcacatcaagcctctgattgtacttgaacaggcactgctgcccgtagattgtggatcaataccaatgcatcccaaagtaccggaaagaatgtgttcatgttcacactgccattgtctaattgtcactcaattcacggttaaacaggttatgtcttgcccaagtttgttctgtttcacggttaaacaggttctgtcttgcccaagtttgttctgtttcctgtgttttgagggggtcattggtactttcggtgttcagctgaagtgcaagttatatcgggttcgtaatgtggccccatgtgttgcgggtttcccagcttcagaaacctgagcatctcgcgtcacgactcgcgaaacacgaacgcagaaataaaagggtagcatctcatagaaaaaaattgcatcaggcgaggaaagaagagcgagatgcagctcaacagtgcttgaaagtaatcagggttggtactctgctggagcacgaacctcatgatcaagagtcattattttactatcactgctgcatcaggctcgctctaccaaacaaatgaacaagcaaacagaaaatactcctcctatttcagattgagcaaacataatgaaacagatcgacgaa

SEQ ID NO: 3867 - DNA, 4156 bp, Sorghum bicolor
aaaaaacaaattggaagtaaacaagaccttagtaccatcgagtaaattgacttagagctagcacagttagaaaatttactttaatcattgaaggtgccccaacctttcattttctaccaacgatcgtaccattatcatcatgttcattttttccataaagaagttcttggaaaattgacaaacgaaggcaaacgagaaagaaaatcacaaaagatacacattgcacacgcatatagtctgctcgtttgtataaaaagttataactaatttaatatgagttgctaaataactaactaattcagccgataaacttaaaccaggtactgtagaccattttcctttgcagtgtgctcatcagacaccacgcatctttttgtagttccaatgctcttggggcgagggaaaggaaaacagtacctagcacacatgtcgttgcttccgctcgctacttgtctgcaaatgtcatgtcaagtattgatgcaaacgcatactctcccagtccaaaaatattaagttgtttaatatataaaatattaacattttaaatttatgatatcaatagacattagataacagttaaactttaaatttataaactcataagatgtgacatttttaaaacacagagtgtaggatacaattgtcaattattgtttgacatcgcaaataacttgattattaaagcgtatctataaagtactctccgttctaaattataagttaatttgacttttttttacatcagttttattatatatctaaatatgacgatatatttaaatatatagcaaagtttatggacaaaaaaatcaaaacgacttataatttaaaacggagtgataaggtttaaacacaatgcagaaataaactctgcaaataaaacaaacactcaaactttataatttcatggaatcaaaatatgctagcggatgatgccgaagcgctagacatgctcttctgttcaaccaagaagacgcaaagccacctcctaggtcacgctgttacgtgaatattggttgttcctttatgtaatatcaacttagaaaacttttgttaggatggtcgttagaagtgcgttgtgcgtttgtctaaactctttcttataatacaataatacacaaatcttttacgtatttgagaaaaaaatgtgtttcaaactttttataaacttatctaatggcctcaaataacaccattttgatcaaagtttaatacactttgatgagactacttctatgtaaatacatctatgtaaactagtgagtatagttcagttggctagattaattgcagactcgtgggagtgatcatactagtgttaagtcttgagtcatcatacgtactttcagttcaggcgggatgcattttttcttgtgaaaaaataattaaccttatcaaattcttctacaatctctatgaatttctctgttccaaagaggctatcaattaagtcaattcgtcaatgagttttacgcatgggtacgtgagcatttatgttaaaagaaactccaaattgggtttcactcggcgatggcaacttcacaattagaaaagtttttttctctcgaatctcgatcacgtaaaagacttgtgtgttttagtataaggtagaaaaatttacattcatatatggaatcatctcaaaccataggatggtcatgcattttttgaagaaaactattttcaaatcaaataactctacttcacagatgtataaaagaactggtattttggtcggccagcttccatctatttattagcctcataagtccccaaaggaagcatctcaatgctatctcaacgccaaggagaactgtagaacctgaagtctctgagctcccctgcttcctccattcagaacttccctctttgcttattctgatctcatctttcccttgctaatctctctgttcttctggatctatctatagagtatgaagaacctggacaagaactgcaggatttgcatggagtggcaagagcattactactggaaccacatggccgatgacaagaagcatttcttcaagcctatggtcggggacttcactgaaaccatggtgagaaagcatcccaagcttcccttgcatgcatgcgttgctctccatcttctgtgattgaatgtgctacaggaatcgacttccctgggttattttgggcctgcttgttggtatacgcagaggaatattgctgtgttcttcactaacggtgtattatttctgtacagaaaatcatatgctaatttcagtattcacatctcaataggcttagcttcatgcatttccattgcaatcttaacttaagcatgattagtcggtaaagaaaggaagaaatgtgtcacaaaacaaataaaaacatgattttgctgcagagcatacctgcaagatttgcaaataacttcaacggccacatctctgaggtcatcagtctgaagtccccaagtggcaagacatggagcatcggagtaggcagtgacaccgacgaagtagtcctccagtccggctggaaggagttcgtcagcgctcacagcatcgacgaaggagactgcatgctcttcaagtacaccggagtgtcgtccttcgacgtcctcgtgttcgactccagcggctgcgagaaaacatggccccatttcacccgcaacagcagccatggctacaagagaatcgagagctctgcaggccttgaagaaggaccccggcttggctgccgtcgattcaagggaggccatgactgcacctgcacgccgcagtcgctaccaagcgatggcgacgacgacgacgacgatgcgcatttggagctggcgcttcacaggagtaccagcaggagcatccccaaacggtgcaagcgcaagctttaccgtgacattggtaggtggtagatagagtatcagtatctgattgattgtgtagagctttgcagtatgccagtatcactgtgaaacgatctgatgatgtactgtacctgcagagcaagttcatggtgaagtaaaagatgatgatgatgaagatgatgttggtgatgcgaagacagggtactacttctgcaagaacgggccggtcagcgagtaccatctgaaggagcaggagaaggaggagatctcgagcatccgtgtgcctgtggagccgaggaacccggtgttcgtgcaggtgatgcacccgacccatgtccgcagcaccaaacccggcgtggtagtaagtaacctccctggctccctgctcccttctgaagcagattataatttataacaaggcaaaatattcagtgcaaaccacatcttcggtgtaatggtgaaaaaccatttgtgaaactatatttaagagttttcaaatatattaaactcgacctgctgattattctgtttgatctgtcagggcatttctgcagaattcgcggacaagtacctgggagcaacctcaagggacgtcatccttgagaaaggcggcagcaaggggaagtggcacgtccgctacaaccgcaacaggttcagccgtggcctcacgggccgcggctggagcgagttcgtcgccgacaatggcctcctcgcccacgacgtctgcctcttcgagctcatggtgatcaatggcaagctgcggcggccgacggtgaccgtgcacgtcctgcgcaaggtgcgcggcgcctttgtcctgctgccctgaagaccttgctcacgcatccggctcatgcttgcagttgcagcctaactgaagtctctggatgtgcgttgatgttgtctgtgtgtagtttggttactgtgctgacctgcaactacttgtcaataagcagctcccatcttatgctcagtaaattttcgtatgttgctttgatttgtcagtaacttctggtggagtgtttgatctagatagaaatttattgcattctacacagctggtttcatggaactcgttcagatgaagactttatctttctgtctggtaaaaatatatgtctggattgtgcaacactggattcaggagctcgtacatatgaccactatctttctggctgataaaaatccgtcccttgtggacactggtttcatgagctcgtagaaaggaacactttacacaagacaatggtaacaagcacgagcacgcagtggaatctcataacatgtcgaggcatcatgggaacaaggtaaaaatgaaacctttagttc

SEQ ID NO: 3868 - DNA, 5465 bp, Sorghum bicolor
ttccggcccacatcaaggttaggccggtaggttcgtcgaagagcgaaaaatgttggcctgctaaagcaaattcaagtagacctagtgaagcacgaaaccagtaacggatcaaatccatcttcctccatgggcacaacgcgacatgcctactttgatggggatgggtatggcctacatttctcatctcatattggctgctttagagtgcgacaaccatggttgtcaactattcacaagctcaagcgaaggtgaagagcaaggggattcaccatgactccaaggcatagcgagccctccaagcattgctacttcatacgcacccagcatatcatgtccacacctaatatgtgtggcatgaagtttaacttgcagtgcgttgccaactttctaggttcatcatgttgcttggatactatttcaatacaaatcattttctcagtgtactgaatatgaacaactgttatctttgtcgtacgtgaatactatatattatacagctcatagcatcgtaactctcaggtttgtcatggagcatagatgctgattttacccaccaatcatcttctctacacattaactgtcgacgtacgttacttttgtggcctttgaatcaggaaccttggatacccatgccattcaaagcggtacattgttgcctttgatagaaacgtcatgcgacaaataacgcattgccagctttttttcaatgtatcttggttgtatgggtattgtttctatctaacaataattgccatgcaaagagtaacacattgccagctttttcagtttaccctagttgtatggataccgtttctacccagcaatcatcaccttacaagttcgttggcatcgtggctttcaagttttattacggagcgtagatgtcaattatgtccaccaattcatcctcctagtacatttttttgttgacaaagcaatatcattgtgcaacctttgaatagctcaccttggatatgtgcacctttcaaagagttgtcacctaaggtagacatgctatgcgactagtagcacaacgccaacttcttgggtccattgtgatgtatggataccatttctatccttgaatcatcatctcgactgcatttgtggtcagcaattgttcatccattaaccatctatcttgtgcaaccaatgtcatcttggattcctggttttgccgtggagcatggacatcgattctctactcacatcatcatcccaacgcactgctcgacgacaattgccatccttgttgtgttcgtaacatccatcgatgacacaccatgcagctaatagcaccgtcgtttcttgtgcttacgatccatcaatcatcatctcacgccaaaggcacactaaactttccacctgaacttttcgttgttacgtacgtagagctttgtactccacatgttgctataacaagactatggcatctcacattttttgaactcctacatatatctaactaagggtgtggggggggggggaggtatgtaaataaccatgttcttggctggccttgtttagttcaccctgaaaaccaaaaagttttcaagattctccgtcacatcgaatcttttgacacatgcatgaaacattaaatatagacgaaaataaaaactaattgcacagtttatctgtaaattacgagacgaatcttttgatcctagttatttcataattggacaatatttgtcacaaacaaacgaaagtgctacagtagcgaaatccaaaatcttttcgcatctaaacgagccatgtcaaggagaagagaagaaagcccccaaaaccggcggctgacacggacaccaatggaacggtgaccggggagcacagctggggatggtgacgggaatccgcagccgacttgcggccgtataccaccccactcgctgtcacacttcccagcctgcaaaccccgcgccgagctcgcctgccccacctctttctcctctgcagcccacgcctccctataaattcgcaaccagtccccgccgtcgctctcattcctcggccacagcgcggccaccagacgcccaccaaagtttccgctattcgccaaaaggtccccggcgctgcccgccatggaaaggcggcacggcttcttcgcggcgctgcgggaggaggtggcgcgcgggctgtcgccggcgcgggcgcgccgcaagtcggaggccgcggacctggccgccgccgcgctcaggttcgccggagtggtcggcggcggcgagatgctggcgccgctcatggaggggcccgatccggagcccagcgacggggagagcggcggcgcctgccgaggcgccgcgcgcgggaggaaggaaggttggggccactgggtgcgcggccagttcgcgcgggccccgtcctccgcggtcgccgccgccggggccggcgcgctgcgcaacgacctcaggatgctcctcggcgtcctgggagcgccgctcgcgccggtccacgtctgcgccaccgagccgctcccgcacctcagcgtcaaggacactcccatcgtaagtgtttctcttgtcacgctgctccagatctctttttttttttttgcttgtttgcttgctccacgttccgttccaatcaactgttcgacgaaatgccggtgtcaagattttcatggacgtctgtatccgagtttccttgaattcatggtcctgtagactgtaaaaagttcgtcgccagtgattacagtgctgtaaaagagttgcttttgattcttaatgtctgcatgtttggtcttgggatctttgactgctctttaggactgggacatgactgattgtttttttttcaccgctgttgcctgttatgtgtttaattcagagatgtttgtatttactgttatatgcctgatctttaacaaaattgcgagtttccttgaatacggtcctgtagactgtaaaaagttcgttaccacttagcagtgattacagtgctgtaaaagggttgcttttggttcttaatgtctgcatgtttggtcttgggatctttgactgctctttaggactggtgtatattactgattgttttttttcaccgctgttgcctgctatgtaattcagagatgtttctatatactgttatgtgcctgatctataacaaatttgcgtttttttttctttggtaatgtgcttctccacaggagacctcatcggcgcagtacatcctgcagcaataccttgcggcctccggagggcacaagcttctggcctccctgcgcaactcctacgccatgggcaaggtgcgcatggtggccactgagttcgagaccggcggccgcctcaccaagaaccgcaatgctggacgcggcggcgagcctggccgcttcgtgctgtggcagatggcccctgagatgtggtacatcgagctggttgtcggtgggagcaaggtgcacgcagggtgcaatggcaagctcgtgtggcgccacacaccatggcttggtgcccattctgccacgggccctgttcgcccgcttcgccgttcccttcaggtatggctgttgctgcccatgtcccctgtttgtgtttttcacttctaattcagccacagtcccatagaagatggttcctgagtgatgttcttttacagggcttggatccattgatgacggcaagcatgtttgctcgtgcccggtgcattggtgagaggaaggtgaatggggaggattgcttcatcctgaagctgagcacagacactgagaccctcaaggcacgcagcgagggccatgcagagattatcaggcatgtcacgtttgggtacttcagccagaggactggtcttcttgcccacattgaggattcacatctgacccgaattcagtcagctgccggaggggacgcggtctactgggagactaccatcagctcgttcatggaggactaccgtccagtggatggtataatgatcgcgcattctgggcgctcggctgtgaccctgttcaggtttggtgaggttgccatgagccacaccaagactcggatggaggaggtgtggagcattgaagaggttgcattcaacgtcccagggctgtccatggactgcttcatcccgcccactgatatcaagtctggatctgttggtgaggccatggagcttactcatggcgagaggagccgggctggccctccccaaggctactgcgctaaagttgctgccctggagaaagcagaagaagataaagtggcatggggtggtggaaccgtactcgagagtcacaactgatctgcagtctgtttatacttggttctcacagtgcagctgctgaccctgttgaatctagtgtaggagagaaacaagtgaaagttgagaggatttggaggtttggtaaatccaaatgcctcctctgtataggaagaagcatgaggcattcacatggtcttgcatatgattgaagcggatctgtgtgaatcatcctttctgatcccatccagagacatggtagtaggtagccttgtttcctgcttcaggcttttcttcatttttttgtctgttcctagtgaaaggactgcttagggtatgttctccattccaaccgcatgagaaaggccattgtggttggttctcttttagcttatactaattggtcgctgccatcaatggggaagaagggtttcctcgccaggaactggcagtgttttggccgtcatggcatccgattggcggtggttcagtgtgttttgcttgctgatggattgagctgaagctaacctctcaggggaaaaagagagagagagagagagagagagagagagtagaacatctgaatggtttttacttgtgttttagtactgggtagaacctgttagatgtttgttagttagcagtgttttatttagtaagttatcttgttcctgaacctcccccctttgcatctctctatatttaatcatgagatgaaggatccactattgttaaacagatgatggatgtaatatattcccaaacatctttttgagtgtcatggattgaactgtgtttgcgattgtccttgtaaggaggaaatggaatgattcaggctttttcccagcgttgatgtgcaaacagtgtggtactggcaccatcaatgtggtttctctccaggcctgcttgcattttactactactgctttgttctgcagtatgctgggggaagtaatgatcccatcccaacccatcactgtgatggcacggctcccatgtggcgcttctattgcagtcccagtgtcaagcctcccaggtgctgcctgtgattagagtgacactgaggagcacggatgtacatcccctgtttattgtaatctgtaataatgagtaatggcccttgctttgcaaccataatggtgtgcggtgagcagagctccattccctgttccttgtttgaaaggcatggcatggcgctggcactggcaccttgccgcccattggcattgatggtgttgcacgccctgccttggtgccaggagtagttttattcgtagggc

SEQ ID NO: 3869 - DNA, 3282 bp, Sorghum bicolor
atttgcacccagatatgagaactgacttgtgatggttttgcacccacgattgtcttaaggggagggagtactaaatcctttagggagtgactcacacaacttgtgacttgtgagcacccagataccagaactgaaaaagactgaatgcaagttcagaatatgactaagtgcattatcaaatatttttaaatgcatccttatgttctgaaatagaagaggacccgtacctacatgtgtacaaattgaaaagctatactctttcataaaataaacacacaagaatcacatatcattattaataaataaaaaataaatgacgcacattgcatctaaaacataaagtattatacataggatatgatatcacaggatttatatttgataatcatttgatatttacctcttttagaactgccgggttgatatcagactgcaggaaacaatcctcagcgcaaggtttaacacagtttgtcttcagacttccttcggttctgaccttcatcaaggacacagcagtcggcgctgaagggtccatgcaaactgctcgagtttgaactccattgatgtttaagtgatacagcaaactttgaccgtaatcatcatcacctaattttcccatgaatgcaacccttccaccaatcgcggctaaagctagagcaacattgggtgaagaccctcctggcgccctcacaaatttatctggagaccaaaacatgtccttcattctatcatgaatctcatgatctatcaacctattggctggtcttccagaaggaataaaggagtatttcgcaggtccaaagcagcagactagcggaattaaatcgtctacttctccaatatcctcgtgtagcactaactctattttactttccagaacattggcagaattcagtagctgagtctgatcttctccttcattatagagcatcaaatctttgctccgatgctctccatcatcatcactagattcctctacagtcttaacttttctccttccccttttcttcggttccttggccttatccttctcctcctctgagcttgcagcaacagcagctgtaacagaacagagaaaatttgtgacttgctagttgctaaggttcccagtagagaaaaatcatgaaaactgcagcataaagaaacagaagtgctgcaaaaatgcaaccaatatgcacatttacctttcttgcggcctctcctcttaacttccttggtctctccagcagccgtttcttcagtgatgatttggtttccttctccttcgcctcccgatatttcagtggtggctttcttccttccacgtcttggggctctcttcttattagttgagctttcgccatcactttcatcgcttaaaccatccacagcatcttgggaagtccttgatgcaaaattagcagtgaggttaaggaacttcactgtagacttagtcacgtccttccccaaaatgtttgtcttgtaatgtaccaattgacccctgcgcacaacacaatccaaatgaattgaccaaacattattcaggtccgtgaatcacaggacatagccgcatttctaatcccagaatgaacaaaaagacaattcgggctcctaatctcctctatcccaccacagactgcagcgaccatacaggggggaaacggcgtgttccacgcgactcgcattgataattgggatgtacatcagcggattcactatgttgagagattacctgattcgatgataaggccgcagggagcaagtgaactgcggagggagaagaagagaagccatcaatggaggggagtagcaaaaatcccagtagcccctcctccagtcctcctgggtcactgctcagcaacgaggaacagcaaaacccctttggctgctggagaaaattactcatttgcccatagttctgaggataaggggtagaagcgtcataacatggaaggcgtattccatggattcgctttcttagtctgttcgcgtaacctccttgtttcttctccccggtcggcgcacggcgcagcgctgtcctcttctccggctgcgccgcctcaaatcaaatgaaatccggcctcctccgcacttctccgatccaagtttttccgctcgggaggtattgatctcttcttcgctgcccacgtcgaatgccactcgagttgtttcttctcacatccgtgctggcatttgcagtagaacccttgattcatatgctgcctgccatcatttttttttcacattgtcggcgttgttgtttactgtacaataaccctgtcgaattcttgcctcgaggccacagcgattccgccattcttgtccggctccgacctttcaatttccagcaccggccactgttgctctgttggaatcctatcttgcccctgctcttggtcttctcattgttactgccacagttctacagctacagatgtgtgaaatgaaacgcctctgtagcaaataaccgtttcaaaggattgtttagcttcaaatgctcattctgatataactgtccttcattccccccccccccccccttcctaaattgaccgttgaaacagtttgctaattttcctcccatgttggcagtaccgagcttgttgggtcattgacaagagcaggcgtgcatttcccgaggcaccattcattcatggaatcctatgtcagtgcaagctcccgaaggcaacagattgtcattgctttagggagcaacatggatgatacaatcagtacagcagctgatcaaccactgttcatatattctgttgtaagacggacaaccaagctttggatgacatgatttagtcggacgagtcaaataaatcgagtaggatttatgccaaactgatgaagatatagtcccagaccagttgatctgggtgtcatattttattataagcatcagaccaacagaaatatgagaggcaaaagtttctagctccttttaatggatcttctaggtactgatccttggatcagtgcaaagttggcattcactctcaaaatgctgaaatgtgctctttaaactgtggaaggagagcctttgtttgatcataaaagaaggcctaataatagtgttgcctgtgggtcatggcctcatagacatacttaatctgaagccagatagcttcagtgatgtgtggaaattcttgaagtggaggctgtcttttctgagatcaaattgctaatatctgaacatgcagatatagttgacattggcactcaatccacacgccattttgtgacaaggctctcagaggatgaagagcttcaaaggttgattcctgtgctgcatgcaat

SEQ ID NO: 3870 - DNA, 2836 bp, Sorghum bicolor
ccacagactgcagcgaccatacaggggggaaacggcgtgttccacgcgactcgcattgataattgggatgtacatcagcggattcactatgttgagagattacctgattcgatgataaggccgcagggagcaagtgaactgcggagggagaagaagagaagccatcaatggaggggagtagcaaaaatcccagtagcccctcctccagtcctcctgggtcactgctcagcaacgaggaacagcaaaacccctttggctgctggagaaaattactcatttgcccatagttctgaggataaggggtagaagcgtcataacatggaaggcgtattccatggattcgctttcttagtctgttcgcgtaacctccttgtttcttctccccggtcggcgcacggcgcagcgctgtcctcttctccggctgcgccgcctcaaatcaaatgaaatccggcctcctccgcacttctccgatccaagtttttccgctcgggaggtattgatctcttcttcgctgcccacgtcgaatgccactcgagttgtttcttctcacatccgtgctggcatttgcagtagaacccttgattcatatgctgcctgccatcatttttttttcacattgtcggcgttgttgtttactgtacaataaccctgtcgaattcttgcctcgaggccacagcgattccgccattcttgtccggctccgacctttcaatttccagcaccggccactgttgctctgttggaatcctatcttgcccctgctcttggtcttctcattgttactgccacagttctacagctacagatgtgtgaaatgaaacgcctctgtagcaaataaccgtttcaaaggattgtttagcttcaaatgctcattctgatataactgtccttcattccccccccccccccccttcctaaattgaccgttgaaacagtttgctaattttcctcccatgttggcagtaccgagcttgttgggtcattgacaagagcaggcgtgcatttcccgaggcaccattcattcatggaatcctatgtcagtgcaagctcccgaaggcaacagattgtcattgctttagggagcaacatggatgatacaatcagtacagcagctgatcaaccactgttcatatattctgttgtaagacggacaaccaagctttggatgacatgatttagtcggacgagtcaaataaatcgagtaggatttatgccaaactgatgaagatatagtcccagaccagttgatctgggtgtcatattttattataagcatcagaccaacagaaatatgagaggcaaaagtttctagctccttttaatggatcttctaggtactgatccttggatcagtgcaaagttggcattcactctcaaaatgctgaaatgtgctctttaaactgtggaaggagagcctttgtttgatcataaaagaaggcctaataatagtgttgcctgtgggtcatggcctcatagacatacttaatctgaagccagatagcttcagtgatgtgtggaaattcttgaagtggaggctgtcttttctgagatcaaattgctaatatctgaacatgcagatatagttgacattggcactcaatccacacgccattttgtgacaaggctctcagaggatgaagagcttcaaaggttgattcctgtgctgcatgcaatcatgaaagatacttgagatagaaagaagctattatccatgaatacaatttatatgcaaaagtgcaggaaaattgtaaatcgaggagtatatatagtcaatgatgtatctattgggtgtcttaacctcattgttcctcacattgtgtatatggcaggggatgtattcacattgcagagggactacaatttcggtttatatagcctctgagcaatactcaagtgtctaatatggaactggcagagatctttttgaacagaacggcaggagatgagatctcttctattaacagagaagtgccagaaccaaaaaactgtactggaaaaaaatgcaagcagagctaaacaagaacatcacactgagcttggtgggtgatttcacacaattttatggctcaatggaactggcagagatcccttcatggagaatgattgttgaccctgagattgttcttttcgaagtattcttaacagaacctccaggttctttctggtgtgttatccatcagaagggagatgtgtcaacgaagcattattgcttcacatgtactgatgtgttaaccatccaggaaaaggatttccaggtgggatgtgtaaccgtgtcaatcccacatgcaatggtaaatttgatgttgatactacaaaggtttgtgatgcattgttgaagcaaataaaagatggggaagttttttgacaccaaagtcttaaacttttgcccttgtttttttttcacttatggagacttttgcacttgtcgattagtatgatattgctatttcctttttcaatataaaatatctcttgttagtgaataagacggctgtacactctgactcgtgagcatatgtttgccttgctctatgtcagtaactgtcagtccactgatttccaggtgcaacagaatttggggaacatacaacgcatttgcatctcttgtacttgtttcaccacatgggatgccatcatggcagggtgttactttgcatatgccttcttctgcttgagcatgtaccagctcttgtgcccagtgcactgagtgttcatacaacgtgcgactgtcgttgtctgttgttacttacagtattagttctgatcatagatggtgcgtggaaaaatgtgaaactgacagaaactctcttctgccactgcactacagaatggagtt

SEQ ID NO: 3871 - DNA, 6343 bp, Sorghum bicolor
agtacaaagagaggtctatacacacagtattttggatataatggatgtgtttgcttggacacctcccaactgacgcacatacagatacagcgatcagagtccaagcgtccaaaatcgtacatatggaagcgcttcacccgttaggaaaccttgcttggatgcactccaaacaaacactatggcttgtttacttccgaaaaaatttcggatttcgctactgtagcacttttgtttttatttgacaaatattgtccaatcataaactaattaagatcaaaagattcatctcgtgatttacagacaaactgtgtaattagtttctgttttcgtctatatttaggccctgtttagtttcctacctaaaattttttcatccatcccatcgaatctttagacacatgcatggaacattaaatatagataaaaaaataaactaattacacagtttagttaagaatcgcgagacgaatcttttaagcctagttactccatgattagctttaagtgctacagtaacccacatatgctaatgacagattaattatgcttaataaatttgtcttgcagtttcctgacgaggtatgtaatttgtttttttattagtttctaaaaacccctcccgacatccttccgacacatccgatgtgacacccaaaaaattttcgttctcaatctaaacaggcccttaatgcttcatgcatgtgccacaagatttgatgtgacggggaatcttgaaaactttttggatttcggggtgaactaaacatgacctttgtttagatgtgaaaattttttggatttcgctactgtagcacttttgttttgtttgtttgtgataaatattgtctaatcataaactaactagggtcaaaagattcgtctcgcgatttacagtcaaattgtgtgattaatttttttatttttgtctatatttaatgcttcatgcatgtgccgcaagattcgatgtaacagagagtcttgaaaattttttggattttagagtgaactaaccaggccatgatgccgaggtaaacaattccgtagtctgaacgccaaaatgctttgtgtccatgtgtctaacaatttaaccagttatccaactaacaatttctagctaatttattattattattattattattattattattattattattattattattgtcattattattattactattatcattattatcattattattatttaattatatgattaatttgcttagctaacaatttacagttggaagtagtagtatctgctgacacaagctggcgtgccgtactgcatcctacagcaacatgcggccgggcggtgtggtgtggtgtggtgtgcaggagcgggccagaaaacaaacaagcaagcgtgcgccgcgcaggcgcgcacacatgggggttgggtgggtgggctttgactgcctctgcccccctgcccctgaccctgaccctgacctgaccaagcggtggcagcagcagcactagtggcaccgcggcgcgagggcagcgtcgttcccaaggccgagcatgcgcgccccggccacacggccggcggcaggcatggatcctccattttttccctgtctttgccgttgatctcttccgtctccggtctctcgtaggagggcagcaggattatcacattttcacacacaaacctctgatctctgctgacagtgctcctgcctgagctctgacgcttgtcgtgaccccacggtcaagcctcctcactccgctagctccgcctcggaatgtggacccctagctccgacctcctactcctcctctatctatcctgcagacgcaatttaaactgctactgtagagaaaaataataaatgaaagaaaacgaggaaaactttttttttggggggaaaagatgccgggtggcaattcataaaatagttcttggtctcgcctcggtgacctgctgggtgtgcctgcctgtgcctgtggtggtctatataaaggcctcctcggcgccccagtacaacagcgagcaaagcactctgcctgccgtgctcggagttggagttgggagttgaagcaccaccaccattcctgcagcctgcctcctcctcccccctcctcttcctcctcctgctccaagcacacgagagatagatagaggagatggcggtgctgttgctcctggtggccgtgcttggcgtggtgctggcgagcagcctcctcctgcggtggaacgagctccggtacagccgccgccggggcctgccgccgggcacaatggggtggccgctcttcggcgagaccaccgagttcctcaagcagggccccagcttcatgaagcagagaaggctcaggtaccataccaaccccgtccgcattccgctcgccgtcccgtcccgtcccgtcccgtcccgtgctctgcctcttcttcacccttgtcttcgtcttccttaagagcagagcagagcagaggagtgccctgcttgctttcttgcccttccttcgccatgccaactatgtccgtgtctgtcacaggatcaatcattcgttagaatgaaataaagtgtactagtactagaaagaaagagagaaagaaaaaaaaagcggcgatccggagcgaggagaaagaagaggcggagcatcagtgtcgtgttccccaaaagctcgcagcaccgcactgttcctgttccacctctcctctctgctgcctgtgattaccttaggaccatgccatcatcatcctcctaaagcaccaccaccttattatcatactactgccactgctgtcagacaggaggaagtttttttttttaaaaaaaagtcaccgtctttccattatatacaaaagggatatatatacaagtaggattatatagctagtcatggtaaaatcatttgctaacagtaagtaacagcaaagcaagaacagaagagctgaagctgatggatggtaccatatattgggcatggtgtgggcaggtacgggagcctgttccggacgcacatcctgggctgccccacggtggtgtgcatggagccggagctgaaccgccggacgctggccagcgacggcgccggcttcgtcccgggctacccgcagtccatgctcgacatcctggggcccaacaacatcgccgccgtgcacggcccgctccaccgcgccatgcggggagccatgctcgcgctcacgagggcacacatgatccgcgccgcgctgctccccaagatcgacgccttcatgcgcgcgcacctccatggatgggccggacgacgcgtcgacatccaggagatgaccaaggaggtatggtagtataatacacagatgcacagcagttgttgttgttgctgctctcttggaattggctcttcttttgttttgctgtctctgttgctcttgatgctgctcaagccttcttctgactcctcagctctgtgtgtgtgtgagagagagagagagagagagagagagagagagagagaaaacagcgagagaacagccggccagagagcagggctgcagggtggcgattgagaaaaaaaaggggaaaaggcagtaattctgtggggcccacagttgaaagattactgatttaccttgactatattgcatttcagtggccaaattgccattgctgtttgacattggtttggcaacaaatctgactgaaagtggaatgggacacattcctccatttttacagcacctaccggcaccatttcttttttcttttcacttgccctccgactccgatccagagaggcaatgccataggctggccgacacggcagaatgatggtgccccctcggaaaactgaggaattccatccatcgactgttgaaaaagagttgcgagcaaaaggagtgggatcttccccatcccttcttcctctctctaccaaaaggggaatctttggctttctagaacctgtactgcactgctggataggcaaaaatttatgagccggagaaaagggcagacagaggggaaaggcacacccttctcttctctctgtatatacacattccaaagtgcacaacaagcactccatgcaccatcatcaccatcacatgtctcaatgcaaaataaacacttggctgggtgctgaattccatacctcttccatagcgtagcatggcaacttattattacggaatcttatctgcctttgttttccttttttttttcatcagatggctttgctctcagctctcaggcagattgctggcatctctgctggcccactctctgatgccctaaaggcagagctgtacacccttgtacttggcaccttctccctgccaatcaacatcccaggaaccaactacagcaaagggctccaggtactgttcattgcttgcatacctgaaaacatcagaagaaaaagtcgagctgaactgagccctctaacagcagcagtgtttgtttttcaggcaaggaagaagcttgtggcaatgctgcggcagatgatagcggaccggaggtcctctggttgcgctcaagatgacatgctggatgcactgttgagcggcaacgagggcaccagggcgaagctcactgatgaccagatcattgaccttcttatcaccctcatatactctgggtatgaaaccgtgtcaaccacctcgatgatggcggtgaagtatctgtcggacaatccgaaagctcttgaacaaatcagggtacatatacttcgctaccaagttcaatcccacaccaaacaattagtcctataatccatgagcttaagggatgatctgttggctgttgcagaaagagcatcttgacataaggaaggctaaatcaccagacgatgcccttgactggaatgattataagtcaatgaccttcaccaaagctgtaagttggagatgatacacccagaaattagtcagagtagaattgtactatggacacgacaaactaatttattcttctaatatgcaggtcatttatgagactctaagactagctacagttgtcaatgggctgctgaggaaaactacccaggatgtagaaatgaatggtgagaatcctacaggatccatacttttgctactgaaaggaagtttatacaaaactcaagctagttctaatgcaatattatgtatttatttcagggtatgttattccaaagggctggagaatttatgtctacacaagggagataaattatgatccattcctgtacccggaaccgatggttttcaacccatggagatggctggtaaggaatagaacaagcaaacatctcagataataaatagtcacaaaattctaacctgacaatgcttcctgacaataggagacgaacctcgaatcacatccacacttcatgttgtttggaggaggtgcccgcatgtgcccagggaaggaagtgggaacagttgaaattgcaacgttccttcactatttcattacgcgttacaggtctgttcctctcacaagttttttatactagcaatagaaaaacctccagagctctttactgacaaggacttggcgctgatcttctcttgcagatgggaggaggagggaaacaacacaatatcaaagttccccagagtggcagctcccaacgggctacatatccgagttcaagattactgaacttgtgagacgttttgtgaagtttagataggattcaaactcagatagaaataaccctgagatgctgatgctgctggcctcttgaaaggattagaacagccattggtgcttgtaaaatgtgtccatgccaataggaatattatagcgaggatataggtatcataggattactaggaaattgatgtagaaagccaccagatgctcctgtattcttttggtccatcaattttcaaatttaaacagaagtatcaattggcttatatgcttttgaacatgatacagaatgagctattcctatgcaaatttccagcttcatgagcccgttgaataaaaaatgccaatagccaactgatctaaaaatatggatggacactgactgtaaaacattaagcacatactgaggatatgctaaattggtaactgccaattgctaatggaggaacagagtaagagtttttaccttattcaggatatagatgataactgcttcaatggtagaggcttccaattgcttatataaagatgcaagtttcttcaattggttaggcaacacattgatgaaagcaaaagcactctcttcccatggacggtccaacataagcaatattcattgctgcttcaaaagatgccaaatagttgtttagaacaatcgccattaatgttcggtgcaaatgaaactgcattatccaacgtctctgagaaggcaagaacaatgctgttattgagctactagtaaaatctcaaaattgtagataaaa

SEQ ID NO: 3872 - DNA, 8962 bp, Sorghum bicolor
acacataatcgacaagataaaagagaaaaaagaaacaaatagaaaaaggcaaatgtaaagagaagttcttggtccggcccaataggcagcccacaagtacgtacttatctctttttaggtcatctctcatctcacttctcacggacgcacatgcagcgccgccgcacgcatcctccttcacacaggcgcaacacacctacatctcccgacttgacgctgggagatgaagcgccgccgcatctccctccttcatgcgggcgtaacgtcgtcacatcttctctctcatggctcacgtgggtacaatgtcgccctccctccctccctcacgctcctcttggtagtgtgcgtttagccgtttagcttgccatctgctccttcctgacctcttgttgctgctcttttagatccccatctcgatcaaccgccatctccgccatagatgacctagcgcaacgtcagatctggtagggatgagcgaggaggcagctgcacgacagcctctctctattgttttcctctacttttggctaggcatcatggacgtcttactcactatgaatgccttgtcgcctaggcgacaccttaaaaatcatggcttggtttccagactagagagatttatcttgtcttgtctctcttgcacgagcaagaagaaggtgtcgaggagaaccgttttggctctctcgaaagcaaggtaaaagcttccttacatatatcaatatccttgcttggcaagactacacactgacgagcaagaaaaccaaacaattttttagactccctttggaatgtagttttttttttcatgtttatgtattttttgtgtgaaaaataaattgattcttatgaaatttttatataattcctatgaaatttctacgtttcaaccttaactttaacaggtaattcataggatacatgttggcatgatttttttaggccttgtttagtttgcaaaatttttcgggttttggctactgtagcactttcgtttttatttgacaaacattatccaatgatggagtaactaggctcaaaagatttatctcacaaattacagataaactgtgtaattagtttttattttcgtctctatttaatgctccatgcatgcgaccaaagattcgatgtgacggagaatcttgaaaatttttgcgaactaaacaagaccttaatttacctagatagttttgcttttggtccatgcatatacggtgaaggcgtacgtatattaccggtctatttgcttgaacttatcagccgaatctatcagccattcagcaatatttttctctcacatgtcacttagacttaggccttgtttagatacacccaaaaacacaaaactttacaaaattctccatcacatcgaatcctgcggcacatgcgtggagcattaaatatagataaaaataaaaactatttacacagtttgtctgtaaatcacgagatgaatcttttaagcctagttactccataattggacaatgtttgtcaaataaaaacgaaagtgctacagtgtcaaaatccaaaaagtttttgatctaaacaagccctcagactgtacactcgtatacggcgaaaatgtgaatgtgaaagagatcggagtatactcggcattccgtattccgtacttgcacaccaccggcgcccctgggggtgaaaatgcaaaccacggcgcggcgcacacaggatttgccgccgcgctcttttcccccctgctattcccagtttccctccactcgccgtctccccccaaccgcttcaaaatttgaaaaccaatgcccctgtccccgcaccgacggctgggatttcgccgcggcgcctcggccgccgtgtccgcgcccaaaccgcccgccctcgctcccgtgcccggggggccaagaaataaaaaggacgaagaaggacgtcctccacgtttctccatcgccgattcgccggccgacccttgcctttcctctccaatctccagtcgtttcttttccccacaagcgccggccatggccatctcggaggaaccagagggggccgcgggcgatggtggtggggtgacgacgcgcgggagcaaagggcgggggaaaggcgccgcgaaggggcgcgggaggcccaagcgccggagcgacgacaggcccttcgcggcgccggcgatggatggggtggcgttcagggacatggtgcttagggagaggaggcacgcggccaacgtcttctgcgagcgcgacaccgatgatgacaatgaggtgctgggatagctctccactttttcttttcctagtttccccattttttttgggggttttttgagggatttgcaacgtgttttgcgcctctctcttggcatgtttccagtttcccttcatttaaaaaaaattcccattttttttccaggagtacgaaaatgcctaaaaatagccttcctaccatttcatacgatttattactgtttcctatatgagcaactagcgcattgaatacagataaagaaagatgcttttctttaaacgaaaaaaaattcctttactttttagataaaaaaatcaagtattgttcggtcactcgagggatatttctgatgattctttgatatactacgattcatagtaaatgaaaggaaaggcttcgacatactgtctgtttccttctccccctacaatagcagaaatttctcttattcctttttttttactgcgtatgtatgctgattctacagtatcttgtgtctcgttttctgaaatacatttacttgccattgtattggatattggtttaattcttgtcgggtgtattctcttaatgtagcgggctaatttctaggctggtgtaatgtcaggagattgccaccaaccaattcaagcctcagagaaagaagagaaatgatgctggcaagaagaggggtcctagaaaaacgaaaccagaacatgtggacaacagcaaggccgacttccccaacagcaaatgccacggtgacatgaagggggtatgctactttacaatcttctgcaacagttgattactatagttttgtacccatgttagcgtgttgccaattttaccatgtactatctggcagttcttaacaacaagaatcaatacaaattttctaaatgttgtctgaaacatacaaacaccctgtcacaagttccaggttctattaggaatggttttgttgttctctattggccttgtataaattaaaaccttaatgtcgattagtaaatatgttttcgagcttgtttacttgtaactagcaatagtgcggtgattatccagctgtgtgaatactatacttgctctcttgtatgctcctttgtgtttctgtctttattatataaaaaaataaaaaaaattaaagaacatctttttcctagcggctagtagttctgtgccccctttctgtaacaccttagttttggtgtttttgagtttatatttcaattttctttgatgaatgttctagcattttgtttcttgggccatatgatattaaaggaaatttccttgtaattcaattggcacctttgctgtaacacctcagttttgatgcttctagtgtatcgaaagaatgttgtaggctttaagttcatttacttgcaggatggttccgagacagttagggacaaggttttacagactgcaaagaagaggaagaaaggagatgcagggaaggtttctgtcacaaaaaggttgaaaagagagaatgaagaacaaaagaaggccttatcctccaagcgtaaagattgtgatgaaactaaaagggtaagcaactcatgagctggttaatggaatgattttgtgtaagtatttgatgaatttaagtgttgtttcaattgtctagaaagggaagaagatgttgactggggataatgccctgatgtgccaccagtgccaaaggaatgataaagggagggtggtctggtgtaattcatgcaagaataagcgcttctgcgtgccatgcatccaacgatggtgtgttaagttctcatgatctttgtctactaatatgattgcacaccatacaatttctttgtagttacatatataaattacatatgcatggttagtttatcatctttttctataggcatctgttagttttttgttgatgcaactgtatttgtctactgtgctacaaaaaggatgtcttttggttctggtatttccattcatgtggttatgttatttgatcttgtgtaatgtacattgctaatctgttgtaaatactaaacaggtatcctggtttgtcagaagatgaatttgcttcacaatgcccgtattgtcgcaagaactgtaattgcaagggatgcctacgaatgcgaggagttgaagaggttcatgcctagcattccatctccttttttgcctttacattttttccatttcttctgcttgttaggtattttccttcaaatttttcctgcctactcttaaccaataaatccccatttctcacaaagcagccaccaaagaagaaaatttctgaaggaaatcaaatccattatgcttgtcatgttctgcacttgttgcttccctggttgagacaactgcgacaggagcagacggaggagaagaaattagaggctaaaatacaaggtattgtgttctggtgttgcatgacacaatctgctaactgaggttgctgttcatgctaatttgttttttcctaggtgtttcgatgaatgaggtgaagttggaacaggctgaatgtgatatagatgaacgcgtcttctggtttggtctttcctgttttcctttttcgctacaatcttatatcagcaagcatctgatttatcttcttattcttctaatgcagcaataactgtaaaacttctgtagttgattttcatagaagctgcaagtactgtttttatgatttgtgcctttcatgctgtggggagatccgcaaaggtgagattcctggaggagaggaggtaaagatcttagagcctgaaccaaaagacaagacttatatttttgctaccaataatcagttccaatggaaaaatgtgtcttccaatggaatgggttctagtgaggccccaaagaagtctctactactgtggaaatcagaaagtgatggtagcatatgttgcccaccgaaggagctaggaggctgtggtggttcagttttggacctcaaatgcttgttcccagagaaattactttctgacttagaagaacgagctgacagaattgtgaggagtaaagtatttgcaaaagcagtaaccaaaagaattgatcagtgcccttgttatgaccattcaggaagtgtaagaattcatgatgtgcgagaggctgcaaataggaaaggctcaagtgataatcacatctactgcccagttgccactgccatcaaggaggatgacttagtgcactttcagatgcattggacaaaaggtgagccagttatagtttctgacgttcttcagttgacctctggtctcagttgggagccattagttatgtggcgggcattgcgagagaaaaagactaatggtgatgttgaagatgagcactttgctgtcagggcaatagactgccttgattggaatgaggttaggaattctacttccctaaatgtttgtgatttggtgacctttctttttgtatatatttaaatgtggttttgtttgtgtttcccttagatgtgctacttttctctttatagactttattaggtgcagtatgaaaggttgggaccacttccctgacttggtgatgtctgctattctctgttgcatacctttgtccccatgctggttttcatggttgtaaagctctggtagaagatttatttattaccatgtcaagaaattgggcatgctttacaagtaaaaataaaattaatgtttgagatatctgtgaatttaacttccatttcattttttgaaggaaccgtgttatctgtatgcatgcatagattcctcacagccctgttattaattgctaattgtaaaatattaagtactttccttgcaaaaaaaaatattaagtacttggcatgcacaatttttgttgcaggtggaaattaatatacatatgttttttatgggatatatgaaaggcagaatgcacaccacagtacactggcctgagatgcttaagctgaaggactggccaccatctagttcatttgatcagaggttgcctcgccatggcgctgagtttatcagtgcattgccatttcctgagtacactgatcctcgatatggtccactaaatcttgcagtcaagcttcctgatggtgcactgaagccagatcttggacccaaaacttacattgcttatggatttcaccaagagttaggcaggggtgattctgtgaccaagcttcactgcgacatgtctgatgcagtatgtgctgttattgatgattttctcttctcattttataacattcgtggttgtctggtaccttcattgtagaataaaatcaacttgtgcaatgccttatcttatattggtaatctgtgtctcactttctttacgttgctttctctgatctgactctttttcaagctgtggctgtatactcagctggtgacaattgatagctgtttcttatttgtctcttgcttggggtccctagcttattatgacagtcattaattctgacagtgtgttttttatcaggtaaatatattaacacatacaacacaagtgacctatgagggttatcaacataagaagatagagaaactcagaaagaaaatgaaagaacaagatcttcaggaactttatggtgttttagaatctggcactgaacgagacctattatcatcttctactgattccaggaatttaaccattgacgaaacatcaaagatctcatgtaaagatgcaggccagtgttcagattacattgacaagaataatagttatgctgggatgcataatggtgctcagtgtattacgggcaagagtggagaccatgagaaaactggtggtgctttgtgggatattttccgaagagaagattctgacaagctacaagattatcttaggaaacatgccaaagaattccggcatatcaattgcaatcctgtgaaacaggtatggttttccttgcaattatttcctctgtttttcctatgctgactaatagtcatccaaatgatgcaggttattcacccaattcacgatcagattttctacttaactgaggagcataagagaaagctcaaggaagaatatggttagttagctattcagaccttagaaatgcagtgctttgtgctgttctgccctatctctaatgtgattgcatgcttggtataggtgttgaaccctggacgtttgagcagaggcttggtgaagcggtttttattcctgctggatgtcctcaccaagtgaggaatctgaaggtgcgattgaactcaacagacctctcctttttattttacttcagcaacaaatgtatcctgttgcttaaatcgaagctgtttctgtttgtgcagtcttgcatcaaggttgcaatggactttgtttccccagaaaacgtcgatgagtgcataaaactgactggagagtttaggcgacttccacctggtcacagggctaaagaggataaactggaggttggcatgctatatattttatcttgtttctatttatcatgtgctatttgatatgacatgactgacctggagtccaatctggtgcgttcagattaagaagattgctcttcatgctctgaaccaagtaataaatttcttggatcctttctctgaggggtaagcagcagctttgcagtagtatattgttgaaattttgctatagaagatctgaagttgcaacgagatgcagaaaattttgagacattctgatcactgcttgtcatgtgattggtccatcaggttgaagagtggagctgcccaacccaagaataaaaaagaagctgatgctgatgctgaagcacagaagaagcctaaaaggggtcgcccatgtcgcaagtcgaacgatgaagctactgacgataagcccaaaaagaagcctggtcgtcccagaggtgagaagagcggagacggcaagtccaaagatggtgctgttgatgagaagcctcctaaaatgcagggcaatcgcctgaaaggctctagcaagcggtaggtgattgatcggttcactgctgacagggaaagtaaggcatggtggctgcactgacccaacctggacgtaggtattttggaagcaggtagattctagaatagaccgggcattttgtcacccctagacgccattgtgggctgtggcgtctggcttttgttcatatgtggtgattgccggctggcaccattctggaagaaccatgctaggtgctcgctgtacaagactcttcatgtagcgggctatggtgattggcagttccgcatgtctgttgctgatattggtagtaattgacctgaatagatgtggtcatttgaactctctggattctggttttatatatccaatccattggctgaggctgagcattcttagctgaaaattgcgactgcttatagtgcagtccaaagcatgttgtcaaccagatttgccaatttttctttttttaaagacacatttgccattgcacccagcctaacaagtgaacttaacagaccaaagaaaatgtgtacaccttgtgatgaaacaatggagacgtcgaagagaggagacgctagagtttggtcctgagctagtgagcatgctattgttgatgtgcgtgttgaacgtgtccatgtgcgctgggtcgagagccactccggacgtgggtccgagcgccaggggcctgtggcgccgagctgcgtcgtctgcacaggcgtcacggggcgccgcgaccgggccgtgacctgttgcacgtccacgccgttatactttagtatttttctttatattataattattgtttaactataaactaactagactcaaaagatgtacgtcgtaaattatagtcaaactgtataattaattattttttatttat

SEQ ID NO: 3873 - DNA, 4904 bp, Sorghum bicolor
gatatatcagtcctgtctatggatcctccaacacaagatcgagccccgcgccacccgagagcacaatgctccatcgtccatcccattactaggagggtatacactactcttgccatctctccactcccaatgtgcaagtagccattctcgtaatagaatagccgaaacaaggtttagctgagtatgtggctagtactataaaagttcttgatccaaggaccaacaacggacgattattaatcaacacagacagaaacactacactaagacttctttcccaatgcaagttacccatctggtctcatattaatgattaaccttcattattcattaagttgtttcacaagaacccttcaaactatatttttttttataaaagcctatctcattaagcaagctaagcattactaagcatttttgaataacaagtaacaaggatgatatagtaatagacaagattagtaatacatcaattaggttatcactaaactcctaaccacttaatgcaacaaaaatcattatcacaaagtgatgtaaagatttgtaaaactcaaggaagggtttaaatgtatccggggcttgcctgtgttgcagagaatgttagctttcccgagaaaggtccagtaggcaccaacaccttaggtggatggacctgccccgagactcaatcacatgagtcttcccactctcatatgcactacacgtaaagaatgatgccttgcttaatacgatgaaatgtataccatgatgtatgatgcatgatgagaggcataccagtgctttatagaaagtaagcaagttaagaaagttgagtacaactttccttcactgtacaattgcaagtgcttaacacaaagcatgttaatgatcgtgattaggtttcattaatttcgtaacatctgggatgttgcagattcgaagtagcagtagatgctcaacaattaatgctaatttttgtaacaaaataactcggcagtatcaacggtaaacaaccacgacaccatagttaggtaattatgcagaaaaaaactccatttgatgagatacgattttcctccttaaactctgaaataagacattttattccctcaactctgaaaaccgttgatattatctttctaccctagctagaagtggttcccaagatgatttcatcttttttttttaatttttttggtaaatacctggcaagtttttaaaacacaaaaacgtccctaaggttctaaaaatcttgagaaaaatcctaatgataaaaaatatttagatatcgtaaaagtacctctcaagcctttcaaaaaaaagatttagctctagacaatagaaaatatatagtaaatctagaaaattcccaaaaaacatttaaatcaatgctgaaacgtgttttaaaaattttcacaataaaaacatgaggtgcaataatcatgaatgtattcaacattaaatatatgttgtatatttttcatgtttcatctcataatttttgttgtaaaaagctttagaatgcatttagtttttaaaatttgtatagatattttccaatctagtagagctaattctacttttcagaagcttccaaagatatatccatgagtttaaaatattctactttggtttggcttatcccaatctatctcttgatttttttctctcaaaaatttgataaacttatagacattttatgtggttttaaaaatatatatcagttatttacaaaaccgccttaaaaaccatttctacatgggtaggaaggtagagtaatttacaccattatttttttaatctcgtttacaccattattgaagggccggataattagttcatgatgaaggtaggaatgactttttcctaatttcgctgaaaaaagcccatgggttgattgtaatgcctaaagcccacaataggattttgggcccaaaagcggccacttcgcagcttatccgaacccagtcagccagcccacgcatgagctaatataagccggccatataagaaaccctagcggaaccacgaacacactcgcctcctctctccgccgccgccaccgtcgcctcgcggccgcccccggctccgctcctccgctcggtaggtggggcttccttcgattctgccttagacttagagtagctcttgcgctcgccgtatctcgtgtggttgtcgctagaaccgtccctgattccattcccgtgatctggttttggtcatttgatggatttatatttgtttgttgcacctgtaggtgattattaggtgttatttgtgcgttttgatttaggtttcctttcccctgggacggatcagggcacatgtactgtggcgatgtagctgtttcaatagcgtagttgccaaacttttgtgtatgtgctatatgaacccgggaacccgctttgcagcagagatttgttccgtatttctgctgccagtagtcaccctacagctaaatcttttgatttctgaattctattggtcttttagatgtttctgacacccttttgaattgaaagcccatgcactctagccttcggcattgcatagttgcctatttcatttaggtgcgcgatgcactaggagtccaggatagaacccttgcagcaaacttttgcttgtgtttctgctgcttgtcaaatcctggtatttgtgtggctgtgaacttacctggtttcttctgcctatctaatcatgttattattgtgtccgcaaacttagccttgttgcttaatacattgtcacatatttatcaggttttgtcaaatgtacatatcatcaattctgattttctttctttggttcctgtaaaatatgcagttggtgaaggtttcttgaagttgagaagatggtgctgaagtaagtttgtacttccttttattccaaatgaatatattaatagatctggttcatcaatgccctacggatctcaaaattgttctaagtatgatcatctccttgcaggaccgaactttgccgcttcagcggccagaagatttatcctgggaagggcatccgatttattcgcgctgattctcaggttactagctgttatatttttattagaaatttctaagcttatatacaagttcttatggaaagagattgaatctattttataggttttcctttttgccaactcgaaatgcaagcgctacttccacaaccgtctgaagcctgcaaagcttacctggacagcaatgtacaggaagcagcacaagaaggtatgtgatattttacccagtcaactttcttgtataaagaatttcattcaatcatagtgttggttatagattagctacatctttcttgtgttagctaaatatttcaacctctgagttgagcttcaaaggttgatagttgttgattttaatgatttttttttgaacaaaaggattttaatggtttttcaagtcttaaataaactagtaccaggacagtaaacctttgctttgagcaatttcttgccattctggattatgattgatatgtaacataaacctttgctatgaacagcactgatatataactcaactagtaaacccacagctgttaatgttaggtaatgtaattatctgtctgctgaatcatgtgattgttgcatcgatattagtcttatctgtaattgtctttgtatggatctatttgatgcatgacatctaactagatcgttgcagcaacaattattcctgccatgctctcataacggtgatagaagtctagaacctcttacatgtatttgctatttctttctgtaggatatccatgctgaagctgtgaagaagaggcgccgcaccaccaagaagccatactccaggtcaattgtgggtgcctccctggaagtgatccagaagaagagagctgagaagcccgaggtgcgcgatgctgctagggaagctgctcttcggtatgtttgtatatgataagccatcatttatgcctaggacagtggtaaccaattgttggtctaaccaataaaatctctgctttgtaccgccttgaccttgcagcgagatcaaggagcgcatcaagaagaccaaggatgagaagaaggcaaagaaggcggaggtgaccaagtcccagaagtcgcagtcgaagggcgcggttcagaagggttccaagggccccaagctgggcggcggcggcggcaagcgctgaaagaactgaagatgtcatttgctgctgaccttgcaatcgctcctcattagcctacctaccttgtttctccagagccagttttgtagtacctgtacctgggttaaatttgcagttcctttcaccgttgctttgtgggtgttaaataccgtgacgagaaaatggatttatctttgtgttgcaaaaaatgatggtcgttcatgtgctttcctcgtctgtcgatgaatgcttgatttggcttcaaagatttctttggcttggctggtatccgctactctcgtagcaacctatctcgacgactcatggatgcgcaaatactattcgctgatttgtggtggtggttattgtgaattgttgagagccgctggaagtatactgacttgttgtgagtggttattgtgagcggcgctggaagtatactgatttgttgtgagtggttattgtgagcggatgaaagtacacttcgctgagttgttgtgatcgcgtccgactcggctgtttccacgcgtctgacccacgggatcggctgccggcacgtcgttcacggcaggccagacacatccgtcacgttcgttgggcagggtcacgtaaacgacggcgcaccggagcggcggcagggtggcgggtaggaatgaaaacggatcgcatacaaacggatatcacttatatcatatttgttttcatatttttggtcggattcggattcaaatacggataatgtcaacaatgtcggataagatacggttggatgtcgatattataaatat

SEQ ID NO: 3874 - DNA, 2838 bp, Sorghum bicolor
ttgtcatctgcagtaaattttagcgtcttcctcatatattttgtgtaggcaaggggttcctcgaaggcatgctgtcagatggatggcttctgaatttggttcacatatatggttttgttgaagacatatagcatcgtggacactgaccaactataagtattggtttctgtactctgtttagaccagtgatctattacaagtatccttatgccactacatgtcagtgttgcattcatccaatgagaagttacaagtttcaaccgatttggaatgacattctttccctacatgaggtaatataattatacaaacacttctccttttgaactttcattaaagcttcagtgagcagttcttccttttactgattgcagtctggtaagtcgttggtcaaccttgggtgttttccttgctactgagcgggtatcggttcgatactctaggcactaaagatttaacctctaaaatcccgctgcaggttggttccatataagtgtttcttgctttcgtagctgtccgcgtgtcactactatgcaatgcactctatttcgaaattatcaccctcaagactgtgaagattctaaagtattctgtttatttttaaataaaatattgtgcagtaacttgcatatttccaattaaggttatgacaattcattaccaggtatctgtcatgatggtcagcctcatgtcatcattgcttggctaagagtttgtatctgcttgctgcaaaatcatgtatgacaactttcacattggatatttttatcaagtatttcaacctacacacttacacaagtccaaactggtagacactactgtagaatcaacctttgattattttcttatgaaattcagtgtatagcttaaaattatgacgaagcatgcttgacaaatgtcttcgcttttccccatcccatttgctttcggttatgtatgactagaatttagagaaggtaacacttctgtttagtacacttctggaataagaattttttctctggattttttttccacaatgccctttatatatgataaattatcaagagcgaaacatctggcaactttgaatttgcacttttgactatcctcagaggcgcgaaaaagccagcaaagtattttgctaaggtattgcacccattttccttatcctttttcttttgtaggctgaccgctgacatatgccagttgaagatggaccaaaggaagggcgatgtgctagctagggtactgcgatgacatcaaaaggaagaacaaaccaattattcacatcgtatcgtaattaatgattatgatcttgttctcttttttgtaattattttttctggacatatgtgtttgccatggtcatgtgtctacagtgatgtaattcataacaactggtggttgagagggatatttgaaggatagaccatgacttgcgacatctcttatatagtgagatctgcttaaaattgtgattttagtgaacaaaaacaaattgtttggaacctcagagatcttacaagttaccatgaccaggccagacgacaaatgccgtgacgaaccgctgaagcactaggccagacaacgaacgtcgtgacgaacgcagtaagtatacttgctttgcgttttctattgcagatagaaagaacacatgtacaactaaaatgggtaaaacgagtgagataggtagaaaggacagagtctaaatatgcattcatatatgctgagttagcatagatgcatgcataagagtctgctcgcctaaaaaatgctctaatttccattcttctttgttatatattaagactacaagtgttcgcctgattaggaactattatctaaataattgggcgtgcaacctgcattcgtttcctgattttagtcaagcatccttctaaaatattgaattacaggactaactagccgggtgcatattgaagaaagttaattcttgtatgctcttttatttcatcacgtggccataacttttttgtgtcagttgcctcgaatattgaatcaacaagctactatacaaggtaaattctgtgtcagttgcctcgaatataaatacagtttaacatatcaatattcttaagtgcagttcttttttttccagattcgatccatacggatgtgtggctcattggcgttaaacatgtgtggagttgcctgtggtagacttgatttgtgttatgagatgggatttggtggcctctggtacggttcaaccaaatatatgagacatggctttattgttccttttcttattcacgagtgtattttggattatattaattatcatatgcaattgtccgagactataaactacgaaaaatatatcgttgtttttattaaatatatccctagaataaaaccgtagcaacgcacgggcactatactattacttcagttatcttatcggcccaataagcatcggcatcttgctgatgaggtggttgtggatctagcacctgctgatatgcttacacgtgtctctggggtgcacgatctgcatggaacatggggttaatcacctgaccaccaatctactgaccaagattcatcggctggttaaccaatccttgattctgaaacacaggttggatttgtccctattgaaaccctgcagtctgatgattctgctgatgcatctgtggaaagactaactgtccattccatccactgttagcattcatcggcataagccctgccgatgactggtaattgggcatcataattgaattgagataccctggctgtgtcataaacctttactgcgtcggcattgaatctgccaatgcattaggcatttggaacgttgcaaattgagaattcccagtgtaaggtcttgaa

SEQ ID NO: 3875 - DNA, 4597 bp, Sorghum bicolor
tttgtagctgttcatttattagtatattgtaccagtactctagagatgtgtggcaaacatgtatgacgcgtggaagatcctggcccgtggcggaaacaacgtgaacgtcaacgccgcgtgaggcgtaggacctttggtgcacggggactcgaatcgatgtcaatggagcacgtggcgatcggatccaacggtaacggtgccgtaccttgcagttgcacgtggagtagtaagtatgtgccatgggctgccctacccccacatggccacattcagcccttgttccgttctaaaaaatttacaaaattttttagattatttattgtatcgaatcttacgacatatgtatagagcattaaatatagctaaaaaataactaattatataatttatttgtaatttgcgagacgaatcttttgagtcgtagtcaacatttgtcaaatacaaacgaaaatactatggtatctattttgcaaaaaaaaatgaaattaaacaaggcctaaaagctcccaaaaaaatttgcaaaaaatttagatttcccattatatcgaatcttgcagcgtatgcatgaagtatcaaatgtagataaaaataataactaattgcacagtttgcctacattttgcgagacaaatcctttgaatctagttagtccatagttagacaatatttgtcaaatgtaaacgaaaatacttatctattttaccaaaatttttgaaactaaacaaggcctcataggccataggccacacattcctcatagaacagacaaccgaagacttctgtatgggtactactgccaacaagcaacttcaaaagtctctttatcttgatagaaataaaaagttctagtgaattaaaagtcttccaaatagcttcaccagttaggacttaggacttcaaatactgctagcttttattcatgtttttttgctaggtaaagatggtaaatggagaggatggatagctcttcagagcacgtgtatgatatacaaaaaaaaaagggagtgaaaaaaatatctatacattttttatttaaaggactgtccaaataaagatttagagatagattagcgtttggttacatggaaatggaatgcatcatatcatatatacgagtgcaaagaggtgtgcagtgtgtacagctaggactcgtagcgcctggccaacgtggaaaacgacagcaaagctttgctcaacaggtagaaggcatgcacgtgaaccgtgatccccatccactgccactggctgaaacggcgaccctatccgcaagggcacgaagcggatccgtgtccacgcgtgtggaccgtggacgctgacaccaccggcgtccaaacgcatgggattctcttcatgcagtaacactgttcccttgagagccgcaagatgagagcacccgcgtgttccagacgaattttccccctcgctacccagatttttagttcaaagtccaaacctcagcatttcttgggtttttttgtttcccaaactgaaagcttcatcccattcatcagagtccaatgagctttagttctgcaattgcaacacagacagtgcacctattagtaacattacttattatgggggaaaaacaagacagagcttaaaatctgttgtcaccatcctaccaatctcacaagaacgcaggatggtttatggtcatggaggtacacacagacccaactcaacgggttttctgctacaggcctttatgagattgttaacacaaataatagttgatgcacacagggcagcaataaatacaaacgctacaccacaaatctgatccgatcttcttcacagtacatcttgtgcgtggcgaaaacatagataaagatttattatttatttattttcggacccacgcacagggctatcaaccagtctcttccagaaaatggtttcctgcgaaaccgtgtgctggaggtggataatgacactgcagtggcccactagacgggggtaacagacaaggtccatgactcatgcaacaagcaatggctgaaagcttgctcttctctgctctggtgaagtgtagtaagagacaagggttgctaaagatgatgcaagagattaatgtatgctgcaataaaaaagcattgagtgatggcatgatgcttcagatccgaagataggaaaaaaaaataaaggctattgttaagtcgccgccttccttccggatgcagggtatgagtcagaaagctgataagccacatgctgcatccatagaacagaaggcgttgggaccttgctaaaattgactcgcaaaagaacaagcaacaagagacccacagggtttcttgcaagtacccctcatgatgcatatcccactataagagggcccttgctcaatcactgagcaggcccgcactcattgaaaagaaccacgcagggacgcacacagtcagaagcgatcaagggaagaggggaagaagaagcagggcaggcagcaggcatggagcctcatcacgcaaacaaggtatgcactgctgcctaaccacctcctagtcaagatgggttcgagctgtaaaacgtttggcaggacaaatcgaccaaaagactcgatataacatcctatccaagacctacctcgcaagaaattttcctgatgatgtaggattcctgcattactgtcttcaggctttatccagatggatgcttaggttttcctgcaatagcattcagactagagtttagctcatagccacaaaacagattacttcatttctgcatatgaacatcagctctgtagaatacagatttgagtcaaagtatattattcctgttcgttaaagaaatcaaacatagacatcctgattcttaaaaggcagaaattctgatagagacatcaaaattggacctttttcactcactccacttcaacttacgaacaggtcttactgttaaccattccgtatttacaaataaaaccttaaacaacttgtgctaacctgagttatcttgttcatctgctgtgaagccaaagccaaagctgagcatgaagcattccaagttcatcttctgcaagctctacatttcagaaacccgcaatactatggctatggacacaatcgagcatgcaagcaagagtgatgctcaggttgttgtcgtcagccagttaggagatcatcactacaaccgcttccgctacacgcttgtctcctacatcgtcgatgacagctcaactggagaagtgatatatagcccaatcaggaaggtgttgctggcgatgattgaggctgcatttgcaaccataaaccttgaatcacagtcagggacgcatccaaggatcggtgtcgtcgatgacttgtccttccaccccgtgggtcaagccacaattgaggatgctgcttctttggctaagcaggtagcatctgacattggaaatggcttacaaggtatgtccaaatccaaaaatcagctgttcaactattttgatcttcctcaacgaattgtatatttgcagtcccagtgttcctgtatgcagcagcccacccaacaggaaagtctgtgggtgcaattcggcgtgagcttggctactaccgtccaaattacaaggaaaaccagtggttaggtagcgtactccctgatgttctgccagttaagcctgatgtgggtccaactcatgtctcacataagagaggtgccacaacagttggcgttacgccttggattgagggctacaatatcccagtactgtctaaggatgtcccagctgtgaggaggattacccgcagggtgactggacggagtggagggcttccaacggtgcaagctcttgcactcttccatggagatgattgcacagagattgcatgcttgttggatccagatcatgtcagtgcctatcaagttcagaccgtggtggagcagattgcaggagagcaaggacttgaagttgagcaggggtactacactgacataaccaaggatgcagcgctcgataagtatttgaagattgcttgcactgatgattgataaagcctgtatagactttatgtggctgacatccttgtaaccatcaatgtctgaagtgggcatccattgctgtttagttgtctattgtcatctcaacctgaatgaagaactgattctattttatactttgtgcacaaaattttcaataaatcgagtactagatacaatacagattaccaaatcaaactataggttagtttctaatattataagcgaaacaagcaaatcaaaataatctcaatctattgatggcctgctgttaactgataaggacaaatggacatagattgtactatactagttagtagcacaataaagacaaatggatatagattcttggaatcgatgaggctgaatacacagtactgagatgagagatttgtaaaatggaaacactgtattagttggcatgagtttgtggatatcaagataaaacttattttattgttataggacaatggcttcatcttttatgcctcattctgtaagagaaccccttgctcaatcactgagcaagtgcacactcgttgaagaatgaacagggtggggtgagaggggggggggggtcgcaaagggagaaggggaagacgacgaaaccatggagcccaactcatgtttctca

SEQ ID NO: 3876 - DNA, 6366 bp, Sorghum bicolor
ccatagataataatagccatgtatgtattattatttgccattataagaatagaaacgaacccctaaaaatctaagtcacctaaaccattgtggaacaatataaagaaaatctctaaatttgcatgtaaaattctggatccatgatgtcataagacatgggctatagtaataacttaagctaaggtgtcaactacatgtatattggatgcacaccgataataagtttatcacaattggatagagattatagagtagttataaacatattgttggaatatactctctatttctgaataaatagattcttagagttgtcttaagtcaaactttttaaacttccactgaatttctagaataaaacgttaagatttatggtatcatcaaattagtattattagatttaccatagaatatattttcataaggtgctcattttatgttatagatgttcttattgttttcgataaaattggtcaaacctaaaaaaatttggctggtacggattctagaaattgatttatttaggaacagagggagtaataagttagttgcccacctctcctaataagcttaaacttttggggttaaactaatcggtgcatgcaattcagtattgtatcaaaggcagaggtctcaagtttgaatcctagttagcacaattaaaataaaataattattactctctcctattccccgtctgaggctcgagggagacttcacgtgagagagagtattgaagtttgcaactcaatataagtgaactgcctatctctatttatccagcttaaacttttaaactgatcggtgtttgcaattcaatatatattatttagaaaataattatagagtgcacaaaaataacttttctcttggtgatagttattattgaacatgaacatgtaatgcttaagcctccggagggcatagcccatgcagatgcaggagcacatgttgatagactttttgtacggaattgatgtacggatgaatataataaaacgacgaagaaaacaatcaacaactagaaagaaagcaattgagagtcaggaacaatacgtaagaccccctgaaacctagctactagcaagtcaaatcaatggtaaaaatgtcagctatcatcgtatcccttgatacgtaacccatgatgaataataaatataattattatcacttaatttaattaaggtgagtctcattagagttctatctcataatatccaagactctcgtctattgaaaatggtgtagataggtttcatctcgtaaaactttcatcacctcttctttacaaatattataccatattagtttatttaataattttaataaaactctcgtataacacttccagatcgagaccgggataagcagacacggcaaaaaaatgtgttttgaccggtgcaaaccaaatacagtaaacgtataggtgcctagctggcgctagcttttgtcggccgcgcccattctaacgtcctagtcattccgtcgtaatataatcttgcggcgccaatagatagggcgatgcgtcgtttaaaatccgggctttgatttggcgtcgcgtgcgcgtataggagagcgcattcatgcccgccgagtcaaatttcgcaacttgttgcgcgccattgcgaagtaaacgatgcatgatggcagcacaagcaaagtcagtagcaaaacggtcgtagtagctagagctataaactagtagcactggttccgtttcctcgtgcaacttgacgtttaagaaatggccgaacgaacgaagcaagctgcagctgtgtaggaacacgggacttactccgtagcagcgaccacacacatactagtactactcgatctgcctataaaaggtagcaccggccgatctcggatggtgagctatattgaacacaggacacgtagaaagatcgaaaaataagcaataagcagagtggtttcagcccaactagctagctagtaacaacgaggaagatcgaagaaccctgagtgaaacatcgtcatcgatggttctcgctgccgagagctcgaggggtagagaatatggcggtgaccggccggcggaggtcgtcgtcgtcgacatcgagagcggcggcggcagcctggatggagcgtcgtcgtcgtccatcgtggataggcaggactcgctgttccgggaggcggtgacgggtcatcaccgccgtgctgccggcggcgcagggcactctgatcatgtacgtacgtacgtacgtacatacggttacacacggttcctctaatttgacatgatctcgctctctgcttgacgtgcaagtaactctccaatatgcatatgcaatgcgaataatgatgcaataataatggtggttgaattattagacacgtcgtgttcagtcagtccattgttagttttgcctattaatttgactgactatactgatcatcggccgtacgtatatgcatacgcaatgcatgcaggatagctgggggacgacgctgcggctggcgttccagtgcgtgggcatcctgtacggcgacgtcggcacgtcgccgctgtatgtctactccaccaccttcggccacggcggcgacggcggcggcgttggccaccctgacgacatcctcggggtgctctccctcatcatctacagcttcgtgctcttcaccgtcatcaagatcgtcgtggttgcgctccacgccaacgatgacggggatggtacggttcgttcgttatatatatagttcctgcatgctactctctttgatttgataaagaaaaatactataatgatactgtagtaaacaaatgtaattaaacgatgatgttgctatcgtcaggaggaacgtttgcactctactctttgatttcgagatacgccaaggtgagtctgctcccaaaccatcaggctgaagatgagctggtctccagctacagcaccaaccttgggaagccgtcggccacactaaggagagctcattggctgaagcatttgcttgagacaagcaagtcggcgaagatctccctgtttctccttaccatccttgcaattgcgatggtcatcagcgatgctgttttaactcctcctatttcgggtactgcataaacaaactcttctatgttttacacagataatatcacctctcaacgtctgtagaggttttaacaatgccatctgattcatgactgcttgtccttttaaaaatactcagtgctctcagctgtcagtggcctgaaggaaaaggtgcctgatttgaccacaggtaatatatgggtgcatgcatatatgtgcatcaggacgtgtataaaatattttctttttcaaagatcatgtcatctttcctgatatatatgatgcctgaaaattttcgcaaaaaaaaaatgatgcctgaaaagattcaacttaagcttttagaagacattacctttagctaatatacttattacagactagagcatatataaggccagcattttcttagagcatatataaggtttgactcggtcaattaagctacaagatcagctaatgcaaagcttgtttttatttttcgcacagatcaaatagtctggatcaccgtggcaattttggtagttctgtttgctatccaacgcttcggaaccgacaaagttggctacttgttcgcaccaatcatcctgctgtggttgcttctcattggaggagtcgggctctataacctgatcaaatatgatgtcggtgtattgaggtccttcaacccaaaatacatcattgactatttcaggagaaacaagaaggaaggatgggtctcacttggtgatattctccttgtttttacaggtaacattttgcaaatatacttagataccacttagggaagaacgaacttctgatgtcactcagaagaatatatgctgcggatataataaggattaacatatattataccatgcatgtactcttcacaggaacagaagctctttttgctaatctgggatacttcagcattagatccattcaggtatgtgcgaaaatgctttcatgcagatatacagtaacatgataatagtaggttcatattggttaataaagtgacatagaaaaatagatacctaaaccttcattcaaaaagaagaatgttccaaaagaagtaggcgaattgtcgtcgtactaaacaacttttcttttggatcttttcagttaagctttagccttggactactgccatctgtattgcttacttacatcggacaagcagcatacctaaggaagcaccccgaacattttgctaacactttctttagatcaactccaagtaagcatatactaacatatatttagtatatacatctctcgtttcactataaataattgttctgaaacttaatgggatgtgtgcttctcgttcttgtaaattcaggcgctctgttctggccgacgtttatcttggcaattgcggcatccatcataggaagccaagcaatgatctcatgtgcgtttgcaactgtttcacatttacaaacactcagttgcttcccgagggttaggatactgcacacgtcaaagcggtttcatggacagctgtatgttcctgaagtcaatttactgctttgcatagctgcttgcgtcgtgactgtcagtttcaagacaacgaccattatcggaaaagcccatggtatgaactgtctgtgcgtttaaaactttaacgtcacatattgcacagttaaattctacaaacctctctaaccatcatgtttcctcataactgacagaaatctgtgtcatccttgtgatgctcatcacgacactgctgatgacaatcgtgatgctcttggtgtggaaaatcaatatctggtggattgcgctcttcttcatcgtcttcgttccgaccgagtccatctacctatcatctgtgctatacaagttcactcatggaccatacatacccgtggccatgtcagcagttctaatggtggtgatgattgtttggcattacgtgcacgtcaaacggtacaaatatgagctgaagcacaccttatcccctgccaaggctgaaaagctgcttgagaagagcgatctgaagaggatcccaggagttgggctcttctacactgagctagtgcaaggcatcccacccatattccctcacctcatggagaaggtcccggcgattcactcggtcctgatcttcgtctccatcaagcacttacatgttccccatgtcgacgcctccgaacgcttcctcttccgacaagtagagcccaaggagtacaaagtatttcgatgcgtggcgcggtatgggtaccgggactccattggtgaggaggcagaagattttgtcctagcactggttgagagcctccagtactacatacgagatgtcaacctctactcagtggatgagatgcagaatgttagctacccgatttctcgagatcagagcttgtctcgggacaagccttctggaaggcatgccatctatgctgaggagatgattacgccgatccaatcgttctccgagctcacaacactgccaaatggttggagcaatcgtctaccacagtttcaggtaacaaaatctactaaataatttagctgggctagtttctgtgttctatttattgtagtatagtagaattgatgatggttgttatgagcaggcatcaaagatgaatattgaggagttagccaagattgaggaggaacagaaggtgattcaaagagaagcagagaaaggtgtggtgtacattattggagaggctgaggtagtggcaaggcctcagtcctcgctccttaagaagattgtgatcaactacatatactccttcctaaggaaaaacttcatgcaaggagagaagatgttatcgattccacatggcaagctactgaaagttggaatctcatatgaaatctagagattacgtaacgactattcagagagatctatatatggtttcttaattatacatatggattgatcggtggcccactaggaagtacttgtcgaagtgccagggaaagaagcaagcacatgcacagcagctgggatctgggtatacttctgcatggatgatctgtaaggtagttgtacaatcatgtaacgtgtagaatagttaacaacaggatgctatgatgctgcacatggactaatttggtccacgtgtggctagcattcgtgtctttgtatgcctcatatatatgtttacacgtgtatatttgttagtgccattgttccttttgcaccatgcaaattttatgaagaaacaaaattggataataatactccatcgtcccaaaatacttgatgttaatagtaaaacatcaaattttctgaggcgaatacagtagtaataaaattcatacagaggaaggaaatgtggacagcttgccttccatcgtcctttcctagtgggcc

SEQ ID NO: 3877 - DNA, 2950 bp, Sorghum bicolor
caagccccgagggcgtggaattcgaagctggacaatgaattagttgctctgggttttgtcagaagcaagttggatcatgctgtctataggagagacagcgggagctcttttctgcttgtgggagtatacgtggatgatttgattatctcaggacctagtagaagtgacatcagaagtttcaagtcagagatgaagaacaaattcagtatgagtgacttgggcctgttaacttattatctgggtattgaggtaacacaaggagagggtggagtcactctttgtcagagctcatatgccgctaagatccttgaagtggcaggaatgagtggctgcaatccatgtgagacacctatggagtgtcgtttgaagctcagcaagcaaaaggagagggaagcagtggatgctacaatgtatagaagtctgattgggagcttgaggtatttggtgaacacccggccagatttggcatttgcagtgggtgttgtcagccgctacatggaggctcccgggaaacaacattgggcagcagtcaagcatatcctgagatacctgaagggaactttggggtatggctgcaagtacgagaggggaactgagatgaagcccgtcctagtgggctatagcgacagtgattttgcaggagatgttgaggacaggaagagcacttctggtgttggctattttctaagtggaagtctggtcacctgggcttcacagaagcagaaaattgtgacactatcctcttgtgaagctgagtacgttgcaggggcagcagcagcatgccaagggatatggttatgccgactgatttcagatatgctaggaacaaaggagatgatggtgaagctactcatggataacatgtctgcaatcgcgctcagcaagaatccagtgcatcacgaacgcagcaagcacattgatacgaggtatcacttcttgcgtgaatgtgttgaaagtgggaaggtggaggttgatcatgtcgggactgcggagcaactggccgatatcttcacgaaggcgctggggcgagtcaagtttgtagaactcaggagtgctttaggagtcgtagatgtgcatcaagtttagggggtgatttgttagctagctaaacttgtgcatgatgtctaataatctttgttctagtagaagtcgagtcgggttaggggtggacatgaacttaggcgtgcaaggtcatgatcacccgagtcggtttaggactctcgccatggcgtgctcagcgcacgtggcgcatgtcgagttgtaatcggtgtgggcactttgtatgtcatggcgtggggggcttggactcaagcccgagcctgctataaaagcaaggaataaacgatcatatgggctgcggttgcggcagtaacaatagcctgttcttcatctcgtcgacttgctcttcgtgttcaattctcgccgcggtgaccacgcactcgccggcgtccgttcctggcgcgttggaggcgttctgctccaacaatgaggacggtgactggcgatgttgcaagacgcgtcttcgactatgatttggatgagactccgatgggtgccgagtgtttggtgtgtgccggtgctgatgccggtgctgaatgctcgtggtgtgcttgctttcggtgcttggactgcacagaatcagtgatggagcaccatgccgagcggtgtcgctgggaagtggcacgaggaccccatgtttgttgggaccaacgtggagcaccagcacatcgtgatatgaaaccttcacattgctgattgcttctccttacaacactgcatgttctgagctcatggccttgcctcttgcctgtctgagatggtgattgcacctgtctgcatcgtcttctctttgccctgacctataaattcatcagcttacaaccaatacagcaatacttcatcagcccatcagcaagctaagcacaaccaccttatacaaactgcagttctctgaatattcaaccatcagcccatcagccataaaagcaggagaagcaaccatgatcagtgccaagagacttgttgagatggcaaagaagtggcagagaatggctgccctggcgaggaagcggctgacggcgaatccggggaaacaagccgccgatggttcgtgcggcgcatcgacatcggtggccgtcaagggccactgcgtcgtgtactcctcggacgggtggcggttcgaggtcccgctggcttatctcggcacagcggtgttcagcgagctcctgtccatgtcgcaggaggagtttgggtttgccggcaacgatggcaggatcacgttgccctgtgacgccgcagtgatggagtacgtgatgtgtttgcttgggcgagacgcctctgaagaggttgtgaggtcgttgttgagctccatcatctccatggtcagaccttgccaccacagcgtcagtggcatggtgccatcgttgcgccaatcagctatctgtgtatagctatgattatattagttcatgatgtatataataatagattcatttaggcggatgtatattctggaatcaaaggaatcgcacaaaaggttgcatgaatgtggcactcgtggcacgaatctgggatcacaggaaatcccagaatagcatgaatcacactatttaatttgtttgcttttcgagagaatgaaacactgacgtgatggagattagctgaaagccagcatcaataatgtgtcgcttgggacaaaggcaggatggtccaagatgtattggtgagttcctttgcttatgcctgctctatcttccttcctgccattttagatgtgtgtggcatgatagataaaatatgatagaccaaagttctattttacatttggataattcctattgatggacgaacttacaaattcttttatgcaggtctcttcagatttgagtattgttgaccttgatgcattatcacttctcgaagaatcagacggtttaaagtttaaacaaag

SEQ ID NO: 3878 - DNA, 8190 bp, Sorghum bicolor
gctttgctcaaatggggctcaagtgagagacaatatttttactcatatttgatttacaaggcaagaagtggttgtagtttgttgccactggatcgctcagagtatattccattagaagtaaaggttatagtaataaaacaaaactataaatgggagttgttcgtctgtctcgtgcctcattttgatctcagatatatacttgtctgttagtagcagttatatgattttactttagctctggtgcaagaaggatttaagtatcaccagtcaacagagttgtatattatattaatgtattggatccctaaagagtcctatttgtcggttccaagtgtttatcaccttgaagttggacactttgtgatcaatggtcatatatatatcactcatttgtctgtgaattttcattgatgtgtatttcttattttgattttgatgacatttttttagaaacttgacatggtttgtccaagagagatattttacttcaatattgcttggtgcttgaaaaaacgcccaacatgattcattcatgcgttaaggatgtatttacataaaatttaattaattctatttcactatcactgatcaacttcttgctgtgtttcatatgtcttcttgcatcctatcagtaactggaacaataatattgtaaatttatgatcgtttgctgctacgataagctctacgacaagtaatattaaaatttgtttgatgttatgataaataatggcaagtaggcgatcctttcatttattgaaggttagaaataagtacccatctgttaagtgccaagtttcttgatagtgcttcgttgatacattctttccaattatgcatgtcataaccttgttgcttaatttttctttaagagtctgttcgcttgtcttataggtcgtactttttctgccagtcaacaatattttttctctcataataaatcaatgagcagtatttgataataattggttgaatggaatcatggagcaccttgatatatttcagtaatttgtaatcacaaagcaccttggacaaataattagtttagaaaaggattttttttatggtgttaaccttagtcaatcttaagaatttactaaaaacattgcatgggaaacatatacacatgaaccatcatcttggtttagggttggcaactatcctccaatggaaccaagcatcttggaagttttgttgctcggatatgaaacaagtagatatttatcttatcccactatatgtagaaaccaaatattggtgttacacatgctatcataattgtctacttgagcccctatttaccgtttgtgtaattttcaaggacatggcccgtacagataagtctgaaaatgatcaaagttattagttgcttttttagaatagatgtcattttaatgttgatgtttaattttataatattattatattattgtgcgatctatgtattttaatataattttttgttgtcccgtagcaacacacgagcatgatactagtgaaacctaaagcttgtgacattcacatgaaatttggaacttgaaacaacccccccccctcccctccaaaaaaaatgatttcttcgcaaaataatgtgacattcacatgaaatttggaacttgaaacaacccccccctcccctccaaaaaaaaatgatttcttcgcaaaataatgttgtaactatagactcctataaagctcttttaaaaacctggatgagactatcggaggctcggagctatagaaaactctggtcttacatgaaacatcaatcaaatcaaataaacaccaaaaaaggaaaaatgagctcatctgaagctgcccaaaaaccgtgctaagtccgttcagcaggctaccgtgtggttgctttctttagcgaaaccggtagtcgctttctttccccagatccggtagggccgatctgggccgtccatcctacatcagacggctaaggcaacctcagccgccgcaacttttatccatccgtttggcccacgcgctccctccccagtctcctctctctcctcgcgtggctagggttttgactcctacaccagctccgccccacgccgccatgatgcagccgccgccgccacagcagcagcagcaatgggcaatggcgccgccgcccccgccgcagtactaccaggcgggacaccccccgccgccgcccccgcagttctaccaggcgggccctccgcctcctgctatgtggggccagccgccgccgcaagcggccccggccccggcgccggcaccgtccggcggtggggcgggggacgaggccaggaccctctggatcggggacctgcagtactggatggacgagaactacctctacagctgcttctcccaggccggcgaggtgatgctccgttgccgcctcactgctgcttgtaaatttgttatttaccgttaagacttcagagtttgatgatatactgctaaagtaggaaagttgtgtggacgttatgttactgctaaagtaggaaagttgtgagtacgtgtgtagtgaagttaggtatttcctaatttgcctccccaatgaatttggcatctggatttgctaatttttaagtgcaaaaattatcgagtggcggttgattgggtggtaatattacattttttttaattgaagtggcatgagacagttcccatctctgttaatagaaagaaaggtacaacccttaagggtaaagcaaaagcaaaagctaaagccgtttacaacaacggctgagatcacctatataggtaggcacgatatcagacattttctttgcctttgctagtgcccaagttctagcttcatccttgaatttttttcaaagagtgaaagggtttaagggctgacaactctttgtgctggaaaactccttgaatcctttctttccatatctaccaaatcacttggataatgagggtaatcaaagttttttactgcacattttgtgtgtgcgccagattagtccaccaaacatgtacctatccaccggcggtacagttggtggctgcaatatggtggaatgagacccagtccactaacaagttctacatcctctttatatagcaacatttgactaacaagtgatgagccgtgtcatgtgtgtgtcaatcgacttagggacaaaagatgttttatattagtacttttaggtctggttgatttttgttttgttcagattttaaagcgaagcagttaaagccatagtagaagcgaccatatatagaactgcggttttaaataccattaattggtcagcaaacagctgcataatagcttcgcgtctgctgaggaggtgatctaaatcatatgtgctgtttgttttattgtttgtttgctttttttagccttttgtattaactgtgtggtgcttgtaatttattcttttttcgtgtgtattttattcatgtgcctgttgtagcccctaggaaaaattccaccggactacatcgaatgatgtcagtaaatctttgagggatgttgtgaggtttcataatttttccgtagttaactaggtaaaatagttcacatcttcaggaatgataattcctttctcagctgcatctgaatattactctttggacagcacctaacaactggtgttgtggtaacctcttaccgaaagggggcttggtttttcttgccgctcttaatattagcatatgtattagccatgggataatgattgagctgatagattactctggcattctggggtgcacaatagtttatttttgtcagttcacaaaagctgttggtctcttttacttaattttgaagtttttaagtgtagtttgacaattttcttgctatgtgtttcaatgggagtttttgcacctttagttttgccactcttcatatgggattaatttcttttaaaacgatttgctgctaactttcatgtatttgctagatttgaacttaacagtgcatttattagattttgtagtacatgatgcaaattgttcatatttcatgtactgctagcaagttattttgactgcatttaggttattgattcaattgattggataattacagattgatactaggtacctacagttttgagttttcaaagtttacatagttttgtttacacgattcatattatgtcatgctacgttgcaaggttcagatgcttcacatgatatttgcgttgccaaggtttataggttaatgatagttacgtaatctagcatcctttgcctaggaggtgccaccggagtgcctagagccctagaccaactgatctagcatcctttggcaacagaaaccatgacagtactagtatgacccagcttgaagggagatactgaaatattgaaaaaggactgatgggacaagtttattgtgccttcttggcctcataagtttcaaggcttgatgtttatatggttgactctaatcttgtcccaattcagtataaatgcacttccatagttggtaaagaatccgggtctttatatgtaggtttttactctcaaactgtttgaaaaatgtcttggtggcctggattcttttgtactttgagttcagatgaatctaaaatccttatagatgactttcttgtcaaaataacatttcataaactagtacctataagaggaaatacgccagttttgctttgttatccaaagtaattgcaaattgccttctatctatcagtttgtttcagttattttttttcaatattgttttgggtgactttcaggatcatatttttcaagtggttattttgtttagattcattaagagttggagtcagccttataaaaggcacattattgtaagttatgggactaggcaagaagaacaaacttatctatgttgtataaagttacccttttcatctactgtctatttctccctattcatcaaagatgcacatgttgtataaatttacccctttcatctactgtctatttctccctattcatgaaagatacacatgttgacatgttgtctcttgctgcataattttctactgagtataagcaaagattattacaccaggatatagtattttattttagatcagatatcttattccttgccttctcatacttactgcatgaggaactccattgtaatgtattggcctaatgttttatttgcttatataatgttcaggttatttctgtgaagataattcgaaacaagcagactgggcaacctgagggttatggttttattgaattcggcaaccatgctttagctgaacaagttctgcagaattataatggtcaaatgatgcctaatgttaatcaacctttcaaattgaattgggctaccagtggggctggtgagaaacgtggagatgatggttcagattatactatatttgttggggacttggcctcggatgttacagatttcattctacaagatacattcaagagtcgttatccatcagttaagagtgcaaaagttgtcttcgacagaactacaggccgctcgaaaggctatggttttgttaagtttgcagatttggatgaacagacacgggcaatgactgaaatgaatggacaatactgttctagcaggcccatgcgccttggaccagcatccaacaagaagaatactggtggacaaccacagccatcgagtagtatgcatccttacttcttatctaggattttttattctgtgagtggaatctacctttgtacaccaaaattcattccctccttcaaccttgtatcttcaatcctttatttacttggcatcgactcacctagtctctttatgagaagccttaaatatatatatatcctactctgctatttttgtgtgtgtgccctgcgttactatttttctatgtcatagatgttgtgtcagtagctttgttcctttgatttggtatatcttcattttcctatgaatttatgtccttttcatttttgagtaataagcaatttatggtttcttaagaaatgaccttagttgacatatgaggcaggcagatacctttttactccaaaaattctgccgtgattgtcattggatccttctttcactcaacattgcattcaacaaaaactttgctaggccgtgactgtcattggatccttctttcactcttcattgcaatatttttattttgtacctggaatattgttgaattattctagttttgaatgcaatgttttgcatcttgtgattggacaatttagttcaagacatttttgttatctgttatgaacttatgatctgatcaggttgacacatggcatacttgtgttgttaccacccatgaatgattgttgaaatttcaaatgtttgtggatcaccatataactctcgacatgttcatgatttgcttatgaatctgtgactacaaccaaaatgtgtagtgtcttactctttccattcttctgcagctatttaccagaatacccaaggaactgattctgatagtgatccaaacaatactactgtgggtatctgtaaatagttctctttttcaagttgcatgatggatgtttattttctagactgacttcattatttgcaggtatttgttggtggtcttgatccgagtgtgactgatgagcttctcaagcaaaccttcagtccatacggagagcttctctatgtcaaaatacctgtaggaaagcgttgtggatttgtccaatattctaacaggtatgaagagtatcctcttttgtgttgttattcgatagcctcgttatttcggtttagtgctcattagtgatgctgtcttgagtatcccgttacattctgaaaccttttttgtgtcaatattttagtgccaaaattagcacctaattggttatagtgattccatattccacattagctgagtgtactgtgtaaatataaaccatatgaaaaaggatttgaaatttatagtggaaaatgcttctaaagattttctgaaccagatactactatatggattttatcttgattaaaaaaaactatttcctcagggcttcagctgaggaggccataaggatgctaaatggaagccagctgggaggtcagagcataaggctctcatggggtcgtagccctgcaaacaagcaggtaacttttttttttaatctaatttgcgtgccctttacttaatggtttagttcacattccctttgctggatttttgttccagcctcagcaagagcagaaccaatggagtggtggtggctattatgggtatccccaaggatatgatccatatggttatgctcgcccccctcaagatcctgccatgtacgcctacacaccatatccagggtatggaaattaccagcagcagccaccacagcagcccccaccacaacaggtaaaacatgtttctaaggccccagcactgcatttgttgatcagtcatgcaattgtgtgccgctaagatgtactgttttcccctttgcagtaagaatgatgatggcccgagaggatcatttacaaactggtcgcaaagtagttggggaaactttggtgcattggcatgagaaattttgcgacggttgcttgtgttatattggcccaacgcccttgtacacgtagcctgtgttgtaacttaattttggcaaggcctagagtgactagtgtttcagctgtagtaactggattggacatttttccactgttcgagaagttttgtcgcaaggattttcttcaagctcttattgctggaatcttggagaaagttaatttgttactgtctgcatttcatgtaccgtggtccatttgctacgcgcattgcacattcgaactagtattcatcgttaggaccggcaatttcatgttcacttgacggcaaacgggacaattttgcttgacttaataattttacaattttctatgaaatacattattaccaattttgttgttcagcaaaaaaaaggtattgccacgcaatgcatgtaattttacaccaatatcgtgattatgcaccacaatgctttattattgttcagcaaaaaaaagaaagtgagcttggagatttattctaaccaagattatctctgatacctccacatcaacactgcaatagggcaccgaaagaaaatatgatctctggtttttgtttttccacaaagcttgcacaggagtacgccatcccagtttcttttttcaactcttcgcatatagatctaaccacaaaaaaaacattatcaacacatgtaaatttttaattcagtcacaagattatttttgtaattttt

SEQ ID NO: 3879 - DNA, 2866 bp, Sorghum bicolor
gttgtttcatcgcttgtgtggtattggtaacttgtttatggtcgtgtacggcgtgtatgtccaatgaaataaatgggtgaagatatgctagtattaatactcggatgtcattgtgtattcgtgtgcatgatcacttgcttaggcagcacattgtactccatgtccgtgcgcaaaatacatgtggaggtgcattgtaagtggtgcagtgtacgtagtcggatactcagatgtctactggagacgcgtcctttgccaagtgcaattttctttgtggagtgctaaaaatcgagcattcagcaaagataagtttgctgagtaccaaacagctaacactcggcaaagggtgtcggaccgttacctaagtccgcattttgccgagtgttaggctttgctgagtgcctaacgctcggcaaagactgactttactaagtgccaggatttgccgagtttaagacattcggtaaactaattctttgccgagtgtcaagcaactggcactcggcaaaaactcatttttattttttattctttaatatatctttagaaaaaaaaactttgccaaatacctctgtcatgacatatggtagagaaggtacttttaagaaaggtaaaaaatgcctttgccgagcgctaactctctggcatttggcaaagacaccctttgacgagtgccagtctgtggcactctgtaattttttttcaattttgacctttaaacttttttgttagagctcctacagtgtttggtactccatgttcaagttcgatacatttcttgatttgtttgctatatttttttaatttctttcatttttttttgaacaagtcaaatttgaactgcaggtcattcaaatatcaggaaaaaatattggaaaaataatattcatgttactgtatccagaaacatgccataaatttttaatattttgttcacgaaacatggccaccaacttacaggcgaattgtttttaaattctacaaaaagcaaacgaagttcaaaaatcataaaacttataaagatgtcatgatatcgtatgtggagcttaggataaaaatttgaaaaggtttcgtaaaaaaaacttcgttgagtgccatgaccaaggtacttggcaaagaaattttgaaaaaaagattaaaactttgtcgagtgccctgaccatggcacttggcaaaaaaaattaaaaaaagaataaaaactttgcggagagccaactcaggcggcactcgacaaaaaaaattttttaaaaaaaactttaccgagtgccagcccaggtagcactaagcaaagaattttgaaaaaaaaataaaaagctttgtcaagtgtcgtcgcttggcaaagaattttaaaaaaaataaaaaaactttaccgaaagctaacccaggaagcacttagtaaaaaaatttaaaaaataaaaaactttgccaagtgccagcccaaacggctctcgacaaagaatttaaaaaaaaatgaaaagcctttgtcgagtgccggtgtcttttctttgccgagtgtccgacaaaaagctgttttgccgattactttttgttcgagtatgacacttggcaaagcctttgccgttgcaaacacgctggtactagttgggaagcacgcgcctggcctccattggccaccaaaccaacacgcggtccggacgtaccggcggcagcagtctaaggacgatcatcacaagacgctcaccattagccactcattcatccagatgcataggcatggaccatggtttgcttgtctccaacgaatgcatctatccacggaacggaccaaccaaccacttgcattttttggacagcatgcgcgcgcatgccatctcgtcggctactgaagtactacgtactagcgtccacgcctctggcctgctgcactccatctccatcccacctcatgaatcccagcgagccatcccattaattcccataagcactgtactgtgcctgcgcctaccgacgagcattgctgctgcctcggccagtcggccggcatggcggcagcgccggtggaggtgggcgcgcagggcacggtgggctcgctggtgctccgggaggtcgagtacttccggcggatggaggtcgccggcggccacggcaagaagagcagcagcaaggtcgttggagccagcggcggcagcggcagcggcagcccgtggagcgacagcggcaagaagccgaagccgacgacgaagaagaagggtgccgtagcagcaggcaatgggtccttcttgccgaggatgtgctcgtcggcggaggtcgccgaggaccccggcagcggccggagggagcggccgtccagggtccgctaccggcctctgggcgacgacgacggggacgctctgcctcagcaggactagctgatcagagggatatgtgctgcattattattcttcttctgtatcagattcagatccggagaaatctgtgccgatactaggtactggatgccatttttctcctccgtttcttttggcttcccctccgcttgttcagtgttagtaacatctaggactattagtagatgagaaaagtatttgatattatgacgactgtggtttgactcgtatccatctcaggctgttttggctgtttgcgtttcagactttcaagtaatctctattttgttatccatagtgaccgttgacacagaattgcttcacgatctgtcgacgaaagctggtcggcagtctaccttggggtatacccacggtagtagtttatcggtagacggtgcgcaaactacgaactcgatggtgacgcaggacacggacaagctttttatccaggttcggccgccgagttggcgtaatacctacgtcctgcgtcgggttgtattggattgtgttgagagattatg

SEQ ID NO: 3880 - DNA, 5254 bp, Sorghum bicolor
ctacactcataagccagcagaccagcatattccactccttgtttgctccaactttttagggtttctgaatcctacagctgttgttcatggaagatgtatatagtactttgtcttcgcttgttgccaaatcctctacacaaacttgctatttttctgaatcaaaacaaggcagaccttaattatggcttcccgttttctagggtgcccacttccacagttccacacgcatggacatacaaacgtcaccgcgggcctgatgatgccgctatctaccaaccaagcaacagaacaatgcaatcaacgatgaacaaattattagcacaaatggtgtccgtcaccgtaaagagcaagttatgttctgtaattcattaattctaccactactatgcatgaacccacgtaaatccactgtacgcacgtcaacgctggattctcactctgctcttggttttataaaaatcggcctcgcacattccaggatgggaggtgtgattcgggaacgtgggatgtgattgtgatcactaggtaattataatctacagaacctgaatgcaatgcaattatacatttgttaacatttatctcggaccctgataatatcagtaagaccacatttgtttatcacagtcatcagttaaaaagcacagtaagatctgctatctcccttcttttcttctacaaatctgattaagtaacgaagggatagatcagtgctgggagttgcttctttctgctggggaaagaagtcaaacacaacacatcccctgggtcctggggcaatttatttgttgcttttttttcttcgatctagtgaacactgggggaacttgtatatgttacataggatgattagtttaaaactctgaatgggaaacaaacagaccataataaaactagttttcccggcatttggcgaagacagggagcaaacagcagtaaaaaacttggtcaaatgtggcctaaacaatgcatcacgcaagctgctggcctgatcagataagatcggggcatcagcaatgagatcacaaatcatagagctccagcaaagcaaatcccctccccgatcgaccacgtgatctgcactcggggcccttgagaagcccgatcccgtcaccataattctaagcactgctagctctgacagcctgatcgatctgcactttagtttaacctgtataaagtatatacagtgccgactctagctactagtactaatcaacaactactccttgcattgtcagaaacatctcccgtgcaatgttcccaagtaggagtagtaaattacgcaaaaaaaaaagtaggagtagtaaatcgttggtaaatgacagccatcgcattcacacgatgatgagttgataggcgcaacaagtggagtactcagaccacagtctatttatttaagtttatcgatccaatttaccaaacgaaagtggtaaaaaatgatggaagaagactaactgatatcgcaataagcaaccagtactaactttatatcggacacaatttctgtctgcactctgcagatggcatctgcaccatgtagtattcgtatgcgtatacgtatacgtacacggtacagcctacgctaagaagccggaaatccatggccaatcacatggcatgatgcggcggccatgacagccgggagaaacgacgctggcagcgctgcccgagatctcgcggaccgatgtggcatactggcatggcaatggcaatggcaatggcattggcatccatccaccacactccactaccctaccagtactccatccatgcatccatcgctttccactccactcctatataaacatatcccggggacggcggacaccgccccgcccgatcaccacctctgctctgctctgctcatgtgcgcggcgcgaggctcgagcccgccaaaccagggaggcaaagctaagcaaccgaccgcttcctctcagattccatctcactgcagcagcagcagcctgcgccgcttgtgctactgctgctacactgccatggcagcgcgcccggttcttccttctcctgctctcctcttgcttcccctgctgctgcttgtgactgcttcgtcaggtgccgcccatggctacggccacggcggcgacgacgacgacggtgcgggtaagctcagggtcgggttctacaaggactcgtgcccggacgccgaggcgatcgtccgcagggtcgtcgccaaggccgtccacgaggatcccacggccaatgcgccgctgctcaggcttcacttccacgactgcttcgtcagggtacgcttcagattccattgctgtcttgtacttctagtagtagattagtagtatatggtttcactgcaaagtgcccggctgttttcttttcaacgggattcagtggtatccaatgcagcttctaatgattttcactcagttgtgcttgtgcacgaactaacctgactgagactctttttctttctctcttaaaaaaagaaaagaaaagaaaagcgtctctgaagctttatctggagaagaggcagaaagagcaaagattccccacacgcgaatctctcaaaagcgtctcattttctttgctggatgttgtttcgagttgaaacaaactactactactctacatcactttcacttcaagtgatactctgaaaatccgttccctgttccctgaccttcgtccccattggccaatcgtcgccattgctgcagggctgcgaggggtccgtgctcatcaactccaccaagggcaacaaggcggagaaggacgccaagcccaacctcacgctggacgccttcgacgtcatcgacgacatcaaggacgcgctggagaagcgatgccccggcaccgtctcctgcgccgacatcctcgccatcgccgccagggacgccgtctcgctggtactgtacgctgcctgaatacctgattccttcctggaagcagagccatggctaatggctgaggctgactgcaaaccaacaatgcaaacaggccaccaaggcggtgaccaagggaaggtggagcaaggacgggaacctctaccaggtggagaccggcaggcgggacggccgcgtctccagcgccaaggaggccgtcaagaacctgccggactccatggacggcatccgcaagctcatcaggaggttcgcctccaagaacctcagcatcaaggatctcgctgttctctcaggtacagtacacacagtaccatagtatatttattaatataatctgcactgtttcgacgggctttgtttgtttaattgtgcagctagtactgctgctgtatttcagctcatagcacgcagaggtctctctttttaaatgaagtttattttctggagacctacacctacactacacgtgtgtcggtgtcgcacacttgcactactgcttactgaatctgaaactgaaatataggaaatgtagcttatgtggtaaaaaatcaggggaaaaaaacgtctactgggtttttttatttgaagacggaaaatacaaagaaaaagagaaaaatgttacaacttggtatcgtcagatctacttattaaaagttattgacttttcatttgacgaagataaaaatggcttagattgtatcttgaatgaaatcctcaaggattttctttttcaaaagtgaagggcacaccactcaagaatcagttaatacggcatggtcatcagtcatcacaatctgtagtactgacttgttccatgttttttttttgcaattcatattggtccctgtcacgtggcatgtagaattatatagaccttgtttagttcactcaacaaaatcaaaaatttttcaagatttctcgtcacatcaaatcttacggcacatgtaaatatagtaaaaaaataaaaactaattacacagtttgcctgtaaatcgcgacataaatcttttaagcttagtttataattggataatatttgttacaaacaaacgaaagtgctacaggcctcgaatcaaaaatttttggaaactaaacaaggccatagtcttcttgaaaggtggcacttttgcgactcaagaaaaggcaagttaggaaatcgaaatgtggagacaagattctttcacatttcattatagtatacagtaccccttaatttctcgtattcggattttctctactgtatgtttttttctggaattgcttgaccccaagcaaagcaagttttcttgagatggcttgcaaacgaacttgcacttggctttgttgccatcgttgtgaccaaacagcaattactctcctatatatatccaggtgcccacgcgatcgggaaatcgcactgcccgtcgatcgccaagcgtctgcgcaactacacggcgcaccgggacagcgacccgacgctggacggcgcgtacgcggcggagctgaggcggacgtgccggagccgccgggacaagacgacggagctggagatggtgcccggcagctccacgacgttcgacacggcctactacggcctggtcgtgaagcggacggcgctcttccactccgacgaggcgctgctcaggaaccaggagaccagggcgctcgtctaccgctacagggacgccgccgccgggtcggagcaggcgttcctgagggactttggggtgtccatggtgaacatgggcagggtcggcgtgctcaccggcgaccagggagagatcaggaagagatgtgccttcgtcaactagcgatgtaatactttctagctagtatgtgatgatgcctgtgactgtcaattactcatattattacgaccgcgtcttgcctcaactatatattatatgctggagtttcgaaaagcctcttcgtttgagcttatttgtcgaatctgtcagtacttttctttcgcaacaaatcagcaaataatactttcagccaaacgattgcatttcgtatacagatttataggaagcgttttagaatttatgattgtgggtgtcagtctgggttgaggtcgtttgtaactgtgactttgatggaatgtgataacacgttccattttgtgtggacacgatgctgcagcatgctaccgcatatggcaattggcaaacaagaaacttgaaccgcttttgactttggaagggatttcgaggattctctcctcatcatgtaacacacctgtacctgctggcgagactgaaccgacagcgtgagcaagaacgagaggatattctcctcaggttcagaattcagataatgatgatgatgacttgatcttctccatgatacactgatacagcactggattataagacatatatatatacact

SEQ ID NO: 3881 - DNA, 2884 bp, Sorghum bicolor
tagccattaaacatggaataggagtgagccaatcagtggcgtagttactgtttcaaaagcacctatgacaatcaattttgtccctctctaaaatgcctcattttacaattaatgtcgttcctagttacatttttagaaatgacctatataaaaaataaattttgttcgtctctaaaaattgtgtgtgatagtgtcaggatcttgacatcatgtttggattgtaggacaaagtgattcgagagtaattccttcgagttacatgcacgttgaccaattaaactcaaaagattaagctggcttggtgtcccccctcacatggatgctttctaggcattaaacatggaataggagtgagcgacaattattttgtatattatttaatttaatttaattgtgttaattaggatttgcactcaagacctgtgtggctctaagttgtatgcaacaaccaactgaactgaaaagtttaaaccgatggaaagtgggcaactgactttatagttcaacagaaccaataaaaaaaccgagcctagctatatcattttgtttggattgagtcaggacaagatcccgccctctgtaattaacactgcagtccagttcattttgccagaccaacttatttcagagagaagcacccgtccagaacggccctgactccccaaaccgaacagtccgttagttttttcttttactacagaccaaagcctgcattgttcatactccatatatagtgcatatactcttggagagttttttcttcctctattttaatttcttcactgctgcactgctgctgcgtagtactatgcgcatggagtaaagaaaacccatgatcattttgggtgatgtataagagctatagcctgctatagggaaattgaaaatctttctcttgttgacatgcactgcattgcaaaaaattcagcagttcatacagaacgtactgaatttatccagatccgaaattcctccaaaattatgaggaaccgatgatgttgaccttgacatgttcgaactgaagaagcatggtaatatttttgacctagttactaatttactatatgccgtgaaatacggacctgtcctgaagaaaatgtgacctgcagctgctgaatgatgaatacgtcaaacaatgacgcatgcatttagggtagataaattagaaatagatcctcagcaagagcgtacgtagctaaaagcctaaaacccctacgtactttatattatctatctagaaagatcaagttgcagcacaaaataatagtacgtaggtggaactgttaacaacacagtcacatagacaataataccaacaagtagtgttcatgcgacacaaagtatatacagtttgcctttttctgaaacaaaggaagtacaaggcacatcgatcaaatatacagtatttgcttggtagctcaaagattacacaggcagaaataaaaactcatatatcaggttacttctcttatgagtacgaagattcatacacagacatcacttcaaaaatgtaagaggcaaaagactaataatcgaaccattcaaatctccatacagacgtactccgtacatcaaacgagttcacacactgctctgcatcaataggcaacacctcatatatcaggcgctgccggcctgatgcgaagaacaaacacacactggagtatttatacatcgatgttatcttgttattggaatacaggagctcctgatgtttgaaaacatatgtaacaacctccagggggaccaacataacatgaagaaaatacgcgcatatagatactggatcttgtccggaagctctccaaacctttgaagcaggtctggcaccacaaattatcctcaaacctagaaaagatagcctagaaataagtaatagatatcacaaacaagaatatgtcagatcgatacagatatagtaagtttgcaccagctttgtgaataccagttctagaaaaccatgtgaacaccgtaccagcaatccatgcaagcatagagagatggaaaggaagaaaaatgaatatacgaagaagcaaagagagagagagaacaagagaaacgagagagaggagagagaaaacgaagattcttccaatcaaaaggtaatgatgaaaactttcatcacctgccagatacacagaggaaagaggagtcaaagcaggccatcattacaccaatctttgctgctcctcgattcccaacaaacaagcaaacaaaaaaggcacagtggagtaataagatccaggagtggaagtacagtaccccacaacatactaagaacacccagggatctcacaaacactccagctaacgagtatttcaaaatcaaagagccagaccaaatttatatagtactagctcctaactctcgcgatatcatttgaagctattgctgaggggaatgaagcctggtccgagatctcatagattcaaggaataaaaattacgcatgcacaaatcatccttaaatcacaagcgagaccttgaaccagacaacattccactcagaagcaaatagcttcatatctttccctcatcttctcaggtccctctcccggccccctctctcatcttctcatctctatttgtttgcaggaaggggtgtgaggagcatgggtatctatagacgcaagcacacaggtggtggcgtggtccaggggcatggtcatgatatgtgaaatgattactgctgctaaattttgaagtcaccaaaactataaaaaaaaagatgaatgctcgctcattcgatgcgtttatcaaaccagtactgtatcttgtcactgacaggtaggagcaactgagactggagcctgcatgtcaatgacactggacacgtagaactaggcattgaaacggccacaggcacaaccacatggaaaaaaac

SEQ ID NO: 3882 - DNA, 7594 bp, Sorghum bicolor; identical to SEQ ID NO: 3636

SEQ ID NO: 3883 - DNA, 6175 bp, Sorghum bicolor
tttgctcattctgttctggtatgccaacataatgcatttttgcaccttgagattttccgcacagtcttgtttagggttgttacatccagagcatttcttttcccacttaatgggtgatgttcaggtccccttcttgacaattatatttgttctgtatgtcatgcagaacataaattggtggaagagaagtttgatgctaccactttgctataaggactgagccagacacaataacatcaaactgagataccgcagtttacaactttttcaatatggcagattgaagagcagcaagatcagcttccatgaagctggcaagctgcagtttgaacagcttccacctgcagtttgaagaaatctttctaaggtcttggactaaaggcgaatccttctgtgtcaatcttgccttcaccccaagcatgctggataccttgtaatgattgtagtacttgacaactgttaccaaagtagtggatgcttttctttcgcatgaagttttgttggtaccccacctcgtctgtctgtaagaaaaaatgttatgcatcctggtccatttcttctatgcatcctgagaaaatggtcagtataatctagggctttcttttgtcatgttgatttttgtatgtcctaagagcatctctcctatatacttaaaaagtactagcattctaggagatgaaagtggtacagcagatctcctatctcatcatctatacctataattttcaagagctcttaatcctctcttctctaaaaaagtataggagacatgttttagttaatatgaatatgatatgatatagcagtgctctaatattctaaatcctaaattatttataggagatgtaatacgagagagatggtgaaaattactcaaacgtgtagaaacgaaggcttgacaagggattagggattattccccatcttgtgtggttgtggacttgtggtgtaacctccaaaaggcccaaattcccatgggctttcggcctggtccattttagaagctgttcacgaatcacgatcactctgcgggccggcggcggcattgcctatttgcctgcaggctgcagcagtccagctttccgccgcacgccccgcacggccgcaccgcacctggacactcgcgtctgtctgggcacgatcgcgcggaactttttccaaaaccaaaaacaaatttagcaaaatttgagttaatgttatactagatattttctagagtattttctctgtctcaaattataaatagttttgttttttatacaaagctgtttctatttatctacatatagcatatgtttatagctatgtaataattgaatatctcaaacaatctttcttaattcctttcccccctatcctttcttttcttagctctgtattacctacttttattttcattttaataaattaccagcagggggatgcctctcctgttcaatgttaaaaataaaaatctttcttaataaaaatctttcttaagctctgtattacctacttttattttcatttggagagttatttattttaaaaatattctttatatcttttcatccaacaatttttctttatgttatgcgcactctctcgaaagccatttccgcttttcaacttcagctatcaagaaactctaaataaaatttgttaatatttgagatctaattgaagaattattggaatatttttttttcactaaaagctttgttggtgttaatacggaaggatatagttttttttctaaatagcaaaatacagtaattttcttgaaactgacatcagtgaagcgaacggcccggcccgtgtaagcgccgccggccgctcggcgcacggcgcaccacgcgctcagtgaagcgaacgcagatgaaggatgtcaggaaggcgaggggcaaaggggcaatccgcggctgtgcccctgccgcgcgcccgtgccacgcttcctagaatcctcctgtagctcaatccactcgcacggaggagcaacgcggaccggcggacgcggagcaatggcgctcgccgccccttcttccctccgccgcctcccgaccacgccaccgcatgtgctgtctccgccctgtgcctaccgcctccgctcgcgccctctgcgggagccccgtctctgccggagactcgtcgccgcggcggcggccgccacggctccactcgcttcgtcgcccaccaccgtacgtactccacgagctcctcccctccttacgaaaacccgacaccttctgacggcgacgctatggtctcgcaggcggacacggagcggaggaagcacgagctgctgcgcgcggttcaggaaacgcggcgcggattcgcggcggggcccgaccaacgcgctgccatcgaggaggccgtcgtacgtacgaggcctaatcggccgctctctatctctaacaatttgcactcacgcaacccggcggcgtttgtgacgctgtgctgggtttgattgattttgtgtgtcatgtgcaggtggccgtggaggagcgtggtgcggggaaggggacgccgctagatctcgcggcgctcgatggcacctggaggctgtgttacacatcggcgtcagacgtgcttgtgctgttcgaggcggccgagaggcttccacccctgcaggttaaacaacgtgtgttcagcgatctgtcctaattcgtcgttgcaattggatacctacttaaagccaccacctagcaatcaattacagatgccagcacatttgagatcgactgaaaatgtcagtaaattgccaacttccacgtttttaaatgtttgatactgagaattattgctaaaaagtgcaatacacgttcgttatgtttatcgtctctcgttaggttgagcacgtttttaaatgtttgatgctgagaattattgctaaaaagtgcaatacacgtttgttatacgtctctcgctaggttgagcacttgaagcatttgagataataagtgtttagcttctcgtacgtcaacaagatgctttctctgtatagatagttcattttcctcttactgtttatcacggctgtgtttgagcaactgtatttgagaaatttagggagaagggttggagccttgtgaccagggtggtgttttgtggatatatgcaggtggggcaaatatatcagaaatttgagtgcaaagatcgatcagatggtggaactgtgcggaatgttgtaaggtggagcatcgagaacttgctggaggtaaccattctatggccgttgttcctcttgggggtgttcagttccccaatgcctgaatactctctcattttttttccttccatttctctcatattaataagaaggtcaggctcctgatcgcttctcgagggatgtaaattgtgttggtaatctttctccaccaatcgagcgccgaatagctcgcttgtcatttttctgatttcaggttcggttgggccttccaggaggctgcaaggcaccagacccttttggtgtacctgcattcggtcacaagatgatgtgcggttttatttagatgtctgcctgctgataggccacattgactagcagtgctgcaccaatctgtcctaagtccaaatgcaattttggataatgagccaagcgtagaatttgcacttgggtagagcccaggtttgccagattgagcagatttccagtgcttgggtacagccaatgaattgagcttgatacgtgatgcagctgagtattccccggttgccgatagctggcattctgttgatctcaaataatattagagctgcttgaattgcaactactgtatttttctgcagtatgaatgttactatttgctttgcacagaccacatccaaaaaatgcttccctttttaactgtgcttttatattgagccgaacaacttgacatgcttgattattccagctacaccttgaacacttacatttaattaaaaatagaaagagtgacctccatataaatggagtatcttctttaccttgacagcacagctgctgatgtacttaaatgcatggacttggaatatataaagagtatgatagttggaggtgtgctttttgctccatatgatgataaaatgctcaccagtttcatattttcattgacaaggtcaatttttctttcagaatctagctagttttcatgttttaaagtacatcataactgtatttcatacatagaagaaattaacttgttactttgacatatttcacatcttctaagcttaccttcatattctgcatgctatgatgtaccaaatttattattcagcctttggccctcatgttttcagttctttcatgtttgattcttttagcgatctctataggagcaagaaggtgcaacactgatggtctctgcgaagtttgttgtcctgtctaaacgcaatatctttcttcaatttgaggaggtaatattccttttcaagaatagctaaatatgattactttattaaaaaatgcaaagcgaagagttgctaatttcatgatgaaacattcaatttccattgtaagaagaacatcatgagaaatgatgtatttgcttgttatataggactcttgtatcaatgattaagctacattataagttagcattctccatgaccatgattcaattcacatgcaagatgatgctatataaccagattttttttctgggactgacttgatgattcatacaagtgcaatattggaattttcttcccttttttggttatatcttccactgtcttaacctaaactctttaaagcattgttcttgcgttatcattttttgtctttagttttctttggccattaatcctttcaggagctctgagccatggctgatctagatgtggctattgctttctctgtactatgcttaaacatttgacacttaacttctgacccaaagtcattgtttcaactctttagccttcttgaacaacagcgatcttgccttcttttgtgaccttggttttgagtgttagttgctagaacttacaatccatcatgtaacaggtcgctgttgaaaatatcaagattagtgagcaactgcaggcattaatagctcctgctatacttcctcggtcatttttgagccttcaggtatatgccagcctgccaggttatatcaaataattgattgttgacttgcatattatccttgatttaacaaaatcttatttattctttcttggtcattgacaaatatgtgcgtcggtatacatttcgtgtgttccataatattgttctgaattctgttagtttcaactttcaagagctgctagtttccgtaccatgccacctgtcataacttttgttgtctacagccaaaaaggagatataaagtgaaaaatattatatttatgattaacatttgcaattttgcaatgtttgttgtatttctttgatctttatcatctaacataggacaagtgtttcagatttcaatgtagtgaatttgtttgtgcagatattgcagttccttaaaacctttcgagctcaagttcctgttggtggtcctgaaaggtaattttccacactgcttaagtttcctcgttccgtgttccctgtcttttgtatttactaaactgaattaaatgtcagacgatcacctggaggactatattatctttcttaccttgatcgtgatatgctcctgggtcgttcagttggtggtgggggagtatttgttttcacaaaagcacaacctcttacgtaaaggttttctgataaccaagagtatatcatctgatggcttggcagctctccttgagctttgcaatctacatttttttgtgacatgcaaatatgtgaccatcacctcattttagtttttaaagagattgccatgatctattttgagttttaagagattatgtgcaacatgttttcttttacacaccagttgtgttgaatatgtagctggctagttgctgtggatatataaagcttcctggatagttctatttcatttgagtgttgtacggatactagaactgtacctacttatttctaattttctggaattagtaatttgacattacgatcagcaaaactaatgtgcagatgtactccagttttctattctatttgatgacattgaccttttttgtggtctcagatgtgatttcaccttgctttccttctgttgttactttattgttactgaataatctagttgtatttttccaaaagttcagtctctattatttcaaatgc

SEQ ID NO: 3884 - DNA, 4210 bp, Sorghum bicolor
gcaagtataaagataagcatgttttgtcgatactggctacttccgctatttcaatcgataagatatttttatttttctagatatattaacttttactatatatttatatatgctgttatatctaaatgaatagcaaaaactatatattaaaaaagtcaaaacatcttataatatggaacaaagataagtgtgcacgtgctgcaatcattgttggttaaactattctactctctctccacaaaagaatacaattctcgtttttcgagaagtcaagacattaaactttgactaaatttatataaaaaaatataaacactcatgatacaaaataaataccttatatttattatagaatatatttttataaaaaaatatttaaagtaaaaaaattcttataatagttattataaatttaatcaaatttgaactactttgaccagcacttatatcctataattatattcaatcacggacgcatcaacaaagtccatttgtcatgtgattgccacgaaatgacggaacaacctgctcttagctcggccttcctaaacttccggagacaccaacgacgaggtgaggaaaaagtctagtaaaacccttaaactattaaactatttaggatggactgcttcactctctccaaactataaaatcaaatattctaccctttaaattttcaaaaccggtcaaataactccctcgagtggttttagagggtggttttgtctttttttatttttattttttttcgctaaatctttaaaaaattataataaatcacagaaaaatcataaaatgaaaaatttatttttattggactcttgagggcactcacaatgcagactctatcatagagtccaaagttatttattacctcgaacaatgtggacttagagtctaaataagacttggagtcttattttttctacctctttcttcaataaatatgttgtcacatcagcaaaataccataaataatatgtaattaattgtcttagactctgtgatagagtcttgcattgtgagtgccctgatgagtagatctacacagtgaatatatgttatggtatgatatattttagtacaaaaattttgctgtacttttaaatctatgtttttatgtaattaatttgaataattcatatatgtagttcctatggtccaattgtggttaaatttttatggctggctcattattatatgcttgaactatgataaaaattttatacctattggatcacgtataacttagttataggtttatttagctttattcttgttaaatctatgctttatctatgactaagttatatgtaatccagtgggtacaaaacttttaccatagttcaggaatacaatagtgagctcatcataaaatttttaccacaattgaaccatagaaactatatatatgaattatttgaattaattataggaaaacatagatttaaagctatcgtaaaaactttatactaaagtataccatactatatatttactgtgtagatctactcatcacgagtccaacaaaattgagtttttcattttataattgtttatgtgatttattatgactttttaaagattcagcgaaaaactaaaaaagaaaaagacaaaagcacccttcaaaactactcgagagggttatttgatcggttttgaaagttcagaaataaaatatctgattttatagtttagaagataaaatagtcggagttatgtagactttttccaccacgccatgatcctataagaaaagacgaggcgatgtctaataatgtctggtatggataaactatcggaggtcgggcccactgatcgagccgtgagccgagccaatctgagccgccgctggtgcagggagccagggacactgcgcttgcacttgcgactgagcttcgtgtcgacatctcccagccgctcgccccatgtgtgggcattccggtcatttggccaaggccaaagatcctataaatcaggcgccttcctcctccccggccgttgttgctagctgcgtgggtcgcgtttcacgggcgtagagagagagagagagaaagcgaagaggaagggagggagggagagagagaagggggggccaagccctacgcgtcgtctcctgcggtttcttcccacccctttcctgcctcggcttgcgccttcaacctttgctggtaagttccatcgcttttactcgacagaagctttttcccgtcttgattttggttttaggtggtgttagtctgaatcgttcggtcgcgtttatcctggatttggacgccgagacaaggctgtatgaggaattattttgaatttattgcggatgatggggggtggttgtcggttggggagggttttaccgttcagatctagtaaaattgcagtggtggaagggatgagaggagtggggcagttaggtttctgggtccacgtttgttttatttttggtgaggatggtttctggttcacctacatcgttgaaagggatgcgtgctgacttgtcaaggtcctttttgtttttgtttgtgtctgcgagattctatgtatctacttggataattttaaaatcgtccaaggtttcaatgccagctgtatcatccgcgactcagatttgggtttggtaccacgaacttttacagagttgaccaaactgcatgaaattcagtggattgtcatgttttacagatgagtgaacttttgtcaggcgcctgagtgaactttttacagattcatgacgtgggcaattgggtaaagttggcgcgaaatcattgtgctatagtttatttgtaattatatatgctagattaccgcactgttggttaatccgttcttatcataacaattgccaatgcacagtggtctacctttcttccacatattactcagatgagttggctcagcagtagcataaagaaatagcacattgtggtcatttcactagctcccaaacagaactctgaagcaaatttttgttttgggttgcagaaaattctgtcctcagaaagtgaaaggggcctgtgaagagttttcttgcggcagtgcaatggaggtatttggcaaatctgtgattgctgagcccagcaatgtgattttcttgtctgcaatccttaacacagaagggtcaaaccctagtcacaagtgtgacaagaggtgccagaacgagcacatttttgggaacatgtaccgttgcaaactcactggaaccactcacatctgcgacaaaaactgtaaccagaggatcctctatgacaaccataactcgctctgccgagtgagtggacagttttttccgctctctccattggagcagcaagcagtgaggggtatccgcaggaagcatgaagtggacagcaatgaaggctgttcctttaagcgcaggcgtggtgcacagctgcatccttcccccttcgagaggtcctactctgctgtgtctccaatcccgagccaggttggagatggcatggacctgagctagagttaatgagacttccttttcttcggccagccacctaattccgttctatctaccccctttcccttcgattacaggatggaactataagagcttccttctttgtagacttatatgaagggatatgagactccttagatgcaccgaataaatgtctatgtagtatctattctgtttcatgggaccttgttgtaactcgtgaactttgattgagcgcctattctgatttagtggtactttgatacaatcattcgctgtttcactttttttttcacacttccgatttagttattttgtgtgttttactttatgttcaactaattttctttctaatttcgattcttgaatgcgatttaatataattgagtggtgtacatgtgtctgtcaatgtaaatatgtgaaggattctttggtcctgtaatccaggcacagggaactgacttgcctttgctgactgaagtttttgtacagctgttactagtgttttgcttgacaagttcctaatcaagcttgaatcatttacggtttgttctcatatagctcaattctatctgttgcttaactcttttttacaggttatgtttctaacgcttaatgttttcctcatgttcttttttgtcttgtttttccccttaacatttgttgtatgcaggaccatccaggttctaatcgtttttgggaaatgttttgttctttttgtataattatattgctcacttaatttcatttgttaattaattt

SEQ ID NO: 3885 - DNA, 12690 bp, Sorghum bicolor
tattcagcagtatcataaagccagatccaaaattgaatgaaatcatggacaattcttacatttacatctaacttaaaaacaaacattctagatagtcctggacacccctcgtttaagaagattcacatcaagccaagcccatgttgcattgaacttggtatcaaacactacccatgcaggctgaaggtcattactttatttcgatacttttgtgtctcattcttgcaaacgtactcctcaggtgggacttcaacttggggttacctacctctaaaggttctacaaaagggtaccatttgcaaaatttgtactgcacgttttgttaattcacagttgcactatgcaatgcccatcttgactcttgagaatgagcacaattctgttaagtcattaattaaccccattggcaggactaaagtgagaacaataagactataattgctgcttaagctgcaatctaaatgaagtaacgatcttaatgagacaacctgtttcatttcaaaaatgaaggccgagctcatgtttttaattggatggcatcaagaggcagaaaaataataaacttgcaagatatacatctccactctcatgacttgcaaaacagcgagattctgaatttcataacccaaaccttcaagaacaactctgaccggataatgcacgtcacagagaatgcaaccgcaattgatgacaagcttgtgtaaagccgaagcagcactgccatagtccgccttcgccctgtgatgaataaccaaataacaacatcagctagaatgaatcaataatccgacaaagtatgattgatatggcattggaaaaaggatatcctttgaggaaaacatgaatgggggtgttatttctttaaaagcccatatgccaaaggcatctagagaaagtttgaagcttatatgtggagatttatataatataatggttggtttggaaggtccataatgaggtaagctttaaagactaccagctgatcctaatagaatggtgtccacttttacagaaaaaaaaagaatggtgtcgacaaagagagcaagatgatagtataccagcttgcttattctggcaaactacagcagaatgcttaatccatggcaagagtattgaaaaaatccctctcctatcttactaatcagaaaccgagaagcccgtcaatgaaaaattgacaactgacgtagaatttcatatttcactgcccatgacattctagttgacacctcttctttttatcagtgccaagtatccttttatattgaacttaagacttgaaaagttgtaatctcctattgtggttttcttcactcgaggctcaagatctaggtcgacctagttcttttttgttggtggaagaaataaggaagtatggaactagcagaattgaggttaacacagcaatatcacctaattccccaaccactatagccacgaatcccgcggccacggacagcacggcgaacttgttcaccgccgcccccttggacaacgacagcaacagaagcgcgcctccgaccactaggtgcagcgcctgtaggagcaaaccaccatagacactcatcagatcaacaaccgccaacaacggcaagagatggaggagccagtccaggagccaagcttgccgtcacctgcacgaggatgaggcgcgcgaggcgggatctgccatcggcgaccctctggtaccctgcaaaattgcgaggttataagagaggcgttggaagcgaggctttggggggtctgggcggtggatgcttacgggattcgacgaccatgcggtaggaaaagtctgagccatccgtgcccgacggccggccggaggcgccgcgccgcatcgctccgacggtgaggaggctgcttcgtccaagggactatgggagacagttcgcagaagggcggctagtcttcgactcttcgtgtcaaggtgaataccgaaagacgccttccgactgcaaacacggaaactgccaccagtcgaacagccaccccgagctccggctatggaggaaaccgccgccgcagccgctgcttgggcatctaatgccgccacgcccgccccgtccgagcccacgggatcccctgctgatgccggagcctccgctgatcgtaccgccgtcggtgacgatgagcacgactccaaggaggtcgtcctgcgcaggtacttcctccaggagtgggagttggtctccgcgatcctccgcagcatcgtcgccggcggcggcgttgccgaatccgccgatgtccacaggatccgctctatcgtaagcaaacttctcttctccctatatccaaatgccccctgccggtgaaccttagatctctgagagaagagtgtgtagctctgagagcaacattgacttctgtttggttattttgaatgatataatctgctttagcgtctgcttttaaatgcacaacagccaaattcgaagatatgatgtacaatatcttgcaaccttttagtcgtctaggaggaagtttaaactgtttggttgaggttaatctgtgaatgcacattttattgctaatataggatagcaaaagctgagctgaggtacaaatgacttacatgaatcaatcctatgtcctagaatgatatgttgtttaggaattacattctgctttccctggtaaaaaaaaggttctgtgagagagttatgactgatctattaccacctctatagaaaaaggtaagaggcaaagttccacatgatgtggaaactattagcattaggaaaataactgatatatttagataatacccagccatcctatttctgactttaagtgtaaagagttatactccttctgttccaaatgtaaggtgttttatcaagtttttctaagtcaaacatcttcaagtttgaccaaatttatagaaaaacataggaactgtccagcaccaagcaaataaactatagaaaaatcaatgctggatttaatgaaactaatttggttttgtagattttgctacattttttctataaactttgtcaaacttgaagatatttgacttagaacagaaccaaaacaccttacattttggaatggagggattattgattttacttggttcgcagatgaacgatatattagacatcaacatggtctcctgagtgcaactttggccactactttcagtaatattatgtttgtaaaacatagtaaagttgtgctattatgaaagcacttttaagaaaaatctgtacgtattatttccatatatccagtgttagtatttgtagagcatcaatctttgaacggacttttttaagtgaatgattgaaatgactttatgccaaaactatcatgcttaagagcttccatgataaatgttatcttttctgttgagcaatagatggacaaatatcaagaagagggtcaactactagagccatacctggagaacattgtctcaccacttatgtcgttggttcggtcaaagacaatggaacttggtgctggtactgatgaactccttgacattatcaagcctctgtgtatcatcatctacacccttgtcacagtgtgcgggtacaagagtgtcatcagattcttccctcaccaggtttcagatcttgagctcgcagttgctctccttgagaagtgtcatacaatgagttcggccactgctcttaggcaagagagcacaggagaaatggagactaaatgtgttgttctattgtggctttatatactggtcctgatcccatttgacatatccactgtggatacaagcattgctactgctgataacgtggatgggcctgaggtcgttccactggtgacaagaatattggacatctgtaaggattatctctccagttctggtccaatgagaaggatgtcaggattattgcttgcaaggctcttgactcgtcctgacatggcaaaggctttcagcaggtgattcttacaattatttttgtacaactcacattcatttttgtttcaaattgctgtagtaactgtaccttcgaaggaatcctatcactgaaggattaccattatcactaaaacaaagatttattgaacatcaatatcaaacactcgaccatttcattgtacttctattcaacattgcattgggcaatgttttgagttctcctgcttctctttattttcagttttatggactgggcacacaagatgttattgtctgtaacagatgactttgtcgatcaatttagatccattggtatagtggaagctttagcatcaatatttaaggtttgtatgtgtcttatttttttcagtttttaaatattctctacatgtggtggatatatcttttccttcagacctgtagtttctctatttcattttctcttaataggagttctgttacacacatgattctcttttgtggttgtcaacagggaatatatatgagcatttgctttcacgattacatatcgttaatttagtttgatgtcttctttttgcctcttcttgcagattggtaaccgtagagcactgcatgatgctgtttctggtacttggagtgattgttcaattgtgatgaagactaatgtctcagccaggagtccacttcttagaaaattcctggtgaaactggcccagagagttgctctcattagcttgcctccacgttcgccatcatggcggtataaggttttcaatctcttattgttgttataaataggtctcagtatttcacaatcatgactcatattttgacttgaatatgaaaaacccaaccatatggtgcttaagaaatcgtttttttttggcgcacacagagcatctagattgtttgttacatgcatgtgtccttgtaaagttaataggacatttagtatgaggtaaaagtggtttattgttgcagtacctgatacttttgtttcagtacataggtctcctgaaatttattaggacatctgactgacatgttcttgcagtctgattatattgtatgcaccatgtagaactccaaatcatatccagatcatggaaaactgttcaacagatttagatatgcgaaccactcatagagtatcagttctgaagagcttctgtactatgctggagctccaattcctgatctgttaaggaaacattcatagctggattatttagagtacacaactgctgataggatctgctgactctgaacagtaaagttctcatggaaggtgtcttgattaaacattttcaatacaaagtactaattcttaatttcttattgggattaataatgggagttctttttgagttacaatctgtcagaagtcaattttgggtgatttttttgcatagaaacacttcaacttgtcaatattttgtatttatttctggaaggaagttcacgtatatgctggattctacatcggagaatacagtactctcagtatttgaatctggtgagaattaagcagatgccaataaattgtcttggcgcattggcataatcatgtaaatgtatcagctaggtggcagtaaactaaacttcatccaaagcacatcgtgcctttaacaatgccacctgctttattgactgttcgtgtgagttccgcagatgactaacaaaagaacgaaataatcaataatttgttacatgttttacattttcttttatgagaatgttttcatattttgatttgtttcttcagtctagtcttctatgctttgtagcttgtaaggggaatttctaccacagggctcactgttttgacctgatgcaggcaattagcagttccttgggtgcaaacctttcaagttatacagctggagaagtgtattcaagtggatcaaacgcacgagttaatattgatcatataggcatgtgttttttggaagaagatatggatgttccagaaatagtagaagagattatcgacttgctattgactggtctgagggattcagtatgttcttatcctgatattatgatgtaaaattttgattttattttccagaacgtggtggtaatatttacagttatatgattgcttgtattgtaccccattttgttactttctctctctttgcttgccggcttatatcctcttttccctacaaggaccttcacctgccagtctacctccactgcatttcaaatcttaacaaatattccctcgtttcaaactgtaagtcgttctggcttttctgattacatagcttttgctatgcatgtagacatacattatgtatagacgcgtagcaaaatgctatgtatctagaaaagctagaacaacttacaatttggaatggagggagtacataaaataaaacacacacacagagccttttattgtttgaacttctagaattattcatcagtattactgaactttaaatccatttattaatcaattcttggtttgattgcttagaatcgagttggtgaaacttttctgtgtagattcctgtatgctactatgatttgtgaacagggttgcttcaaacaacacaactgcctcccactctaaggacatgaatgcaggagcaatggtggtatctgaaatgaaataaattctcaaaactgtgtatatgagaacttatgtacacaatttgaaatcatgactcactgtttcatgtactttcttaggaaaacagtagggagtctggcctacttgctactatgattttttgcatgttaaaataccaaagtattattgggccatgaaatgcaattactagcatttgtcatcccagatgaagttgcattaagggaataagttgttagttattcatctttcccatttagtctcaagcactgctgtttttgaaaggcaaatgctctttgattctgtgtcaggatacaattgtaaggtggtctgctgccaaaggaattggtaggataactgcacgtttaacacctgcattgtcggaagaagtgctatcatcaatcttgcaacttttttctcctggggaggtctgtgtataacttatggacttcataacatcctttggttgtttatagatatatctcagtttatcttaagcttggcaaactgctagtttgctcagctctgtatcactaatgcaataacttatgccttttgaactatgaagggtgatggctcctggcatggaggctgtttagccttggctgaacttgctcggagagggttattgttgccttctagctttcctgatgttgttcctgttatagtaaaggtgcacaatgtcctttcctttatttctttttgcaatgtttgcttaacaaacagaatgtttctgaatagttagctcatggcttgtttccatggtgttgatttcaatctgccacatatcttatatggttacctatatttgataacacattttaatttctaagacaattaagtatttatatgtttagtgctggttcagtaagataagcttactgtctcaattgatttcatgacgcaggctctacactatgatgtacgaagaggtccacatagcattgggtcacatgtaagagatgcagcagcatatgtatgttgggcatttggtcgagcttataccaattatgatatgaaggctgtcttggaacaacttgctccccaccttctaacagttgcttgttatgatcgagaggcaagcttattctaatttacatttgttgcacccagatgttctgtacttctggtcccatactattttgactacattatttatcttactgatccttattgtctatgtgatggtaggttaattgcagaagagctgcttctgctgcctttcaagagaatgttggaagacagggaacttttccacatggcattgatattgtgaatacaacagattactttgcactggcttcccgatcaaactcttatctgaatgttgctgtttctgttgctcagtacaaggagtatctttatccttttgcagatgagctactttgcaataaaataactcactgggtacatactctgcaattatttatggtttgaatgagaatgcattttcagtgtttccagtttccacactttttacctgtgccgcaattcctattaacttcttgagtttctgcactccttacctggaactggacttgggaaactgaatttaaaatcattagcgatgtaaatttcctgtagtgatacttctgtatattattttttaaaagtaaaacttctgtatattatcgctgcagcaattaaactactttttttttctcgtcttatgacgccaattttgtactgcctttcatcaaactttatcttacattttttaaagttttctcccctcttctcccacttgtgctgcgctttagtgacaattaatctcttgggccattgtttttcataaatttgacacaggagatgatacttgctatgtttcaatacattgtttaggctgatttctcttcctttctaggagaaaagcttaagagagctggcagctcaggcgctttctttgcttgtacaatatgatatggattactttgctggacatgcccttgaaaagttagttccgtgcactctatcatcggacttgtgtactcgacatggagccactttagctgctggcgaggttgctttaaagttgtaccagctaggttttacctttactacaggtaaatggtggaattgtcatacatattattccttacacttttgcgatacttatcattttaacgttttaacttttaagctgcttacctggaaagtgaccttgctcctttatctttattttttagacatgcagaaagctttggcaggtattgttcctgcaatcgaaaaagcgcgcctttatcggggcaaaggaggagagatcatgcgctctgctgtttctcgattcatttcatgcatttctatagctgggatatccttgaatgacaagacgaagaaaagtttgttggaaacccttaatgagaatttgaggcatcccaattctcaaatacaggtgaaagtttacttttctctcgatgtgcattgaatcagagtgccccccagtactatcatcttactcgtattcattcgttatgtcatcatcatcaatctcctttttgtttgtgtacctgtactttccggatgctgtactaatatggtactagccatctatgtttgtagactgaatattttcattgtcaatttgtccagtgtgctgctgttgaggcattgaagcattttattccaacatacctggtatcttctggtgaaaaaattgcaagtgatattatttcaaaatatgtggcacttctagatgacccaaatgtggctgcaagacgaggagctgcgctggcccttggaatattaccatacaaattcttgatgttgaaatggatgcctgtcatgagtaaactctgtagctcatgcacgattgaggtaatggaattacctattaaattaaaagaagataaagcataagatgttactgttagaatgacattatcctagccattactggccttgctatctcagtcattactggtcctaatagaagatcatatcttcatgtacttttatagcctgtattaattaggccaggacgccaggttagaggacattagaggattttctttattctttccttgcatgtacactcattgttgtataagcacagcctacagcaatagagaagttattccgcctaccttctttttgttgctgttgttttaacactggaaataaaactctggtgtgatctgttttgtaggataagcctgatgaccctgatgctgaagcacgtgtgaactctgttagggggctaatttcggtttgcgatacgctaacagcatcttttgatcagagctcaaatggtggagattctctatatgcatacataaaagattatgtcgtgcgagctttatttagagcactcgacgattatgctgtggacaacagaggagatgtgggttcttgggtacgtgaagcagcaatggatgcactagtacgctgcagcttcatcctctgcaagagagatattgttgcattgagagcagcatcagccactggccatgagtctgaactgggtgatatggaagtaaatgcaagtagtactgcacaccggctatttgattctggcattgcacaggatctggtagcaggaattgcaaaacaagcagttgagaaaatagataagatgagagaaatagctatcaagaccctgcagagaattctgtaccaccaggaacacctcatcccatttataccacacagggaactgctggaagaaattattcccaacagcacagatttggagtgggcggtaagtgattgtgagaactcatggaacaaaatgagatctagttttggcactggtttgttatgactagtgagagctacctattctgcctttaactttgatattgcccagtatctcaccagattagttctcttgctccagaaaccatagtcatgttcaaaatggggtttgaatctaaagtaatggaatttgagtatttgacctataagtgcatgttctatgaacgaatagttgccttctgaaaatcaaaatattgccttaataattatttacaacatggattatgctgtcgccaatttgtagatattatatgacttggtggtggtgttattaactcgttgacattttacctttaggttcctactgtatcatatccacgattggtgaaacttcttcaggtcagctattatagcaagtctgtgctctcagggctcgtgatttctacaggtggattgcaggagtctttgaaaaaagcttcaacgacagctttggtagggtatctccaagattcagacatcaatactaattgtgaagggaaaagtagagagtatctattgagttctgatcttctatgggtcctccagcactaccagaaatgtgatcgtgtaattactcccacattgaaggtaataaaggcttatctacactgtctaatgacattatatttttgagcctaaatctttaatatgttgcgtgtaaatgctatattgtggctaggcgtccaataaagtatttactgtcgatgtactgttagcacagggctttgaaagcttttttgtggttgtgtatctaatagatgtgctccccttcagtagtaattgatgtaattttttctacattcaaactcatctatttattgttatgtcattatgactggtgctgctaattcagttttgtttcatggtctgaaatagtgaagtacacatgagtccgcattctcttttctcccacatttgatgttatacatattttatttttaggaaattatagtgctatggttccagatatgtgaaatcgtgaattgtagtggcatatctccaaaacatgacattctaatggcacatttttttgtaaaaaaaaaagatcttttagatctaacaatagccttgtatttgcagactattgaggctctcttcagtaaaaagattttcttgaacaaggaggtgagtttacttcagcaatgaacatctagttgcagataagcgaagatgatttccgttaggctacaaatggaaccttacaaaagttgggcatcatcatctgataacatcaaaagattaatgtaccatttgttgttagtacaatcttcaataacttaaaatttcaaccttaactgtacagggaataatactacatctagaaacttagttatctcatgttgatcaaatgcttttactgccaaaagaacactttgctcgctttcatagttatatttacaatgttttcttatgccttatgttttttttaacacatttaacaggggtacagtgagttctacagtggactggtagattcggtgggctctgagctgaagggatccaaggatttcacaaagttatgtgcaggtctctcaatccttggatacatttcttcacagtcagatggaacttgcactaaggcattttctcaactcctcacattcctaggccacagataccccaaggtaacatttatcatttcttgtctgagaacgcagaacttgacacaaggatcagctgtgctcaaatactctacaatcttacagatccgaaaagctgcagcagaccaggtgtaccttgtgctgctgcaaaaagatgatcttattatgtcggagaatatagataaagctcaggaattacttgcggagacatgctgggaaggagatgcggaggaagcaaggcgcaggaggtcagaaatcaacgagatggctggtttcagggcgaccactacacagaagtctggaaaccaagaaacaagaagaacggttgccacttcgaacgatgagaacaaatcttattcatcgttggtcgatttcagcggatactaaggatgattggcgttgttttgagattttcgttggccttccatcctattttcgaccaaaggtggcaattgtattagtgcacactatcgaatatctctatctgtttggacgagtggggttgtttttggattttcgttctttttttctggtgatgaggtaggttggggcttggaggctaggggttaggagagtgtagtgttggacgatgtaattttgtggaaagtctgatcaaagtagaagttgcgcctatatgccatgtgcgaaacttcttatccagctcgaagacctgtactgtttgacgaggtctttcggagagtatgacgagggttctaaaatgaaaaatgagaaggcattacattatgaaaagagatgctcatagagatatggtgtgtgcatgtatttattgggatgaatgtacatgcttgtatgtaactgtaagtgtttgtgtcgagatttgcaaaaaggaaaaaagaaaaacgaggatccttcgtagaagcattttc

SEQ ID NO: 3886 - DNA, 6344 bp, Sorghum bicolor
tcgtgttgcaagccggtggtgcttgttactcttggaggttgccacctcctagatggcttggtggcttgtgtctccgttaaagcatgcaaggagattgtgcggtgctctagagaagagattgtgaggggtacggtgctcacccgcgggaatcgcgaagagcaactctaattgagcaagacgtgaagggcgacaagtggtccgaccgagtcaagtactagagcttgtggtaagcactccacgtgggagagcgtgactagtactctaccttgaagcttgtctcaacggggacgtagcttggtggcaaccaagtgaacctcgggagaaaattatcatgttaacattgttcttcccgttggtttgtaagtccctaacacaaacttgttcttacatttttatacttgtgcttgtgtagttgctcttgtaattagttagcttgtgtgcgtgactaatttggtttgtataaccttgttagtcacattgcttagtttgtgtagctaagtattttaccctctctaatttggtattggttgccttgttattgatctttgctagtgagcttaggagctttatgcttttgcttactagttgtgtaggagctcctcggtttgcaaagtactagtgacataggtttgtgtaacattgctctagaattggttaggtgagctcttgctaaggtagcaccttacttgcttgtttaggatcttttacaaggtgctagagaacttagatagaagggtatagtcttggctagaccgatagttttaattccgcatttgtttcggttaaccggcatgttagttaagttttagaaaaaaatattcacccccttctagtccgccatctcgacccttcaaattgatttaattttacccaagcatcctatgcaaagttacttgggccttgtttagttctcgaaaatttttggtttcgggtactgtagcactttcgtttttatttgacaaatattgtccaatcatggactaagtttaaaagattcatattgcgatttacaggtaaattgtgcaattagtttttattttcatctatatttaatacttcatgtatatgaagtaagattcaatgtgacgaataatcttgaaaaagtttttagtttgtgggatgaactaaacaaggccttcattggtaaaaatcctcatcctcttctcctaaaaattaaggcagtgccccagccgcacattctaatacaatctctcaagtcacagtaaaccagaaaacagcatgtacacgtacatgcacacatgagacatatggcggtatactagcacatgaaaatgactcccttttgtcgtcgccatcttcctccagagcctggttctcgacactcgacttctcatggcatggcatggcagaagcgagagaaaaaaacgccccacaaccccccgtcgtctagctccctactacctaggcacgctacaggtgcgtctgccactgtccctccctcattgttgaccagagctccccaaaacacccccgccctctcacgctctctcctctgcctataatatctccctctccccctctctcctcaccaaccaaggcactctctcgcttgcctcccgtcttctccccccggcccggccctctctctctagttgccaaatcgcagaggcagcaacaacaacagatccaatacatactaggttccattgcatcacacatcagtcactccaaaccatcaaatcacacacccatcagatcacacaggcaaagaggagagagagagggtgaggaggaagatgagagagatatactactaaactatctatccatccatcaatcagcaatcgcgtgccgcctttccactcacgtacaccaccaccaccacctctcacctcggttggttcgttgccgcgtcaaatcggggcaagaagccagccctgttgcagtgttgcttcgcgtgctctgctgttgcttgctgcaccacgcacgtacctgaagaaagcagcgatccatcgatcgaccggtggttcgctgtcggcatgtcgtcctcgtcctcgtcgtcctccgctgcctccgcggccacggtgttcccgccgtccccgcagctgccgccgtccccgctcctggtggagaacctcccgccgctgcatcagctcacgccggtagcggcggcggaggccgccgcgccggcctccgagcagctctgctacgtgcactgccacttctgcgacaccgtcctcgtcgtccgtgatcgaatccctcctctcgatatctctatattcacatacatgcagctagctgtccgtgtagtctaaatctcaaaagattttacaagcttgaaggtgttgtgcctgtgggtgcaggtgagcgtgcctacgagcagcttgttcaagacggtgacggtacgatgcggccactgcagcagcttgctcactgtcaacatgaggggcctcctcttcccgggaacgccgacgaacacagccgcagcggccgcaccaccagctgctgtcaccgccagtaccaccaccaccaccaccaccaccatcaccacggcgccgccgccggccacctcggtcaacaacgggcagttccacttcccccagtcggtcgacctcgcgcccaaccctcaccaccaatccctcctgctggtacgcgcgcgcggagatcgagccgcccggagactcgtcgtcgcgtgattcaaagttgccggagctagctgtgatgtcctccgtatattgcatgcctaaccttcggtgtccgcgtgcatgcaggatgagatatccagcgcgaacccgaggctgcagttgctggagcagcacggcctcggcggcctgatcccgagcggcaggaacgcggccgcgccggccccgcccccgccgcctgcagcggccggtaaaggggccaaagagccgtcgccgcgcactaaccccgtcatcaacagacgtgagtccaccacctaataatagagacttccattacatgcacgtcgccggtcaagtgctctattaattcgctagttcttcttcgccatctcggattatatattgtccaagttttgctcggtttcgttcttgagatcgatcatacgatcagcctgggcctgagcctgggcctggccttgaggaagctaggtgaaacttgcagatcagttgaactcaagaacactcatcttctagctagctccgtcgtccatgctcgctatggctgaccagatcagtgagcacacgtacagatgggcgagcaagcgacacatgcgcctagctaggtgttgtacatgtcgcatcaataagtgcgacgccgagtcgcccacaccgctggctggttggctggctttcaatcaactgtccaagagagagcgagcgagagagcggcacacatctttgtttcgttctcgagctcttttcactgtgagaaccggccggaagtggacgctgctacggcgccgtgctactgctaccggagtgcacctcagtgtgcatatatgcggcgagttccagcgcgtacatgctgtgtgctgccgtgcatgccgagcagtgagcgctactgctggtcgtgtttcatgcgcgcggcatgactgtgtgtctaacaggtttttgtgtgcctcgtgtctctctgtgtctgcagctccggagaagaggcagcgcgtgccgtcggcgtacaaccgcttcatcaagtgagtgccagtgtataatgctagctactactacattttccatgctgtgcgttacagtgtacaagtcatggccgccgtccggtggttctctctcatcggtcacggcaatgcatgccgcctcgttggcagcagccggccggccggcccggccgggcccggtccggggtacagactacagaggcaagaacttttgcagaaggaagagagagacccctgatggtttttgctcccgttcagtcgttctctcccctctctctctcacacacacacaggcagaatggcagaagagagagaaagggatgaatatcataagacatggcaaatgattcattggtgatggcaaatcatgctagtgtcgtgtcgtcgctggagctaggctgctgaatgctgatcatatgcatcgatctgacgtctcccttttccttttcttttttctgctggctccccctcggggccggggaatgcgattgcagggacgaaatccaacgcatcaaggctggcaatcccgacatctcgcacagggaggccttcagcgcggccgccaagaacgtcagtggtttcctccgatcccctcctctagcgcctctcgcttagatctttctccttgagttctttcattcttttatagttttatataatttctggtgtgtgatccactctcactctagggttttgttcgtaccagtactgttcgttgctagggtttcctgatcttccagaaccgcatgataagctccatgcatttttctcccacctttctaaatccttgtttggtgtggtggttttggttgttttgctgcagtgggcgcactttccacacatccactttggactcatgccggatcaccaggggctcaagaagacaagcctgcttcctcaggtgatgaatccgtcaaaaccttgtcaatgtactgttatatttcttccgtcattaaaatttgtcctttattaaggacaagttttcgtcaaaacttaaatatcttttttattatattgtttaatttggagacatgccatgcatatggtagatttgtatacttgcaaaatctcattttttggaggatgttaaaaaatattttaaaagatattagtggtcattgatatgcattaaagacaatagaaagcatctctaagagtttttctaaagctcactctttagctaaatcatcatatttgggggagccatctgcataaaaatcactttttatatctctacacactcgaacaacttttgtgtgtaacgaaatccaaattagaagatgactatatttagataatcaaataaataagttattgaagtgtatttttcatcaaaatctctaactaacaattaagaaggatataaaatattattacccctttgaattagttcaataacaaggttcagtgaaaaggaaactgtatttgttcatgtgtccgtgattttccttgcaaaaacaaaaggtgagattgaggtgatctccaatactttgataaaagataagatggatttcctggtaaatgttttcactgttcctggttgtgacattggcagttgttttatcaaatttatgttgcagtaacaatttgtactagtgaatttattacattatgaaaatatttgcaatgaaaagagagatatataggtttttttgtaatattccaatctacatggttatattaacataatgtagttcaaaaattctttgctgcattctctcattagaaaaaaaaatctcttggactactcaaacaaaagacaagatgatcatattagatgacttgtaataatggaaccccatccttttgaattaccattatttgcaatggtatatatattatacaaatttataatgtatactcaaagccttcttctctttctacatgtcttttgattctgttaagtattgttggtcaaatctttgcctattagattagcattagaaatctttggaattctgattttgttccaattaatatatgaaaattgagacatgcaagaaaaaacatttctcatgcataaccacaataaatatatatagtacatttaagcatatattaccatgcgcccaacaaaccgtggttaaaatgatttaaactaaaccaaacttcgatgcttttggctttaccaggatctccagagaaaggacgggcttctaaaggaagggctctacgcggcggcagccgccgccgccgctgcggcagccaatatgggggttgctccatactaatataattactcctactcaacaagcttagagtagcaagttgctactgttacctagcttcggagaatgtccttttaacaagtggctctatgaacttatgaagctatgtatctagtagggcttaattagtgacctctcttaaattagcttggttaaacgttccaatcacgcacgtacgtacgtatctgctgtgtgcctgtgtaaacctggtcgatcgatcgagctcatcatttgatggctagctaggtgtatccttctctagctaatatatatctatgttttttccttgattatatggtagattagacgaagagatggactccttttccgggcccccatcctaatttccccactgttttagctgctacactgctgcgctgctgctgctgcttactgtgctatcagtgtagctagcacgaaccaggccaggctatcagtcgttatctttttccctgctctttactgtgtctttttcgccccttcttttattctttgtcttggtc

SEQ ID NO: 3887 - DNA, 2725 bp, Sorghum bicolor
gccctgcacatttctgattactaatgtaggcattattcaaaaatctgcttgatgctaccgtgttttccaacagaagcttatgctggttgcggctgggagatggaaagtgtgccctgtcagatactcaacaatgcaaagccatgcgtcctcggtggccaaaggcgtggtactgtgagggtgcagctctcagcttgctgaaggtatacaatatactaggcagtgtagcagctgcgtcaaatttagcctcgcaacttaatatactctacacttgtatctcacagtagttatacctctatgctcaggactacaaaggagcagctaatgctttcctggaaccacaaaattctggattccctgtcctgaacaatcatatatcctcaacactaatattgctatcggaatatcacaataaattatagaaatacagttttagatgaaggaattcaggaatatcctacacgattgatgaaggggacataagatcctcacggaactgaagacaatttatagcaaaaagaagccgatcttttttctgaccacctttaatcaaatctaaatcaaaactgcacagcgacaatgccccaaccatcaatttattgctagaaaggacaagagccaaataacaatcatcggacgaccattgcgaatcaaggagataaatttacaggcaaggggctgggcatacctgctggctgctcattgccggggaaggtcccaacagcgccggggtgtaggggggccgtggcgggggccgatggcggagtcgcccgtggcgatgtctgcggcatgggaagagccgctcatcgaggttgcaacggcggcggcggctgcggcagccctcgcgtcatcgtgttcgtgtctggagcggcgccgttgggcttcatgtgtccgctccctaaacccgcttcgcatagatgggctgctgtgcgggctgatttttgctcgcggcacggtccggcacagcaggctgatggcgcagcccgtgccgtttgcaatcgtagttgctaatgcgtcggcggcgcctggtcgcgtgggtgacggggtgagccggtgaaggccgaagatctcagttcgcagtttgcctagttcagtgttgtggagtcgcctgtcacgccccgtggcggtggccagggttccggttcccatttttttgccgctgagaccatcggtcccgtactccggtagtccggtgtccggtcctgtcatcgtggcgagcggtgctgctaggcgaggcgagaccgtgcgcgttgcgcgagggggcagagcaaggcaatgcacgggcgggccggttccggcgaagcgcggcgcgtgcgcgtggcaacagcccgctcggtgtgctcccctccggccttccgagcctggtttcgaggcccgtgttaatagcagtttgttgtagaagaagcatccttccctgccgacaccgcgaagttcgggccttgtttagttgctaatttttttttaaaaaaaaaatagattttccgtcacatcaaatcttgcgacgtatacatagagcattaaagcattaaataaagataaaaataacaattaattacaccgtttgactataattttgcgagatggatcttttgagtctagttagtctataattagacaatatttataaaatacaaactacaatatccattttgcaaaaaattttgacctcacttgaaaaatcgtctacagaagaatgcttcattgctgcgcttccactatgccggcaccgcgcattctatcagtaaaaacaagcactccatcacactcggaagcctcggagtccacctttcgcaggcaggtcgaaagccccaaacccacactgatagaatagtcaggaacttggaacacaatgcaagaatttctgagatcaaactgacacccactcttttcttctcattttcctttcatcacaacacagtgacaccatgaaaattatacagcacaacacactctagagagggtaagagacaactattacaacttatattactgcacacacgccaatgggggaacgaacgaagaaaaccaaagaatattattgtgacgagatctacatgttgctgtgtactgtaactctgacggacaaaccacaccgcaggcacccccctgctacatacccggggggtacctgtctggcctggcctggcctccgcgaggcctctggtctggagcctctcttcataaaaagctcatccagtcgcccacctgtacatctaatctttttttagctacaacacaatgtgagtggagcagcatcggtcaccgcaaggagttcttcagcgaccgaaccgtcatcacgagctgctgccgctcgccttccacctccgcgaacttcaggctaatccctgagtaccgttcgtgcagctccttcagctcctcctccatcgccttgttcctctccttcagtgaggccagctcctttgctgactggtcagccgcgttactgacatagatgagagtcgttgccagcaggaagaaatgtcagtcagatggccgtggttcatgtgtttctgaacttaaaaggcgtagtatgtgtcagctgagtttaaatgattgatgtacctcatgtcaagcccattgcagtcaccctgtctgttggtgcttggcagtgcagtagtgctcccagtggagccggtattgtgtttggtgcgcttattattagtgtgctgattgtcctgcaaaaacagcactttgtgttactttctgtgcaccaaagttgtattattac

SEQ ID NO: 3888 - DNA, 5980 bp, Sorghum bicolor
tcatatcttatccgacatggttgatattatccgtattcgaatccgaatccgaccagaaatatgaaaacaaatatgatatcagtgatatccgtccgtatccgatccgttttcatctctagttctgaggctcaagcaatggcgccgcacagtagctactacacactccagcaggcagcaacagcatactcctccatccatagcaacgctgcagcagccggaggctcagattttataatccatcacttctccaccagaccccaatcgccctcgctccccagctgtactacgcctctactgctacccaagaaaatcaattcgatttctcttttcccccaaacaattgacctccgttttatagcctctcttcatcacaaccttctctcactacatttcctctctctctctctagcccacttaacccccccccaatcagagagagagagagagagcgcgtgagaggaaaagcagagctgtagagagagaaagttcttctgatctctctctctctcacacactagatctactactactactactaccaccaccagtgtccactgcatcggccttgttgctggctgcgtgcgtgcctttgcccaaagcctgcctgctcggtggtgcctcgcttcgcttgcagctgcagtagtggcctcgccctcactcgcccacttccccttcacgctctatgcttgctctgccaccatgtggcggtggtggtggtcttcggggcgctccaactaaccaccaccagcacctcacaccaccgcatcggcacctcacaccaccgaccctggtggcgtcacgcggcccggtggcttcttccgcgcgcggcattgcaatgccgccaccggtggacgctcccgtggaggagtagctagctggcccagcggcagcggcagcgggcgaggcgaaggggggccggaccggaggtcgttcttgcagagccttctgttccgggaccgaccgaccgaccgaccgacctagcgcggcgacgccgacatgttcaagtcgcggtggcgcggcggcggcggcggaggcggtggcaaggccaaggccgtgttcaagctgcagttccacgccacgcaggcacggctccgtagccctgaagcagagctccggatttaattttgttgttgattgacgcgtgacgggagtggcgtggttggttcttgccgcaggtgcccgagctgggatgggaggcaatgatggtggtggtgacgccgcaggacgccggccggccgacggcgcggtcggagcccgcggaggtcaccgacggcgcgtgccggtgggcggcccctattatggaggccaccaagctccccgccggcaaggacaagatctaccagttcctcgtctacgagaccgtaagcgacctgccgccgccgcccgccgctcaactaattcgcgattaaccgacggcggtggttccggtatcgatcttgactcgggcaatgctgtcggtgcaggggtcgagcaaggcggcgctgctgggggaggccacggtgaacctggcggagtacgccgacgcgttgaagccgtcggcggtgacgctcccgctcaagggcagccccggcgcgctgctgcacgtgagcatcaccatctctgctctctcttccccacctcccttccctcgcatcccttaaagggtcgtgccgttttcttgtgacctgcgacggcgacgtgctcgcggtctgtctgattttgatgtttcgctggtgcttcgcttcctgtgacaggtgaccatccagcgggtggtgggtggcgccggtgggtgcggagacgacgtgaggtgcgtcgttgggtggtggattaatctacgcacacatctctgcctcattgttgtttgtttcagctttaaggatagtctcaccacagccagatttagccattgccgccgctgcattgttatttgagccttagagattgagccatctcaaccagatttatagtcattgctactgcattgtggtttgggtcttaagcattcgcttggttggggcattgcttggttactgattcttgttgtcctcccggtggtaacagcgagaacggcgacgcctcgccggtgccaaagacgccacagaggagaacgacgctgcagaaccagcttagccgatttgaggacgaggacggcgagaaggctagagcggccacggatgcgatgagtcctgtgcaagtaagtgggtctttggggaattctttagagcttttcctcgtttggattcatcatcattgggttgctttgtttcatcttgtgattgctaagaaagagggcttttggcatacaaagagcactgcaaaataaaaaggggcaaagggagcctaagttatatttatatctgaatgataataagctgtatgtcgctttttgtttgagatctgatttatcatgcctgtagactgtagatgggaacattttagaactgaacaaccgcatgctgtatgtgatttgatttttcttgtcttctcctgatggttgatatctcccttgtacaggatgggttgttgataagaaaacctccaggcatgaggtttccatcaagaagaaatgtgcctacatctgttgacccagtgggccatctccacaatggcagcagtttcgatgccgtctcggtgtctggttcagatggaagttctgggagatatacccccaagattagcgcaagcatgcacaactcatttcttcaggatagtagcaatgctctctctccatttgccaacaatggcaccgtgggaaacccattgaccagttccggtgactggtcaggaagctcagctcctgatgctagtacggatgggtcaacgagcaattctggcgaggcagggttaagaggggaagatgatgacgtggagaagctaagaagtgaggtagccactttaaccaggaaattggatgtctcagatatggagttgcagactctccgaaagcagattgtgaaggagagtcggcgtgggcaagatctctccaaggagatgagcagcctgagggaggagagggatgcactcagaagagaatgtgaaggacttagaggggcaaggaagactatccatgattcaaatggctcagggaaacggctctcagatggggatgacccatggtcacagattgaagaactgaagcaagatctgagtcatgagaagaatctaaatgcggatcttcgtctacaactgcaaaagatgcaggaatccaactctgagctgcttctggctgtgaaagatcttgatgagatgttggagcaaaagaacagagagatttccattttgcaagaggatacacgggatgatccgcaggaggcagaatatgagcatgcactgtcaaatgtgcacaattctggacacaaaatagccttatctgaatcgagttcataccaagagaaggaagatgagcttatgctagatgcactagcaaagaagcgtgatgacatctctacctctgagcttgaaaagaaaatccttgagttgagcaatgaaattgagttgtacaagaaagatcgtgaggatatcgagatgcagatggagcaacttgcacttgattatgagattctaaagcaagagaaccatgacatatctacaaggctggagcaaacacaactcagagagcagctaaggatgcaatatgagtgttcagctcatttgtctattataagtgatcttgaggccaatgttgagagcttggataatgaactccagacacaggctaaaaagtttgaggctgacatagcagaaataatgagcgcaaaggtggaacaagagcaacgggccattaaggctgaggattctctgaggaagataagatggaataatgcaactactgcagaacgacttcaggaggaattcaaggtgttgtcttcacaggtatcttctgctttcagtgcaaacgaacgacaccttgtgcaagcaaggaaagaggtggcggagctgcagctgcagaagagccagttggaagagttactgcagaaggctcaaggagatctcggatcagttcaggatcagcaccgggtaaaggtccaacagttaataaccctagtggatttcaagtcaaaggagatagacaggctactgatggagctcaaaagcaagagtgacgagttccatagccaaaaaagatgtgatgaagcaaggatgaatgctctgtcagaagaaattgacctactcaatgccaagattgacaagctatccagtgagagaaacgagctcttcgaaaagaatgagcagaaagataaggagttagctggaattagtgaaaaggacatgcaattgcaagacaaaactgctgagattacttcactaaataaagagcttgtatccctcaaggaccaagtgaagatgcatttggacgaactacacaatttaaaacgtttgaagaacgagaaggaggagacaattggaaagctgcaaatagatattgggtcactgaaactccagtgcgacaacttgaagactttgctgtccaagaaggagtctgagaaagacaaccttgcttctcaggtgctgaaactgagaagatcccttgaaacccgggaaggggcaaaggcaaatggtcaaaattcagatgcgaaggtaaattctgcaacgctaatatgtttccagttccagtgcagacagttctccttttaattggtttgtgataatgtagatgttaataactgcaacgctcaaaaaaattatttgctctaaatccatctaaaaatggaaccataaactcttgcaacttttgcttcctgattgccatctgaaccagtagctgtaatttcctttttctagttaagtcagtagaatgagcggttgatcaaacaaggcttcaacaaaagtatgagcacatgtcagtgaaaaaatgtcatgatttctgtctctttgcacatgggaagacaaaattttctttagttctatccaccggctcccaaatcatcatagctcatggaatagctttattgcatacagggcccactgatgaggacatgttatattgctttacctcattgagcgacctttacatagaactgcttactagattgtaataatacaactttggtgcacagaaagtaacacaaagtgctgtttttgcaggacaatcagcacactaataataagcgcaccaaacacaataccggctccactgggagcactactgcactgccaagcaccaacagacagggtgactgcaatgggcttgacatgaggtacatcaatcatttaaactcagctgacacatactacgccttttaagttcagaaacacatgaaccacggccatctgactgacatttcttcctgctggcaacgactctcatctatgtcagtaacgcggctgaccagtcagcaaaggagctggcctcactgaaggagaggaacaaggcgatggaggaggagctgaaggagctgcacgaacggtactcagggattagcctgaagttcgcggaggtggaaggcgagcggcagcagctcgtgatgacggttcggtcgctgaagaactccttgcggtgaccgatgctgctccactcacattgtgttgtagctaaaaaaagattagatgtacaggtgggcgactggatgagctttttatgaagagaggctccagaccagaggcctcgcggaggccaggccaggccagacaggtaccccccgggtatgtagcaggggggtgcctgcggtgtggtttgtccgtcagagttacagtacacagcaacatgtagatctcgtcacaataatattctttggttttcttcgttcgttcccccattggcgtgtgtgcagtaatataagttgtaatagttgtctcttaccctctctagagtgtgttgtgctgtataattttcatggtgtcactgtgttgtgatgaaaggaaaatgagaagaaaagagtgggtgtcagtttgatctcagaaattcttgcattgtgttccaagttcctgactattctatcagtgtgggtttggggctttcgacctgcctgcgaaaggtggactccgaggcttccgagtgtga

SEQ ID NO: 3889 - DNA, 3144 bp, Sorghum bicolor
agtgacaaaacaagattgtcgttaaccagcgaaacctcttacggaggggcctggaaattaagataacacacatgacatgtttcaatctccaaagttaccactataataaagcagctttaaacgatatccaacatggtcttgttttgtggtagatctcctcataagaaaatgcagcggtgaaaacagatttgatttggacaccatttggcaaagatattgttattttaattggaaggataaatagagtaaagaacgataccaccccgcacactacaaacctcgttcctaggagaaaaattaggtgagaggtacccataaaggcgtcgtgaggacctgccgtggattcacgacacaaatccacacactagcatcgaacatataggactacagtacaagttcaagaggaataactaaaaacaaaaaataccgtataaatttagaagaatctcagatcttttagacattagattcttgtgcataggcacatatccaatgtcctgaatgcacggtagctagacacagagcctccgtggtgcattctcagttctttctctctctcaattttcggtggaaatgctgcactgaaagcggttttgtgcccgaaaagaagagagcctgacccgtcgcgcgggatatcttcttctgctagcttaggaaagcgaaaaagatatgcctgtttagattgagaacgaaatttttttttgtgtcacatcggatgtgtcggaaggatgtcgggaggggtttttagaaactaataaaaaaacaaattacatagctcgtcaggaaactgcaaaacaaatttattaagcataattaatctgccattagcatatgtgggttactgtagcacttaaggttaatcatggagtaactaggcttaaaagattcgtctcacgattcttaactaaactgtgtaattagtttatttttttatctacatttaatgttccatgcatgtgtccaaagattcgatgggatggatgaaaaaattttgggtagggaactaaacagagcctcatgaggtgtttctaggtaattgacgaacatcttatcaggcatcaaagtaagtagccgatcgtccaaactgccgtgcgtgtaccgcacgttagagcaccagatcaggtcaatggtcaaattaattgctcagatttagttcctgacgcgcagcatattgttgaaacgtgtgtgtgccggtgtccaacatggctgcatggctacttggctgcctggctagcagctagctatagtacaagttaactaaaatctgtgaggacaataagggcgtccttgtctgtgactacgaagaggtcagaagtctaactagtaaggccttgtttagtttgcaaaaagtttcaagatattccccgtcacatcgaatcttacggcacatgtatagagtattaaatttagacaaaaacaaaaactaattacacaatttgcctgtaaatcgcgagatgaatctttagaccctaattagtctatgattggacaatatttaccataaataaacgaaattgctacagtacccaaaatccaaaatttttgccaactaaacaaggcctaactactcatggattctctcagttggaaggaaccgatgaacctttcacaatctaaccagggcaagtgaggccttgtttagttcatcacaaaaactcaaaacttttcaagattcttcgtcacatcgaatcttacgggacatgcatgaagtgttaaatatagatgaaaataaaaactaattacacaatttgtctgtaaatcgcaagacaaatcttttaagcctagttactctataattgaacaatatttatcaaataaaaacaaaaatgctaccgtatcgttttctcaaaattgggaactaaacaaggccgagcatgtctctactgagcagtcaagtcaaccatgggccaactctgacgagccctgtgccacacgttctcccgtagtttcttgtggttctactcctatataaagtcgatgccacaagagcatggagatcaaatcatatcgccacttcgcaattgctcgcccggcacaaagcgccatggctaccgtgaggggaatccgtgctctctatgcagttgtcgcgctgctacttctcatggcccttcacacaccaggccggctggcgcaggcggccttcccataccgttccctgctccagacctgccagcccagcggctccatccccggccgttccggcaactgcaacacggagaacggctccgagtgctgcaagaacgggcagagctacaccacctacgactgctcgccgcccgtcacgggtagcaccggcgccctactcacgctcaacagcttcgccgagggcggggacggcggcggtgccgccgcctgcacgggggagttctacgacgacagcaagaaggtggtcgcgctgtcaactggctggtacaacggcggtagccggtgtagcaagcacatcgtgatccgcgcgacgagcaacgggaacaccgtgagggcgttggtcgtcgacgagtgcgactccaccgtaggctgcgacaaggaccacaactttgagccgccgtgccggaacaacatcgtcgacgggtcaccggcggtgtgggacgctctggggctcaacacggacgacggccaggcccagatcacctggtccgacgagtgagcgactgtgtagctagcaccgcagctgcaccgcccggcacgtctcgtgctgccaatatatattagtagcctagcagggtacaccgaataaaatcatgcataggagcatgagcatgctatttatgtcccatagctagtatttgcaaaattaaataacttctgttggccctcacgacctcaagtttcagttcactagttgaattactactactactatgtgtgtgcaagtgcaagttgacctcatgttgccttttctatgttaaattttcgcagccctacaaattaactctcatagtactaaggccagtcttaatggccagtttcattcgacactcaaatgaaaccatctatgaaacagtcttaacaatgtaggggtttcactttggcgtttccaagactaaacaaagcatttaatctctactataattgaaatcttcttcaagtcacctcccttcttcaagatcaacggctcagaacacactaactaggaatccaacgtct

SEQ ID NO: 3890 - DNA, 9804 bp, Sorghum bicolor
ccttttgaatccccagatcaggtgccctccgtacggcgtgcaaacaagcaaaaagttcagcatggaaagcctctccaacgttcgacagtacgctgtaccctgagctaatgacacctccatcagcacctcttatcataaaaccccattctcttgatttgtcgcttaggccttgtttagttccaaaaatttatggaaaaatgatactgtagcactttcgtttttatttgacaaacattgtctaatcatggagtaattaggattaaaagattcgtctcgcgatttacagataaactatataattagtttttatttttatctatatttaatgttccatgcatgtgccgcaagattcgatgtgcagggaaatgttgaaaaattttgggtttttgggttaaacaaggccttagcttatatgctccatcccaattcagtttcgagcctattcatcacttggcagaaaaaactatgactgtattcgctgatttattgtaagagaaaaacattgttgaatgattttccactaatatttcaaagttggctgtaatcctttttcacagcgcccaatagagggccattctagcgctcaaatcaccataaatatataaatgtcattctcacttctcgataaggtaaatatttttttatttgatctatacataaaatcattaatatttatggtgcataatataattagattaaataaataaataaataagaaacctattcgcaaataaaaacatcactaatatttttataaatcggccctgtttccccttgctaaattttagctaactaaattttagttattttagtagctaacgttccaaacacattgactaaaaagagctaaaagactttagtttcattagtcacctaagagtagctaaaataattttagctagctaaaatttaacaaggggaaccaaacagacccctagtcaaatttattttttatgaagcccaaaatagcacttattttggaatggagggagtatgtctcaaaatatgtataagactatgttaaataagataattttaatatagtagttttcgcagaaagctgggagaagtgcacttgcctaatacaagacccaaactccaaatctggtggctacagaactgggttatccctaagccatgatgtttgtgtaaggaagaataaatccaatgctccgaatgccaatcacaaacataagtctatctagattaaccccaagtcaaacttttgtaacttttatctatttaccagcaatatgccagtatctatcaaatatgctatcctgatataaacacaaaagatatatattaagaaaatgtaattttgtaaaaataaatatatattatgaaagtatttataataaatatattaaagtcaaccttgttttgtgaacgtacatataattttagctatgtgggtagtcaaagttaggccttgttttgttcaccccaaaaccctaaaattttttaagattctccgtcacatcgaatcttgcggcacatgcatgaaatattaaatatagtcaaaaacaaaaactaattacacagtttgcatgtaaatcgtgagatgaatcttttgagtctaattagtccataattgaataatatttaccgcaaacaaacgaaaatgctacaatgtcccgaaccaaaaatttttgaaaactaaacaaggccttagaaaattttaattggtattcagattggaggaagtatctaatgactaatactataattgattccactttgaacgtttaaatatggaagccaagctcgtgggcgaatatgtttttctttgagagttgatcaaatctgtttttaggaatgacatcgtttaactgttccaaagataaatactccctccgtccaagtacgacctccgagcagcacgtgcatccgcaagcaaagctcccctcccgcgcgagcccttcctccggcgggtcccgcccgcgcgcccgcctccaacccagcccgccccgccccggctaaaaccctcccctgttcccatgttcctcctcagagccaccagcagcagcaccaccacggccacctcctcgctcctcctccgatgccgtccgctcccctcgcctaaaaccctagcactcgccccgcctcctactatcctccccttctgcttccgctcccgcctctccgcctccgcatcctccgcctctcgccgccgccgtgcgaccgcggcagccgctgcaggcaaatccggggagaagaagccgccgaccgcgagggccaagcaggccgacgcagggcctgcagcggcggcggcggccggaatgtcggcctccggtggcggatcctcggggaagcgcacggtggcggacgtgctgatggggaacgcacgggccgctgccagcaaggcgaagaaggcagcgccgtcgccgaagaagccccgggcgaaggctgacggcgcggaggccgaactggaggctgcggcggtagcggagaaaccgccttcgccggtgaggtccaagcgggcgtcgtccccagcgaagtcccccaaattgctggctgatgggtctacatcgccggctaagtccaagggtccagccgcggccgctcaattggatgcggcgaaggagaattccccgtcgccaaagaggtccaaaaccctagccgctaaatccgacacccagccttctggtgaaggtgttgtctcgcacaccgatgggaagaaggggtcacccgcgcccaccaaggctaaaggccaggcttcgcaacaagaggagaagaagcgggccacttcacccaagaaggctaaaaccacagattccgattcggcaaagacagaggagaagaacaccacccgggccacttcacccaagaaggctaaaaccacagattcccgaaaggcagaggagaagaacaccaccctagagctaaagaagaaaggcagtgagtttgacccgatggctgctgcctattggaagcctggtgagcccgtgccattcctgtttctggctcgggcacttgatctcatctccaacgagagtggccgcattgttattacagaaatcctatcaaacgtgtttcgcacagtgatggcaacaacaccggatgatctcctcgcaactgtgtacctctcagccaaccggattgcgccacctcatgaggggattgagcttgggattggggatgcatcagtcatccgtgcacttgcagaggcatatggacgcaaagaggagcacgttaagaaggaccttaaggttgttaagttggttacatgtttgttcatcacttcaacttctatggaattggaggcttaaattgatttgctgtttcttttggcgattgtaggaattgggtgatttggggcttgtggcaaaagcaagcaggtcatcgcagaagatgatgtttaagccaaaaccactgacaatagctcgggtgcttagcacttttcgggcaattgcaaaggttctatatcacttctcgcatttctaatgctgaatatttccccagcaacctttattctgacttgatatctcaacatggaattgaactgctttcattgggatttgggacaatgattgatgtcgaaatatgcactattagaagtaaaatcacaatatgtagtgaggctgggatttgagtcccagagtggataacttccataatgcactattacacagtttcacttaagaaatcgtttaacaagtatatattcttttatcaaggaatcgggcaaagacagtcaagataaaaaaagaaaccatatgaagggacttcttgttgctgctactgactgtgaaccccagtacatcacacgccttcttcaggtaaatcatggaatgttcacttagtgcacttcctttgtgtcctgtctattcattgcttgcctgaattgttacttgccacagtcaaagatgaggattgggctggcagagaaaactgtccaaatggctcttgggcaagctgctgtatattctgataaaaattcttcgccaccaaaagttcaatcacctttcgaagaggttacactctgttttatgcttttatttacactcttatatttgttttgacaggatcattgaaattcttttattgcctgcacattatatttttgttagtatctttaatcggctcttcagccatggtagcatgcaactatgcaatacatgactcacaaggttctattctatgtgtttcttcaatatccttaattctaatttattgatgactttttgtgctgttagaaatcgtgctttgcaaacgtgagaataaacaatgtaataataatgtactgttgccacaatgttccatggaaatggtcatgaagaaagttattgtgacccacgggttttatcctcttatataggggcctcaatcaaatagttaatactgtgcatattaatatacctatatggctatatctcattcttatctgagtttctcttgcttatatgtggaagattgatttgatatgcatggtgaacaccttttattcctaacattgccgctgcaattggtcatttactgattttattgtatttactcatgaaggctgcaaaaataattaaacaagcatattcagttcttccaatatatgataaaattgtcccagcgatacttgaagtaggagtttggaagcttccagagacatgcaaattttccataggtgtccctgttggccctatgttagcaaaagcaacaaaatctgtctcagagatcattgacaagtttcagggtcttgaatacacttgtgagtacaagtatgatggtgaaagggctcaggtatcatcaatcctcatggcgtttattgcttctaatatgatactttgacccatgttcatctaagctaacacttcataatttggaatttagatacattgcatggaggatggttcagtagagatttatagtcggaatgctgaaagaaacactggaaagtatccagatgttgttgatgcagtttctaggtatacttcattttataatctcgcctaccaatacatttctgaatctccaactgaagaagcactggaagtagttaatactagtagccttgagtatcctgtgatttgtgccatgcagatcggagttatcatggtctaaattttctatcagtttggttttaaaactgttctgtgaatttgcatatggtgtaatggttttctaagttcccacatggtaaaatgttaaatttttgaggtctgattttgattccttttctcacctttcaaatgtaagacacctcagatttgctttctccatctttgttcttgtcttctttagaggtagaattctatagcctatgacactttccccctggcactgccagttctgaattccttatatcttagtgatatgagttgtttttggatgtattcattaagggctcgttcggttgggtgaaccaggaacccttccaactgataaaaaactagtaataaattagtgaagcaatgttttcaggtcgtccgattaatcgcgattaatcgtcctggtcggtcaggagtgcttgattaggaggtgcgacgcgaccaggtcgaccagaaacctggtcgtccgattagtcgtccacttattgcgattaatcgtccaattaggacatggatgaccaggttttgtgccctgtttttgggcttttttgactgggcagatatgtggggggtatggagatgctgttggttgtcctagttctccagaaatagttaagaaggagatgttggtttacatcaaaaagagttcaaggactgttctagaggcgccagtacaagttgaagatgaagaggaatgttggtttacactaatgcagtcttgatgcttcctttattgtgtataatatagtgtatatatagaggtatatatatatatataggtcgaccagctgatatgcctggacgaccagggacgaccagggtcgattaatcgacctggtcgccgattgatcgcgattaatcgcctggtcggtcccaggtcgaccaggatcgacctgccgaccagaaaacattgtagtgaagtattctggtaggaatggatccagtgttggttccctgccaaacgaacaggacctaaagctgaagccatctcgttctgtttttgtcatgtgtgcccacatataccagctttgtcaagctaatttggttactggctcaataattatctacccaaatttgtgttctctcatgcacttttaattaccgatgatcttacgtttagcatgccattgcagatttaggaagcctacagtcaaatcatttgtcttggactgtgaaattgttgcctatgatcgtgaaaaacagaaaattttgccttttcaggtttgtattttaattatatcttaatttccagttaggttacattcaaagtggccatcctataaatatctgagcatgcaaaaggtgctgtacactagagctatttgatgttctaaactatcccttttaattttgcgaccttgtcctgtttacatttgtgtattttctgttgctagttgtgacttgtaaggaagtaaggaccagtgatcgttctccatctctgcagatacttagcacaagggctcgcaagggtgttaccataaatgacatcaaagtttcagtctgtacttttggctttgatattctttacataaacgggaaacctcttctccaggaacaactcaaaattcgtcgagaggtactgtacatctgcactgtagattcttaacgtacaatatcatttcattctgctactgaaaacattatctgtgctatcctttgcattcaatacatggcagcatctttacaactccttcgaagaagtgccaggtgtttttcaattggctactgcaattacatcaaatgacctggaggagatacagaaatttcttgacacagctgtcaactccaggtaactgaaatttctaaagcatacattggccagcttttttaaatgtcttctactagttcaatagtttcaaggtctcatttgtgctcaataaatttggtttaggcacaagataaataaaacactggattgcagcatttgatttgaagttttggggatatgaattatgatataggatcagttcagttttggatgaaagtaaatgcattacaataaattttgaagaataatagttctaaagaagaagaaaaaaatccatgcctttaaagtcagtcccttggaaatgaagtaattataaaggtcatgcttcaaacatttatacgttgtgattgatgaaacatgacattgtagatgattgcacatttgcttcctgaatgattcagacgcaacagtttgaagtcttctccaatttttatcatgtctaacctagaccctctggctgattctaggcatatccaacaacaaagattttcttaccatccaacttatttacagcaaatgctatagggcttttccttgactatcgcatagaccattctaattatattgttctgagaggaaaacttatagatctgtattcaacttggattgtgaaaagaatatgctaattaaactatgttagctgtagcatgtgtacatcatcactccttgaagcaatttttctgttcagaggagtttcacatgaaactgccagtatagcaatgttaggaaacatatgtattattttaaactttcctgttgttttattaacaaaattaattgatatatgaattctgagtgaaggattgtggaatggtgatttttttctcctattttttaccaagatccttttctgtgcactaagttttcatctactgaagttgtgaagggttgattatcaagacattggataaagacgctacatatgagccagcgaagcgatcaaacaattggttgaaactgaagaaggattacatggataggtagtacattgcaagaatactgatttaactctcttgcagaacatgcaaatctagaaaatcatagtggctggctatgcatattctatttatctcttatgctatggtcaaagattcaaaatctccaaacatcatttagattgatctgtcttgactttctgttacatctgggtccatgtgctgtattttagtagaaatttataaataaagcatcaatacttgtgtttctaaagttatgtatccttgtttctttttggcagcattggtgactctttggacttagtacctattgctgccttctatggtagaggaaaacgaacaggtggatggttcttttccatcatgcttatactgataaaaataaaaatgaactaaatttaagtgtttctttccctccttgatataactgcctcttcttcaagtaatttttgcagagctcaattgctttagtttgtttctttcatgctaatgcatttttcttctgcccttgttttgcttactaggtgtctttggatcattcctcctggcatgctatgatgagcagaatgaagagtatcaaacaatatgcaacataggtagttgcttcttcttttgaaaaagcccaagcttcttagatgagtccttcatgctttaatcttgatgcatttaggtactggattttctgagcaacagcttgaagaacgttctgcgagccttcgaagtaaagtgatagaaaaaccaaaggtgatacttgagcctcttgttcaatgactggttcttattgacaatttgttattatttttgacgtccttcacattaatgctcttgtttgcacaggcatactatagatttgctgacacaatggaccctgatgtgtggtttgagccatcagaggtaatgtgcatattaaacctcgataacatactatcatttcacaataatatatatactttggtgtctttgaaaactttgtgtatgcttgcagatctaaatccatatgattctacctatttaaaaccactcattaaattgtttggttgctgttacatgtatttgatgcatttcatgtttgccctgaagattgcttggggttaagcctgttgtagtttaattaacttcattttctcgtttttctcaggtgtgggaggtcaaagctgcagatctgagcataagccctgtacatcgtgctgctaatggtatagtcgatcccaataaggttggtagttttatttcccattgccattcctccccatctagattgtatacttttgatatatgatgggaaggctaatgctgaaattgaatcagggtatctccctaagattccctcgtctgttgagattacgtgacgataaaagcccagaacaagccaccacgtctgaccaagttcgttcactgcctctttgctattttcaattgtttgatgttttgcatgtctcaattcggattgtgtccaaattttgcaggtcgctgacatgtaccggtctcaaaagatcaaccatggttataaccaggaggatgaggacgatgactgatgctgactcatttcttggggctggatgggatggtccactgaggtaaacactagtatttacagtttccagcttattctcaatcgtaatatttttatgatgatcattgaacaggtattgaccagagcatgcgtttccagtttgttccggcctgattcgaatggcttagggtatatttagatttgtgcattcctcgtgatactgtatcctgctttagtttctttctttttattgtttaacatgtggattctgtgagctgaccaaggctcaatcaaactgtaccggtggaagttgagctgtattgacactattattagcactaatatgcgtcactctttttccccctctttttaaaatgtgtcactctttgtagttttgagatttttcatttgagatcgttaaaatgctcaaaacaaattaattgcatatttaacatgagggtatttttgatttcttatactaataccgttagagtcaaatctaatggaagtggcataaagagc

SEQ ID NO: 3891 - DNA, 14135 bp, Sorghum bicolor
ttgtgggagcttaaaatccttcttcaaagtaattttacctcctatactgtagttcatacatcccgttcatataattcggctgctgatagccttgctgccctaggggcgagtttgagtctgggtgaaggtccgattgtggacaacatcccaaattgtactcgagtcctcgtcgccaatgatttggcgccgttttatgagtaatggagaacctttccatgttcaaaaaaaaagaagtcaagaagtgtgttggagcgcaacaaagcatgccaatctacattgtttctaatattgacttagattcaatagtttctaatagggtcacattgtatcaataaacattgttatcttgttgcctttgcctttataggctgatggctgtgattgtatgagaaaaactatgtatgctttaatattatagtgctgccatatctaattatgaagtgtatgtatataatgcataaaatactttttgtttttcagtaattgtagggcgcccaaagggcgcctgatgttctagtggagttgatttggagctcccacaccatcatcgccgcatcaaatcggctaggtcggacggatcgagggctcgagggagaggttgggcggagtggtgggcttagcgcggccatcgatctccctagccacggtggtgggcctggcgcggccggcgaggagcagcctaacatggcaaggtgggcagggaggcgactgggcagcgatttttgcatctgggctgttggaaaagcaaagcttttgggtttggaacccttaggccttgtttagatttaatttttttttggattttgacactgtagcattttcatttttatttaacaaacattgtccaattatgaaataactagatttaaaagattcgtctcgtgattttatagataaactgtgcaattagtttgtgttttcatttatatttagtgtttcatatatataccacaagattcgatgtaacgaaaaatctcgaaaagtttttggttttgggtgaactaaacaaggcctgtttgttggagacagtgtgaggccttgtttagttcgcaaaatttttcaagatttcccgtcacatagaatctttggtcgcatgcatggaatattaaatatagacgaaaataaaaactaattgtacagtttatctgtaatttgtgagatgaatcttttgagcctagttactccgtgattgaacaatgtttgtcaaataaaaacgaaagtgctacagtagtaaaaaaaaccaaaatttttacgaattaaacaatgcctaaagttcatcgagacatcccaggtaccacgagcaacgtctgtcggttctgtgcgactgtgcccaagcgttacatgtggccccggcgtttccgtggccgcaagcaacgcacaagaaaaagaagggctgtaaatgcaagctgctaggccttgtttacttcccagaaatttttgcaaaatttttcacattctccgtcacatcgaatctttaaacgcatgcatggagtattaaatatagacgaaaataaaaactaattgcacagtttggtcgaaattgacgagacgaaacttttaagcctaattagtccatgattggacaatatttgtcaaatacaaacgaaaatgctacagtgtccatttcccaaaatttttcggaactaaacaaggccaaaatctcggacgccacgccgccacgagcgcatgcgcatgggcccaaaaacaactgtccccttccgaggtccacctgtctgtcacggtctcccacggaggttgtctggtctgggcgagtcttatcacccacccccagaggcctcgttctaatccacacgacacgagagacgaaggtcgagcacgactccaaccgcaacgcgcgagcggcgagcctcatcattcccaaccgaacacacgcgagtgcgagcacgagtataccgaccacgagcagacgagctcctccggcccgccaccagtgtcatcgcgtcgccgtcgcgtcgcgtccgcctgcctcgcgctcgtccatggcttccgtctccacggcgccgcgcgccccgctcccggcggtggcctcctcgtcctcgtcgtccgcgcggcaggtggatccgaaccctagcggcagcagcttcctcgccgggcggcgcctccgcgtcgtccgccgcctcgccggcgcggccccgtcgcggcgcgctccgttggcctgctgctccgcgcgtagccccggcgcggacgccggcggcgatgagcggcgccggcggggttgggacgcgatgctccacgacgccttccagggtgccgtgcggcggtggagcgagtacgtccgaaattactggcccccatcgacctctgttaaggaggtgggtacggggaagagggttgggagttctcacgagcaggaggtgatgaatgggggtgaagagaggaaggctggggatgaagagggaaaatggggctgggagaggtggaagcggcactttgctctcgttgaggagagcgagcgtctcgttgatgagctccaggttaattttatctctatacttactacatggtagtaatcagcctgtaatgctttaaatgtggacggaacttgcttatgaatcaacactggagtttttacaccacttcacttgctaattagcacaagtttgaagacgtggttgaatgaagacgagaatttccactattagtataatcctggaagtttattctttgaaatgcccctcaaaataagctggggcttcttttggttaaaggttcaatcgaacacaatgcagtgcaccattgtatgaataggatgtaaacatcattttccattttttttatatagcttctgcatcagcatttgttacttgagtggcgcgagtgtaaagaaagttgcctaacacggatactttacacactaggttcatgctaattaactgttgtaggagctttactcaggaaaaagctattaaactcacactcaaatttgaacaggctgctttgaagtaaatgtttttttttgatgtattatttgaatcgactttgtagaatgatgaaagggttcttttatcaaaatcattgacattctccatttgctgcctatgatattcacttatttggcaccgcactgttgacatgttgtcaacaatacatgccttaacattgcaactctcagtagcaaacatcgaaatctccatttcattataagcccagtcacctgatataggttcacaaaccatgcatcatactattggtgaagtttgttactctgtttgtacagaaaaaatctatataacccccttggcatgtcgtctacttcaccccaacctaaaaaaccaggtcttgtgcacctcaaactatgtaatatggttcaataactccctgtggtgaggtgttttttttttcactgtggcatttgggcctgcttgtcagggatggcatgtggcgttttgtcccatttgtctatcacccgccgccctctccctcagttagtcaatctccctatctcctcctgttcttcattggggtgtagagaatccaagggctgtagtgacgccgacgcccttgtatttgcaaccggctttctagtgctcttgatggtccattgggttgtgcgtgggagggagagggataatggggattttgcatatgtgctcaccctaggcagatgcaacagtgatggtgacggcgaaggactgtgaccgaatacgaagagggcggcacatccatgcttgccgttgacatgcgtctctagtggccatggtccgaatccaagggcaccagcatgttgaataaaaccatacggtgttgaggaaccacgcggatatggcggacatgatctggaggaagagatcaagactgcagcggtggttattgaagttagtgaagaccatggcggtggtggcggcttttgtgagctccagctgctcaatcgacacctcactgagcaccccttaccctcaccacatcgttgtcacttgaaaccttcggtgagctccagccatgaggagccctcgatgggctccatgacgatgataggatggcggaaagcgcgcggcagagaggacagctgatggcattgttgctcctccacgacgcaggttaggttggccaatggcaacactgctcccttgtggcgccaccctcctgttccttggtcgtcatgccaggccggatggtggagcgctgcctaccactgcaacagtgttgaaggtcaagagtggatgagggagaccatgccgccttgcagctcagtcgaacagaggggcagaggagcatgtggaatgggacggtcagaggttgaaggagatcctgatgggacggccctgatgccatcagatgtctatgatgatccagatgccacatgtcatctctagcaagcaagcccaaatatcacggtggcaaaaacacctccggggtttatttgaatggtattacatagtttaagacaatacctttgtgtgtgtgtgggtgggtgggtggggggggggggggttatatatagacctttccctgtttttacatagaacccctatatgctcaaatagtcaaatgtagtgctggaattgcatctgttttcaatggaacacatgactaaacgtgcctgcctctattgtggtcagtaccaaactgcataatttattgtctaataaatgttttgagactgtccttggttcatgccagtgagccagtgttgcagagtttcaggagcttatgtgcgatttgagtgaggccctggccttgtttagttcccaaaaatttttgcaaaaactttcagattccccgtcacatcgaatcttgcggtacatgcatggaaattaaatatagataaaaataataactaattgcacagtttgcttgtaatttgcgagacgaatcttttgagcctaattagtccatgattggataatattcgtaaaatacaaacgaaagtgctagtgtaaattttgcaaaagtttttggaactaaacaaggtgcctgtttagttcccacccaaaaacttttcgtgacatcacatcgaatgtttgaacgcatgcatggagcactaaatatagattaaaaaaataactaattgcatagtttgcatgcattttgacaaatcttttaagcctaattagtccatgattggacactaatcgttatagttacaaatgtgctacggtacccaaaaacttttcttttcgcgaactaaacaaggcctgatgtgcaatgtggtttttaaactattgagatgttagtcacgaattacgtgctgtcaaaatagaactttttgaagtacatgttgatagaacttctctttgagtgaattgttgcttgcatggttcacccatgtgtgtgtgttgcattttgtgcagatctcacctcaaacaccataatagcagtatagcactataatctatattgagaaatagcaaatatcttgatacatgtatattgcatttcagctgcaactccaggctgctgtttatagagaagactacaggagtgctcataaactgaggctggctattgctgctacagcaaaaaatgacactgtgggcagagctatctctgacttaaatgtaagaaatatctattttcttatgtatgtacagttattagtggtaaatagcatttcttacctttttcattttcttgcaattttgaatcaccccctctacattacgccctacttgaagtgtaatgttggtcctactctacaaaaaggatgaatgtctggcatggttaatagtttagctgcatatctctgaatatttagattggatgttgtactttcttataaaaagcacactactagatatttagtaaattatggtcaaagtggtgttttggaggtcttataagtataaaaaaacaccacttagttgactgaaagaagtaataaacaatagctaagtttgcagctatctgaaatgactcaacgtatggggatgttgttctttttttctacaacggtcgaaatcgaatttctttatgcgcgtaacaaaattacaaagttcaacatggggatgtttgcactaacatattctactagctgctgtagcacatactccggtgtaaccagtagcatgataccatgcaatatttaacacccttggtaacaggactgctagcgatataatacatttatagaagaaccagtatcaagtgttctcatgtagaggagctgatttggtctatgatcaagttgaggggctaaaattgttatttataagatagttgtctgctgttttgggttttgcagatggccatagacgaggagcgctacaaggatgcggcatatatcagagatcatgctggcgcaggactggttagtacaatggagttcctctatattgtttgtcctgtgctatctaagtttctttgacgtcttcgcatccaagttaatagatttttactattctttctcaaaagataaatctttgattatgctttgtaattcataattgcctattacaccatatttctttccatccaaacaaaatatgccattacctgatccattagagcatttgcagctggggtggtggtctggaatttctggaaatttggctgatccatatggtcttataattcgtataagtgctgaacatggtcggtatgtggcaagaagttatgatacgaggtattaattttttttgaatattattacgtgcataataacatcattgttgattgtttatagtttaattgatcattctgtgagtggacttgctcttcacgttcgctgtctttgttttaaaggatggaatgctcaaatacatttcattattaatatttcgttgtggatgggaataaaaatgcctaggataatggggttctctactgcggtatgctctaggtcctatagcacttaaggagctaagcattattgttgattgtttatagtttaattgatcattctttgagtggacttgctcttcacgtttgcgtctttgttttaaaggatggaatgctcgaatacatttcaatattaatatttcgctgtggatggtaaaaattgcctaggacaattgggttgcggtatgctctaggtcctagagcacttaaggagctattggcatttgacaatgctattttggttatggggtgcgtatcagtagtggcttgagcatcaggaggtccctagtagagaaattgatgggtgcagcaggagagtagtgtagaagtgtgtctgtttgtggttgggttagcctacttagttgaatcagtcactggagcttatctgtgaagaattgtgtggacaaaatgggttgtgaattcataaaaatgaacaacttgttctcaaaataatatctcaaagcaagtctcagcatgccaatcataaatcattaaaatgttctatgaagaactgcaagaagaaacttcccttttatcattcctagttggtgatatggtgcagcaggctgcttgaacaacacatgtttcataaattaatataatcagcactataattttaaactttcttaaatatacgcactggtgatccatatgcttgtagctgatttcattttactggtgtaaaatgtgtttactttattctatgaaatatttggttgcatcctaaatgacttgttagttctcctcattttcagacagctggcttctgacagccctggtctccctatatttgaaatatactttgcagaggcaaatggtggatacaacctgcaggtacaatgttttgcagttaataaaagtaaagtcaatgtgcaaatattaaaataatcttggaaatgagattctgggttgggaaacatgaaaaacatgataatgacaagcgccttcttcccatggttgagatttttgacattaacagtatagaatatgaaaatgacaagcgtcatattggacagcattgcatactcattttttctaaaaaaaatattaactctctgtctggactatatgttgctggcctgtacttgcacatgtctgtcagacttgagtattaacatgaaaaaactttgtttcacttaacatttcttgttcccatagtagttgcctgttagtttcctcgaggccataaatccatgcacattgaacttgattgtttgtaactttgggaaaatgtatttggcatgcactgtgagaataaaattcctgtatcagttttgagcagcttccaatttcaagagctgatattgttaactgcaagatttcagtagctatgagtaaggtcacaataacagttgctcctatattaaaaatgaactgttatcttgttaactaatgtgttatagttctgtgcatcttctgaaaaattgggatgttattttcaggcagtgcatctgaaaccagatgatagcgattctgaccaagtgccaaacatgttaagggagaaacttggcattgacagtataaacatatctagcagttcagtagggtctaagcatgaaaaattcgatggaagtgtaaacatggatgataaagatagtgatgacagcaacattgctgctggccctggttcaaaaaacttgtcaagcgatccaactgcagttcccaggattaaaatcttgaaagtggtacccatgcagaatgttgaccaagactacataatcaatatatttgatcagatttcagaggaagatgatgacaatgatgatcctgaagttgaaaatgaatcttcagaagatgttggtgatgaagataacagtggagtagcagaaacagtttctgcagaagagaacggtgatgaatctggtgacgaaagtgatattgaagccttggtttcaattgattttgtcagtgagaataacaacgactatgcttctcgtccatctgatgaagcttttgaacgaatgccggctagattagaaaaaagagaccgcttctcattttccttctatactgaagaattcagtaaaaagctagatgctggaaaggcccagcagacttcaaagaaaacagttggtttgcataccgatcagcaggattatgatggttttgtccagcttgatcgtgtaaagttgagtggcagcaacaaaaaactatcggtaaatactttatttgtataatgttctgcattagcttttgatgccgttcattgtgcttcattgtatcatctaaatgagcattgattcatgtcttgtttgactatggggatcaaccgatttttttttaaatgatcacttctggtttaatctattcagtatctttatcaactggtaaagtaaaacatcaaacataaccttttttatgcttgaatcccagtggatcttctgagctgcattcattttgtaaattggaccactttgaccttgtgataaatagcaaggacctgtcaaccatttctccgcagaatgtgtaccatacctgctttttctagtttgctgttgatggtcagattctttcatctgtatcaaataccttagattattatgataatgttgccccatgatccttcatgtactttttgattatctagtttgctgttgattgtcagattccaacatgcacattgacacgactatataaatgaattccgcggtttttgaacatatatgtgcttggagtaaaaaagaggatgaatttctgtatggtgctgtcaacgtacaatgtgaaatacttttaaacagcttgatatcttgctggaatgtttctgaactgaacgttgtaatttcgttacaagcgtaatgaaattcggttgcgaccggtgtggaaaagcttcttgatatcatttgaacttatctaatgcagatactgcaacttggcatcaaacaaaataacaacaaggttcagcaaaaactgcatggagttacccactttagtcgtattcagatgcctatatcttcagatcctcttaccggtatgttccaaattgagtaccccccacttgagcctttcatgatatgcatcttgtcttctcttttctttctggtattgactgaaatatattctctgggcaggcttatatgtgaccgcctcaggacttgactcagaaattcttagtttgcaacgaaaatttggtcaatggcgggaggatggttcatctgaggagcatagtgacctattgttctatgagtatgttgaagctgtaaaattaacaggggacaaccttgtgccagctggtcaggtgtgataactttcactgggttcttattaccatacaggaatagtgtttgtaagtagctgagtaatacttgccttctggtttatgctcttcctgtttagaaggatacttcctccagtcacaaatataagtccatctaagtttgaactaaataaagcttttctaacttcgacaagcaatatcaataaaagtatattatcttttctcgaaaaacgcaggagagctgcgcatcattctattaagaagtgaaagacacccatacaacacacgtccagtcatatatgattggaagcagttttcataatgaatgtagtaatgtcaatctatatataataatggtcaaagttaaacaaggtttgatttaggacaaatccaagtgaacttatatttgtgatctgaggaagtatttaatacataattttttatattcccatgttaattttcactcaccaacttcaagctaagaagtgtgttcatcatatcatacacatttgtggacagccttctctgttgatttcgttcagttgttgcataaatctttccaaggagtgctgacgcagcctaactttatgctatatcatcgataagtataattgtcattgataagcatagtaattcagactgacctatggttcctttgctaggttgtcttccgtgcaaaagttggtgaacgttatcagctccctcataagggaattatccctagagaacttggagtggtattttctataatccaaatagtattttgtcttttcaccatcaaacatcaaaccttacaaccaatgtgatatagattgctaggtacaaggggcaaaggaaaattgcagatcctggtttccaaaaccctcgatgggttgacggggagcttttgatactagatggaaaggtgaattttataaacaaattacttcttttattctatacttattgtctttctgatatactttctgttttgcaacttgcagttcatcagagatggtcctgtgatagctttcttttactggacatctaattttcatcttttcgaattctttagacggttgaggctttctgactagttcccttctaaaagtagttaaaggtaaactgcatttcatctagtactggtttactatttggcattattattgtactaaagtactattatattttaattttactgctgtgtgttcttgtgcttgccaaattccattatatgttttactatttatgcagaggtagtgcttgttggctgttgcaggccatcattgatccaaatttggcctagtttctttctgggaatgctacattcatcctaaatggtcatcctttttggcccctctaataagcattaaaatggacaatggatccaactggctgaattttacacagcagttggtgctctctcatagggtaaagccagaagtaaatgaagtatgcaaaattcttacatttgtttatttaggataaagatatgctgttgaagcttactacttgtatccactttctcctgcaatctgtctgctttgggacaaagttggtatttgattattgtggtgataaaatggtgaattcaattctaactttgcctaaggttaggagacatggttttgacttaacatatcaagtttggcttaatatttatgcatgtctgtggtgaattcaagaacagtctgttcatttgttgcctgaagatgtcattatattggatttttctgggtctggaagtgtagcatcttaataattcttaaatggctggaaatgttcttccagactgatatttgttactccctttgttccgaattgtaaggcgttttggcttttctagatacattgatttcactatgtatctagacatagtgtatatctaagcggaaactcaattacatgactggtcgcgcgacgcgcgtgcagtacgggagtcagcccctctcttcttctccatctctgccgggattagaaaggcaggccaggtggtggggatgggagagacggcggcgaggtggcggaggaggaggtggctgggccaggttggggtggtggcgaccatggtcatgtgaaccgctggtggcacggagctctggcgagaccctaccgtgctgtggtgggtgtccaaacctgtgcgccggtggtggatgcgcgagggagggggcggaggaggaagggtgccagcgaggaggaagacaggtcgtgggatatcttcctccatatctaagtgcatagcgaaagctatgtatctagaaaacccaaaacatcttatgatttggaacagaggggtaggaaataatatcgaacggttcttgtggttagcatttacgatgtatgcacccacaggtgcttgtgccatagctggaaaggtactttgcttgcccattctaataatcaagtattcccccccgttccagattacaaggcattttggctttttcagatatactcactgctttactatgtatctagacattaaatacataacaaaagctacttatctagagaagccaaagcgttttttaatttggaatggagggagtagctctaagatcattcaatgcgatacttgagtagctttttcagaccagccattattcatgtgttaggctgtacttttctgtcattcattcaagtgaacaaacactagaaggaattgtgccatatggtgaagagcagtttgtagttattcagggttgagactcttgatcagaaactgctcctactccctgcattttgcctgctttatactccatctgtttcaaactataagacgttttggtttttctatatacaatggtagacatagcaaaagctacgtatctagaaaagccaaaatatcttataatttgaaatggaaggagtaacatgacacacgagtccatgaccagagagagagagttgaggccaggttttaggtcagtttacgttcaggggtcgtgtagtcctgtgctactgtgctttgggtcctttttgctgtactctgaagttacacctgcctaccgttttcatagtgcatcaaatttaacttagatttcttgtacctcttagcaggccatgcttatttcagcatagttgcatttggagccaaccggagttgcctggcattatattttccggggacagttctgatgtggagaacagggctggcatgaatcaagtggcatctccatccactctgaaagcctgccataagggtggaaatagctcgcagctgcaggaagaggaataatcctaccaacatggatgagccgcgggcgcaacatactcgttccgcttctgcgccgcttgcctgccaggtccaaaaccgccagttcctgtgtttctcagagcacatagtaaagcacctcaaatatgtaaagttatgcagtcgcagataatttaggattttgagagcatcttggcagctttcatgcatgcagagtcagtatgtgaaatagtacgagcaatggttttgtgtagcgtgatcaaacagtggccgtcatatttgtacatatgtcgcaatcagcagcagaggcgtgcagcccaacacggttacactttcatagatttgttaatatgttgaagtttgtttgagcgtgccttttctcacgcaagcactcttaaaaaaattaagcttctctgcaacaagcaagggtagcaaaaaggctgtgttgtcgctgcagcaagaggtacgctgttaacctactcgtccttgtttcgcactcgcacgtgtaaatgatagccgtatttacaatgctgtgctatacgaaggaccagtaagatctgttagatctgtcggctttctctagatttggtgtgtgtttattgggagaagtaaatgttaattggttgacatatgacaccgaaggattgtgagctagcgttcgttgtgaattttctgaagctaatgtcctttcagtgtgtagttcatctcgttgcaagtggcgtgtggtttttgtggtcttgaaaaccttgtatactgagagcttggtgtatttttagtgtgatttttgaagctctgggaggctgtggacgaagatggccaaactagtttttgatgtactattagttttttatatactattatttttagaggttattttatgtcacattatttatcttttgtgctagcccattattttcttggatatataga

SEQ ID NO: 3892 - DNA, 6196 bp, Sorghum bicolor
caaaattatagaaggagttataaagatttatgagatcaagtagatatactaggaaaatatatttaataaaaaatctaatgatacttagttggtatcataaatgttattattttatcatataaatttggtcaaacttgagatgctttgactctataagatttttagaatgacttataatttaggatggagggagtataatatataatgtcaatttctacattaataaatgaataattttatagtaacaattattttttgcagaatgtcttaaatagatattaactatgtgattctgaccttctgaaaatgatggatacaacgagttccaacaaatttgattataactcaagtgttgcacccatgttagaccgtgtgcaagtggatcaatcatgttttgttagatgaatatatgttgattacgcaagaaagataaactaatacgaaaaatgctttgcatcagactcgtgtatttttccttattctcaacatgctctgatatgtattatcaacccttagaaaattttgcattaagaaccttagaaaagcttgtattctcttttcctcttccacgagcgttgagcagagcaggggacgggccgattccggatgattcagtccgtgtggtcgccggcgacaacaatggagagtcgtgtgggaagaggggtggcactagcagctaggcctaaccttgccgcgggcggctcagcagagcagagcacgcacacaggattgcggagtgaggacattagcttcgattcggccgaggaaagatacggcggcgacggccggtcggccggcgagctacgacgggcctgcgtggtcccagggccggcccttccgcgcgagccacggtctgttggccacgcgcgcaggcacggctacagtggcgcagcccggctgccgaggatggctgggatcgccgcagcgggggaatggccgcgtggggctggggccagagccggctgccgtaggcgacggccaatgggaggctgtgggagctacatgagacacgtggcaagagaataagctggagccgatggtgcagatttcgctgtgggagctatgcgagacacgtggcaagagaataagccaaagccgaaggtgcggatttcgcatagtagaagatttgcaccaagaataaaatagcattcgaacaaaaaaaattattcagaacaagatgggctatgagaaactagatgattttgcatcatcactaatgcactcaaaagtcttcaggttctattcctgtctaacccttgtacctattttttgcatctcaattattgcagttaggaagccttccattgcagccggtttctgttgaaaaataacatatatggacttgaacgtatcctcatgcctggcccaataattcttttgtaatcctcttgtatgaactgtagatatacagtgttagcattcttttcgtcttggatagaatggtagaacatgcacctactccctccgtttcaaaaagagtgtcgttttagatttttatgccacaagtttgacttgatttgtaaaaaatatatgcaatatttatatctctaaataaatttgttaaaaacaagacataaaaatctttctaataatactaattatgtactataaatattcacatttttaactatatatttagttaaagttattttttggaaagcgaaaacgacacttatgttggcacggacgaagtataccacaggtttcagcatcaaccacacgaccacatgtaaacagcactcgtcatacaaggacaagtaacaaaagatcacaccaactggatgggcaaaattactgggcagaccaaagaaggggtggaaagaatgaaccatctccctccagaaaaggaggaggaacgagacgaccagtccgtgacctaccatgttttcgctcatgccttcttcgtctcctgcaaaacaaccgaaaccaaacaaaccccgcctctgcgaccgcgtcgcctattaaagcacccgagatgtttgccatggcctcgccgcacaagaaaatcacagcagcagtgcagcattagaaacagaaaggtagtaggccaaggagagccagtgcttgcggtgacaatgacgggcggcgccaatggcaggagccagcagagctccaggggcaaggcgatgctgctcgccttgggcaagggcttccctgaccaagttctgcctcaggagaaggttgtggagagctacctccaagacagcagctgcgacgatcccgccaccagggccaagcttgagcgcctttgtaagcttccttccttgtttcatcacacttgctgctttgtaaattcattttatctttacgatggagaattttaagttgacaaatgcatcttagctctatctagtcataaagatctatataaggtctaaacaacaacgtccagttgtcacaggatcatgatttttaacattaccttgtcatataattgtctattgcaaagtgaaaaatggaactagtacgaaaaaaaacactacaattccttatagaagcaaacaaaacacgggcacacaatttcagtgaactgttgctctaagaaaatcgctatgatgctgattaagttcactttttgcatcctgtttagagcttcctggctcactgtataagattagccttcagtatttatgtgatgatttgatttgcctacgataaacagatgagtattgcccaaatgattttgttttccaggcacgaccactacagtgaggacaaggtacactgtcatgtccaaggagctactggataagcacccagagctgaagatggagggtactccaacactgacaccccgccttgacatctgcaatgctgcggtgatcgaccttggtgcagctgcagctcgtgctgcccttgacgattggggccgccctgcagctgatattacccacctcatctacatctcatccagtgagcttcgtctcccagggggagacgttcacctggctgcccgccttggccttagcccaaacaccgtgcgcacttcccttctcttccttggctgctccggtggcgctgctgccctccgcactgccaaggacattgctgagaacaacccagggagccgtgtcctagtaacggctgccgagaccactgtgctaggtttccggccaccaagttatgaccgtccttatgaccttgttggtgctgccctgtttggtgatggtgcctcagctgtgattataggagcaggccccatggcaccagcagaagatcctttcttagagcttgagttctccacacaggagttcctgcctgggactgataaggtaattgatggcaagattgcagaggaaggaattaattttaaactagggcgtgatttgcctgagaagattgaaagccgcatagaaggtttctgcaggactctcatgaaccaggtagggataaaggatttcaatgatgtattttgggctgtgcatcctggaggaccagcaatattgaacaggcttgagttctgccttgaacttcagccagagaagctcaagattagcagaaaagccttgaagaactatgggaacgtgagcagcaatacaatcttctatgtgctggagtacttgagggacgagctaaagaaaggggcaataagcgaagagtggggattgatcttggcttttggcccaggcatcacctttgaaggactgctagtccgaggggttaagaaaaccttcacaagctaatataatggagggaaaatttacatggcaagcatgaagattaattatatatacacagaaacatcgcataaagagcatagatgtcttggtggcagctgtgcaccacatagtacatcgctagcattttactgtatttatgtgtttctctatcaaacagtgtaaggtacttgagtttgcttcctagacattgtagaaataaggcactatacagcctgttgttccactgtactatgcactgattgcaggattacttcaatactgattgtatgcacgagtgcactaattacagtgcaactatcatattctcaaaggaaaaacagagtaattatgcgatgtggcatcaaacacacattacaacaaacatgttacaatgatagatagtagatgtatcatctatcatgatctcctaagcacttgacaaatgtcaaactttaacatcatttcaagtattattgaaaaacacaaaattgagcaagttcttacagtaaagggagcatccattacatcctgatctaaccacagaccttgcgaaatacagtccagcgacaacaagaaggcaacattggatcccatgttgaaagcctatcttcttcgccatcatcattcgaagtccaaaatgcatgaatcaatcagaagaaacgcagatgcctctaccaaatcatggattcgaatttggcggtccctctttgaaagaaagttcagcaacaaccttcccccaagcaagtttagcatcgcctttcacaagaaactccatcttggcaacaacatccttggcctctgttgacctgcctgccttcaccaaaccctcgaccaaacccttaacagcctcaaagggcggtgctgccttcattgcaaagcagctcttacaaatccacaatgcatcatcaagcttctctttctccaccaaactcctaaacagcaccacatatacctgtgaatgcgcagaaacacccaagtcacttcttccctcacgcctcttcatcaccttcatcctcttgaagacacgcgtcgctgccccaacatttccctccttgcagtacccctgcacgagagcattgtaggtaaggtaattcggcgctacacccttcgattccatcacgtcaagcagctcctcccccttgactgtctcgcctttcttggagaaccactgtatccggcagttgtaggtgacaacatttggctccaggttgctcaagctgatctccttcaaaagcttctcaaacccctcctcatcatcctgcacggaacaaccagcaaggacagtgttgtaggatatgatgtctggggcagggcggtgcttcaacttcttgttagccatttcgtcgagcagcttccgggcagcagcaagctcagaattcttgaccagcgcgtggaggagcacattgtgggaggcgcggccgggcgcgaccccatgcgaggactctgccagggtaatggtggacttgatttcatcgaggcggccggcgcggaggaacgccgaaaggagcgccgagagggagacgtcggagcgggcggcggggggagacgaggagaaggcccggagcgcgtcgtcgggtcccgggtaaagagagagcgcccgcgcaaggaggcccggggagggcggggtagaggcaaggaggaggtcaaggagcgaggcggcgaggtcggggcggcggaggcgggtcaggcgggaggtggccagcgaaaagagctggcgcgaggtgtggatgcgcgggaagtcatcgccggagagcgcggaggcgacgagggagtggatgcgggctgggtcagactcggcgcgcacggcgagctggaggtcgagcacgggggcgcgggcggaggtggaggtgggcgcggccggggtagaggttggggttgcggtggaggacgccgagggatcgacgtcggggagcgcggagaaggcgcggaggaggggagcgcaggccgcggcggcggcgcgtgggtgcgcagcgtggcggcggcggaggaggagggacgccatggtggggaaccggggacgtgggtgcgcagcggtacggggtttggcagggtttgggccttaagggcctatttcttttcttctctactttctcactcacactgtaatactgtatcagtgtagcgttagggtttgggacagaaagcgattagggggtgtttagttccccttctattaaaaaaataggttttggtttatcattttataaaatacaattaaatactatgtaaaatttttgacaagaaggtggttattctctattttggattttgattttgaaagacaacaaaaaaggtcaaaaactcaagaggccctcacgagggcatgaaattctgcataacacgaccctaaaaattttagcattttgtattttttttttgaagggcgtttagttcccctttcatccaaaaatttttaggttttgctctatcattttgcataatagaactaaacaccatgcaatttttttagcaaaaaagtggctatttttttatttttgattttggcctcaaaaggttaaaaaaaagcccaaaagagc

SEQ ID NO: 3893 - DNA, 3515 bp, Sorghum bicolor
taatcttacctccaaaagcttgatttacatcttttttaggacggagggagcacctccaccagtccccctccacacccctcaacaaatatggatgcaccatgttcgcttgaacttatccgcaccaactttttatctaagaacatgatttttctctcccaacaaatcaatatcagtcgaaattcaaagaatctaaagctcaaccaaatatataattaaaaatattaacatctatggcaccaaaaatttatatatgaaaatctaatgatacttatttaatattatactgtaaatactaatatttttatatttagtcaactcaagaaaatttacattagaattgcaatctttttgggatgaaaggcataatatatactccctctatccaatgtatcgttttagttttgttctatgtgaaaaaatttaaccattaccaattttttagaaaaagtccactaatatctacaatatcaaaatagttttcatttgattttccatcaactatgtgatagagtatttatttaagcatgctacatttttccagaaaaagacttggttagaattagagagtttgatttgggacaaactatcatcatgaacaataatatagaacagagggagttagttgtagaaaactttaatatacttttttcattttcgtagtggttgttcatgttaagtgagcgtactttgacaatagttctgaaagtttgtatagagggactaacagccactttgatagtcctactatgaaactagaagtttaataagaactatttcacctttttctcaatcatgagcatgagccctctttatatacagtaaaaaaaagttcaatcaaccttatcaatataaggttaataaaacagcataaatttggaacaagggaactaagcaaatatgaaattccaatggtaaacactacatcatggattttggaatttattgtatactacctccatacctataaagaaagtcgtttaagacagcgatatggtctccaaagcctaactttgactccttatttttataaaaatatttatcaaaaagtggtatatgtatatttttatgaaagtatttttcaagacaaatctattcatatggttttcatatttccaaattcaacaacttaaaagttatttatgatttatattttcaatatttgatacaaactttgtccaaaataattttttttataggtatggagggagtatattttttctgaaatgaatgtgcaatacctctttttcaaagatccgttcctaccgcactcgtacaaaagtgtgtttgtttcagctatggactttggctatggactcgctctagtgacaagcttgcacatgctccacaaagcttgtttgcttaagttcgttagtcaaatttgtcaattattttgtcaacaatattttttgttatagcttgtcaaccaaggccttatttagatgtgaaaactttttggatttcgctactgtagcactttcgtttgtttgtgacaaatattgtccaattatagactaattagagacaaaagattcgtctcgtgacttacagataaattgtgtaattagtttttgttttcatatatatttaatgcttcatacgccgtaaaattagatgtgacggagaattttaaatttttttgttttttagggtgaactaaacaaggccccaatgaacaaagccggatttgtcagccacagtgcgcagcaatacgccttggctgcccatacggctgtcttttgctgctcccgcccgcaccaagacgctacgctagtgtactatacacacactcccgggccagctcaccaatcaccccagtacgctgacgctgacaccaggccaccaacagtgggcagtggcagagtcgtaacttgaggcaaccgccccgcccacttccgtcaggacgcggcgccgatcaaccttatccacatctcttctcaccccccttccccgccaccgctataaagcccgcgcctccacccgttgccaaacgcgaaccacttcacagttcacaaaggttaccccccacctcgcccgcgcgcggtggttcgtgttagtccagtcacagtcacacagcagccgtttctctcttctcttctctcccccggaggggatggccggtcgccggagcagcctctccatggtcgcgtcgcaccggctgttcgcgcccgcggtgcaccctgtgggcggcgcagccgcagaccatggcgtggagctcgacgaggccgacgtcatctggggcggcggcggccagacgtcgtcctctccgtcgtcgtcgtcgtcgttcctgtcctccgcggccgacccgtacgcgcggtcgccgccggtggccgcgccgtcgtccaagcagaagccgcgtggcgcgggtggcgctccggctccggggccggcgtcggtgcccgtcaacatcccggactggtccaagatcctgggcgccgagtacgccgggagctgcgccgcggcgcgcgcggccgggtgggcggcgcacgacgaccgcgcggactttttcaccgacgactgcggcaccgggggccggcgctgggtgccaccccacgaggtggtgcagggccgggatcgcgcggcggcgtctttctccgtgcgcgagggcgtgggacgcacgctcaagggccgcgacctccgccgcgtccgcaacgccatctgggagaagaccggcttccaggactgaccgaccggtgtcagcctcagcaccgtcgccggtcgccgcccacctttgacggcaatgcctgccgcggcggcctcgttgatcccgttctcgccttgaggaggaagagaggaggagctttcgcttgattagtgtggccttaatccttctggattaattcttcgacgagttcttttttctttgttgtattttggttcttgtcgttctagtcgtgatcgctgaggaagagagtagagattagaagcctctgtttttggcatttttttcccggagaggctccgtcgatgtactaccactattattaaaattaattcatcttgattactactagtattaattatcttcttgtattctactgcaagtacttgaatcatcttccagtccagttctctttttttttaaaaaaaaaaactggaacctatttataccgtttcactgatgttaaattatttccgcaagaaaaaaaatgtttctgacaaaattcccatggtagcacttccagagcaatagttgaacattgcttaatttgctgggtcctattttaatactagtaatgatggtactgtagctatcctactgtttcagtaccgtaatcagtaatcacgaaattgtcagtttggtcgtgatccgattgtcctgtgctaaagccttcgtttgtatttgtatttggtaattattgtttaatcataaactaactaagtttaaaagattcatctctcaaattaaagataaattgtgcaattagtttttattttcgtctatatttaattaatgctctatatatatgtctaaaaatttaacgtaacgaaaaatattaaaatgtttttggattttg

SEQ ID NO: 3894 - DNA, 3631 bp, Sorghum bicolor
caggcatagcggctacaacgctcgttgcggatggtgtccccttggcgtccgatgtggcgtcccttcgcaaggaccctcggatgtgggttagttaggcaagcagcgatggaaatcaagtatactacgagctcgacatagtcattagcaagatcccttcaatatcaatttatgaaacaaaaaagatgtgaagttgagctcactgctcacctagcattgtcaccatcggagctcatggtcacagtcataggcgaggaagaggaaccattagacgaatccatgttcaggattcaggaagaggaagcagggaacctataccagtaccacagtaggtctggagctcgagcatcgtgcacttgcgctgtggacccacgcgcccacacctgtgcactcgcgcggccggcacctgggatgttgggatccctgtccggctatccctggtgggtgctgacgacggtggcccgcgaccgacctgctgctggcgctgggagcctgggattcacgcggacggcggacggcgggtggcgccctggcgggtgctgtgctggagctaggtggcgggctggcggcttgctgctggagctgggatgctaggtgctgtgctgccgtgctgactgctgagctactcaatctggatctagggtctggccgtctggggacgtcgagcgctgggcccttgaggttgaggcggctgtcggctggggactggactggagtctggtctgggactagggtaatgggattagggttatctggttgcaagctctcaatatatactcgttgttagttgggctagatggacctagcatcttgggcctccacatccacattctgcacatatatttctattaacggggcgggtatgcgtgtttcaggtaagaggacaggttgaacatctccgaacccgctagacccgatggggagggaattttctccattagtctttgtgtggggagcaactctctcccatccccgatccacaatggaggaagtcccgcggggaatcgggcttcgagtccccattgccatttggagatcgatctgagatgcgagctggtgcggtgcagtcgaagcctggtcctccatttgccaaaaaaacccctggaacttgctaaaaaaaagagagaggaaggaaccccttgaagaaatgcaactctttgcattgttccttggaaaaagattgcaacttgaagttgtgctgacaaaggatcatcggtgtggcactgagactacatggccgcaacaagaacaagcaatgtttaacgcggggcggttagtagacacgcgcgtgcctatgaattctaggatcgtttaacgcacgataaggatacgcaggtacaacatgcttggacgagatactaattaaggccttaaggccttatttacttccactctaaaatccaatttttttcaaaattcttcatcatatcgaatatttagacgcatgcatgaagtattaaatatagacaaaaataaaaactaattatacagtttagtcgaaatttacaagacgaatcttttaagcctagttagtccatgattagacaataattaccataaataaataaaagtattatagtgtcgtgaaatttttagctttgagaactaaacacacggcctaaggtcttgtttagacgcgaaaagattttgtatttcgctattgtagcactttcgtttatttatggcaaatattgtccaattatagactaactcggatcaaaagattcttctcgcgatttacaggtaaactgtgcaattagtttttatttttgtctatatttaatgcttcatgcatgtgccgaaagattcgatgtgacgaagaattttgaaaactttttgttttcggggtgaacgaggcctaagaatatatgatgaaagaggaggggagtccggatttgcgtcgtgtgctagctcctggtacgtatatatatatatatatatatatatatatatatacggcaatcatggcgtttcagccggaagaagcagcgcggcaagatctgatgaacgacgacgtggtcagcgagatcctgctccgcctcccgtccgccgccgttctccgctcccgtgccgtctgcagggcgtggcgccgcatcgccagcagcccagccttcgccgcggcccacgcccgccgccgcccgctggagctcatcttccagcgccacggtccgagcggcgcgctcgaaagcatcccggcggccgccctcgacgagcctcagcgccggtgcctcgacgttgagtaccccgaggaatctagctggcgaggctacaacctgatcgcttcctgcgacgggctcctgctgttccagcgaggtcgcggcggcggcacctactacgtctgcaacccggtaacccggcagtggacgacagtgctgcctcgtcccgccggcaccttcacgctgccctgcggcttctacgtccacgggccaacccgcgagcaccgcctgctgtgcctcacgagcgaccaccagggatcgcactacgtttactcgctcgaagccgcccaagcccggcggctgggacaagcgttgccggtcgtggggttgttggttgaccagccaatctgctccctcaaccatcgcgggaagcttcactggctgcgccatccccgggtcatcttctcgacagagaacctcatggcggccgaagacgacgacaagtacaagatcttggcgtttgacaccatgtcggagacgttccggcggatctcccgcccgccgctgaggaggagggacggcgtcgccgagttcttcctgctggagatggacgggatgctggccatggcggattttctcgatggttcgatgcacctttcggtgctggaggactataatgatgacaatagctggacacgtcgtctccaggtttatttgccggcaccgttgcagcatgcatgttgggcggtgaacgccgacgtggaaggagcagcagggcaggatgtgattcttctaggagacagcaggacatgttgggtggggctataccatgtcaagcagaagagggtgttaaagaaaattctacttgctgacaatgagaggcgtggaattgcgcctcccacgctggtgcatgccctcttatttagggacagccttgagcgacacaacttcttccatcttcatcatagtccacaataacatagtaattattctcccatcttcattttccaaatatatatagtaaagtcttgcaaaaacgtttgtagaatttttttcaagataacttttatgaaagttgtattgaaaaaagaagatttatattagattatagctgcatatatcatgttataatcattctaaaatacaatatgtatatctagaaactaatcttcatctacattgcacccacactttgtgtagctccaaatctcagtctcaaacttgtatcagaatcgtatggatgaccgtacagacaaacactcagaaaaaggcccgagaatagatgtccaacaaacaacaaccaatattcctacatgcatttgagaagctttttctttcttgtgtcttctttcttcttcctacaccgaagaataaggaagactaatctaaatctttcgaactcaatgtaccagtaactgccttgagggggcagacttattctcactagtctttcattgtcgtcagatttaaccacaaca

SEQ ID NO: 3895 - DNA, 19831 bp, Sorghum bicolor
ggggggggagtgggccggcctgcgcgccgcgcgcgtgtcggctgcgctctcgaggggctcggcccagggtggccatggcccagggaacacgagtcgggttgggctttccgtttgcgcgctgccagcccaagaatatgacgtgctggctatatgggccgacaggttgccactgcgcttggctttcccggcttttgagccgcatcctgctggagcactccagcttttgtgtctggtcctcgccttttctgagttttctccttgaaacatgaaagttttggcttcactttttttttccgctttcttttgcggtaacctttggtttgcttttgggacgactctttcttggagacaatatgttaaatgcgatttgtcaggtttggaggtaatttatcaaacggaaatccttccgatcacagacgactgatttgatggtttgccttgaactatttggacagctgaaatatcatctttatacaattttttttttgttgatttatttggtaggagatgcataatttagtgcaaatgtacaaagctgagctggcgccattttatctctttggatatagtggatgtgctcgaatgctcgatattatagctgtggctggcgcaggtcatcgctacaatgatttcaatgtagccatggcctagacaatctactaacacttaatgtcctctttatttttttattcttaatgttgccctctattgtttagcctttgaaccctttcttgtttgagataaaatcttagcgtattaaatctttgtcacccccttgagagggacatgtgcatttgcaagagctaggtgtgtcagtagattcatacaaaacctacaaagtgaatagagtaataaaataaaacctaaaaacaaatactccttttggtttcaaatatggtttgtctcctttgagtcaaaatttgtttaacctttctcaaccacggtagcggtacataagctcacacactacctttgtggccttgtttagttctaattttttttgcaaaaatttttagattctccatcacatcaaatcttgtgatacatgcatagaatattaaatatagataacaaaataactaattgcacagtttgactgtaatttacgagacgaatcttttgaacacatgattggacaatatttgtcaaatataaccgaaaatgctataatattcattttgcaacaaaatttcgaactaaacaaggtctatataaagcaccttcgaaaacgtaaattatatataaaaaagttatatagatggataatatatgcttgatgtctgcaatactttcatcacacataatcaaacagtgtatttttacaaaaactgtcaaagcatcgtattaaggccttgtttagttcccaaaaattttacaaaaaaaattagattgtacgtcacatcgaattttgcagcgtgaaacattaaatatagttaaaaaatatctaattctacgatttatctgttagtttataattaaataatatatattatcaaatacaaatgaaagtgctactccctccgtcccaaattataagtcattccaagaatcttggagagtcaaagttttttaagtttgaccaaatttatatagcaaaataataacatttttggtaccaaccaagtatcattatattctttgttagttatattttcatagtatacctattttatgacataaatctttatatttctctctatatttttggtcaaacttgaaaatactttgactcttcaagattcttggaatgacttataatttgaaacagagggagtaccatgtctattttgtaaaatttttaaaattaaacaagaccaaagccaacagtgggagcattaaaaaaaaaggaaattcgctggcacttggatcgatgattacacagcgctcacagcgccagcaaagcacgccggctgcgtcgtctctgttccacttccacctccgcacccggacccagggcccccagaagaccaaaaaccgcaaaactatccagccaccattcatccctttctctcctgctgctctccacctccgccgcctccctgccctccgcagctactccacgcccggcggggtggccgctagccggcggccaaaccctaggcgatcgcggagagcccaccacgcttcaggcgcgatcagccgccaccatgcagggcttccccggcggcgcccccgatccgcagcagctccaggccaccatgctcgccatcgagcaggcctgctccctcatccaggtcccattccgcagcccacaccctcgttgaagagcttgaattccatgtgttccgtgcttttagcactttgctctcggtgccccggtgttgttagattcggagagcgcgcgcggacttgtgcttgccttgattgtgctcacgccgttgatgatttgcctaggttatgcagattttactgcactttgatggtttgcctgggggacttgattgagtgtgtgtggcgtgctctgttgatcagtgcttctctgtgcatttggtgacgggatcccgtttgaatgcgtgtcagatgaggtttcgccacggattggttgttttgttggacatttgaaaattttaatggttttcttaatttgtttgttttgggcacgttaattgattgcttaggagtgaggtgttagtacctcaatgagttctaacacattttatgttagcgccttaatgacttctagtacatttgaaagttggctatgaatcccgtagatgctggttaattaaaagttttttgtcttgacattgcgtttctaaagcatgtaatttctatgctagggaatagtactgtttctacagggtggctttagtgatattttgtgacacatttattcattggataacctgaagttcctcatttcagatttgggaatctgcttgtggcaattgagctatctattaggacttaggaattaggagggcctagtagaactgtgctgtgcagagaaagacactgtcggaatagcatttgctgacccttattaatctatccccaagctgttctcaactttttccacttcttgtgtgattatattcttttattttgaccatggatccttagtttattccgtaacattaaccaagctgcccaaattatgtgaagttttgttacagagtgtcttcctggtatctgtgtttagcttaatatatggaactgtcatggtgctaatgaacatgccagttttcttgtagaatgccatctattgcatctgtgttgatttagcatctatcctttttgacaatgggtaattttgcagctgcacatgaatccatctgaagcggaaaaggtgataacttcgctgcattcgtctctgatgccttatcaagcatgcagattcattcttggtatgctgttctcttgctatgtacctaggatgaactagaactctttctcaacagagcagatatatccatttttaagcttataactgactaaggttaggacttactagcagaaacatatcgcaatatgtattagttatgttgtttccatataacctgtgtacatgttgtttccattttgaagggagatacatttttatttgtttgtccgaattgttgttccgcagactgcaagtaataataatttaccccatttattatttgttattttggggcttttgtgctgaaaaaaataattattctgttatttttctcataaaaaatagttaagcctctctcttctagtgttaagatactcgaaaagagctgaaaacattatattctcccagagacatcgcaaatgcctaatgcgagattccaagctgctggtgcaattggtgatgctgcagtaagggagtggggaatccttacagatgacaacaaaagaagcctaataatgtgagtttttctttttgagggtgaaaacttgcaattaatgtgggatcatcacgtttttagcgtttactataactttttctatcatttgtagatattgtttaaactatgttatggagcatgcaagttctcctgatggctatgtgcaatcgaaagtttctgccgtggcagctagattactgaaaagaggctggttagtttctatgtttctacctactttagaagtgtaatgtctaatacatctgttatgtcttatcataacatgttcgctagcttcaatttactcatatttttttatttgccctttgttccctgagtttatgtgacatgggtatgaaaatgatgggcatgctgcattcatattcatacttatatattttttcattgcttgggttgctgatttggatgtggtttcgttcatggagtgttttgcaactcatgcacacaatctttccttaagatgagttcacatagtaatgggctgatttgttattttagtaatctatttattcgttaattcctgcttatctcagactggacagaggttggatatggtgtttggctgggttgtttgcacatgattgtccaagatgatatacacaataggagacatctttccctgaatcccgatcatgaaataaactatctgtgttttagccagtgcacttgaaggcgattgattgctccagtactttggttgttaaagatttttatgttcaatttatatttgttttgacacggaatatgtccacagggttgagttttcagaccaagagaaagcagctatcttctttgaggtatgtacttctctgtcagatggcagctacagccttacaaatcaggattagcctaatatttttggttgtggatctttatgcaacattggtatacttcatcccttgtttcttcattggtaacacttaataagacaacaataaaaaaatgtagcatgaagaaatccaagttgctataactataagtggatcaacttgatggataagatgtttttattcttatattatttttttggaactcttgaacattttagcaaacatagcacctccaacttcatcactgtttctttttgtttttttttctttcaaattgtcctttgtattggaattttaatcaatcaagtcgcacactaaattcctgtataacactgtatttgtatgtctgataatgttttcaggttgagcaatccatccggggtattcatgggcctaatcgacagtttgctgcaatcaatttcctggaaaccttggtatgccaatttcttgaggccgatgtgattggttctaacatttttctctatccttttccaactgatctcatactacattttatgtatgacctaggtttcagaattttctccttcaactgcttctgctatgagcctgcctaaggaatttcatgaacaatgtgaatactcactcgaagtgcagtttttgaaggtattgatcttcccattacgtagaagttttggcaggcatccttacatgaaaatactacagctgtgttatgtcacttgaagtcttgaaccctcggttatcattatgacacgctattgtcttttgcaaggatttttactgctgggcacaagctgctgtgttcaatactgctgacaaaatcttgaattcaactgtaacaatacctgacgagagagcatgttcagcagcattgcgcctgatgtttcagatactaagctggaatttcaagcatactgtggagcatgagagttcagatgctaagataaattctggcttgaggattgatacgataaatctgaagaagtttgaacgttcgttggtgaaggtatatcctaattacttgcatgtttgctccatttcagtttataatgtttgcattttctattgtagccagggtctatgtggagagagattctaatatcaaacggacaccctacctgggttttgaacttttacaccaccttgcgccaaaagtactcatatgatacattgtggggtgattctccaattgctgtctcttgcagacagcttatagtgcagttgtgctccttggcaggctcagtgtttcctaatggtacatacttattccaaacaatcattatttattgaagatctgtgaaatgttccctttccatccataaattctggcatcagcttgatttttacctgataccaatactgtttactacaacctcagactactatgaaacacaatcctaatactagacctccgtagtttcttatatatatatttttatcacagatggtatcctagttagaccaccattaccagcagcacctgcatacacattatgaggtttgggggagtgtatacagaaatatgcaggcgtggttcctcatacaatgaggaaataaaaatatggacatgctacttcctccaattgcaaacattaatccatctaggtttgtctaagtcaaacttctctaactttgattcacaatatttatgaaaatatatcatcttaatgaaaagaatcgtatattataaaaaaatggtttcataataaatctattgatgtcaatcgtttgttgtcaacctatataaattgttagatattgattatcaaaatttaaaagaagtttgacttagggttaaccaagatggacttaaatttttgattgaaggaagtagaatttatgcccacaactgcccagtttggtgctattgtcagacagaaacaccttgggtggttgcatgtgtggtgggtggggatgggagggagtggttgattctaatagtttgaggttgcaaactagactgtttctgagtttgggtttgaagaacggaggttagtgttcaaggttggaagctgaatcttttcttttagaatttacatattcaatgtatcactggaaagcatgttaatgatttacatgtgatctcttttatgtaatatttcctcttttctttctattgccagataatggggatgcacagattaaacaccttatgctgatattatctgctgttgttctatggattgaacctcctgatgtaattgcagcatcgatccgaaatgggggaagtgaaaggttctctcaggatccatctttgcaatcttgatttaacctgaggaaaaacttgagaaatgctgatgcgagatattcactgttttgcagtgagttcatagatggttgccacgcccttctttcaatggcgtctttaactactggctcactttttgacaaccttctaaagtcagtaaggtcagtttcttgtacattgtctagttccacattgcaactttggtgacttaattcatcccttgtactcctacatattagtcaattggtcctcgatgtgacactagtctgtccaatctgtaagatggtgtcataaccaagatactatagctacatctctcattttccttaatgtatctggctctttttgtaatagtgaaaatgcatatcttatcttatctatgactcttataaagttataatcctaaatcccactaactatttctctaagcatgcaagctatccacctaagcaatgcgctatcatattcaattaaaatccactaagtaaaacctcaataactatttatctcaacatacaatgcactaccacatatacaattaaaatccaatagcatacatgacaactataatgtccatgtcagcaagacaaataagtatagtccacatcaccatactacacaatcactaatccgcaattcccgcagcaacgcgcggggtatactcctagtactcctataaagctaaaacccactacctatttctcttaacatgcaagttgtccaactaagcaacccactatcacataaaaaatccactagctcatgcaattgtagtgtctacgtcaacaaagtcactatatttctaagctaaaccccactacctatttctctcaacatgcaagttgtccaattaagcaacccgctatcacatacaattaaaaatccactagcccatgcaattgtaatgtccacgtcagcaaagtcactatatttctctcaacatacaagcttgcaactaagcaatgcactatcacacaactaaaatccactagccatacaattgtaatgtcgatgtcagcaagacacataagtattttgtttgtccatgtcatcatgccacgcaatccactaatctgcattcccgcagcaacgtgcggggtattcttctagttttgagtatattcagaatattttgtacacttcgtgccatttattattacaatatcaggtagactgagattgctattctcttttgtttaacatggacatgtttgcaggccttacggtacagttaatctgctttctgctttgacgtcagaagctgtcaagtccgttctgaataaccagagtgaagaggaaacatggggcatagattcccttgatattttgttagaaacatggaatgtgattctgggggtacttcccttgacctttgcaccaaatttgaaatatgtttgtgtcattgcctttttacacaacttaattaaacacttatttgcaataatcagttcaaaattccagtgtgatatgattgttgcctctgttttttctcataagctttggtagtaattagcatgtaataactattggtcacatttttactcttttattggattatatgactgtatctagacatagtgtatatctaagtgcataacaaaagttatgtatctagaaatgctaaaacgtcttataatttggaatggagggagtagtttatattgcactttgttcattgggtttcatcctttttgtttgtaaagctcattcatccctttgtttattacatcaccatgaactacaacataaagtttttgttttggcaggacgtagatgccgacaaaagtccaatctcagttgatggagcacttgcagcttcaagtttgtttaagatcattgtggagtcacacttgaagggtacaaatctctttatatttcatttaaatgtaacctcagatttgaagaatgttacagatgttgtaaaagattttctatcttgtttacatcctgcatactgattactcttattttctttgacgtagctgctgctgattctgcgttcgaggatactgatgatactgaatattttcatgtttctgtttcaagtatgcttaaattccacagacagttcatctgttctagtatctctttaactcttttggattcatcatactaatgaagtacttcttccagaacgtgatgagcagttagccttgtatgctctaatagcacgtgctgctgcagacactactattccatttcttgcacagttgttttcagaacgatttgcccggctaaatcaggtcgtcttgttatcttgtaatttacctcatttattaagaaaggagaagctactacgctactctgctactgtagccttgtacattctattgttttaaagtggtgctgtttttgtagttaacatttaatagatttttcttagcagagaaatggtgaaagtgatcctactcaaacactggaagagctctattggctgttgttggttactagtcatgtcctaactgactcaggcgaaggagaaacactacttgtaactactctaaagcttctctttctttactagcatttacaaagccctttctgtactcatgtttctctttctttattagcatatcatgaatgccctcattgttcttcatatcatcttttcattatttctgtagctcagtttgatttatttcacatggtttcatgtgttagatatatacacgcacacacattttccttctagttggagtggttttctgcatttgtaacacttgtacatctagctctttgggcctgtgaatagtacattgagttgccatttcctaacatggtatcacagcctagagttaggtagattcacaccttgttgtggtcgcgctgccagtgagcgttgccagccagcaactccacctgcatctgctgtgctccctgtggccccacgtcaacatgtgcctacccgtgcacccacacttgtggctgcctgcccactgcccccgtgcacgccgtgcatggcactggccatcgccgcacgctacctcccacgggcccgtgtgcacgccccgcttccgcctgcgcctgcccctgcccttgcccgtgctctctttgtccacacttcccctcatggtcgcacacttcttctctatgttgatgacatgctcatcacacatgatgattttcggtatattgattttgtgaagcagcgcctcggtgataagttcttgatgtctgatttggatctcctcagctacttccttggtcttgaggtctcttccacatctgttcagaacacctttctcgtgctgctctcaatgatcacccactgtcgatactcctatggagcttggtgttcacctacaacccactatttttttttctcggacacaggagagctgtgtatcaatatattaagaagaaaaataggacaagaacccatgtgaatggacacagacaaacacaaccacaaacaaacatgaacacccacacacaccactctattgtttttccttgtgtgccattataaaagttcaaattccatatgagccactaaaaaggtttgggtgactcaagtgacattcatgaaaactttgttgccctccatgccgcttccgtcacatttgcctctaatggtgtcaaactgtggtaatgtggtgggaaaaatccaaaatgccctcaggtcttaatgccgtgcaaaagtttctgggtccctccggtgccactagccggtcggctattttggtgccaaaaacctgcttacgaagtacacagaatgatgcaaaagtttttggcaccaaaaactgcttgcatttaagcagtattttgggttaaagtacatagaatttgatgcatgtaaatgctgagtacctctagccagtaactgaaaagcttcgtcccgtcctcaagcagatgttgttcctccgatcaagatgcacttcgtccccaagcagatggtgcgatggatatcatagacaatggctcctcagcgccctcgacaccctcggacagcttcttattggagacgacaccctcgccccatgagccgctcctgccttccttgtcggactcggcatgtgtgtccccatgaggccaaactgatcgagtcgctcctgcccaagttccggtacgtggcaaatgtgacggaagcggcatggagggcaaagttttcacgaatgtcactagagtcgcccaaactttttcagtggctcacatggaatttcgaacttttataatggcaaaagtctcgtgattacatgcgtgcctgttaagactgaaacaagcgaccaacacaccttcatgagacgcaccagtcaaagaagagaggctatgtgtgcctgttatctcccaaatatgctgttcatcactagtagcactgagagctcttgacatgctaggagtcgctccatcgaatgcgcaagcattacaatgtgtctagataatccaagcccctagcgtgaccagagaattaatccctttcttttggtgttctggaattatgtgccaagatctatcccatcaatcatcaaactccgtatcagctggctgaggtgcaatttgttgtaacccgacatgacgaaggatggagtaccagtgctgccttgcaaaggggcatgatactaggaaatggtttaggggttcaggagttttctcgatctgcatgagaagatccttttaatgcaatgcccaggggctgtctcccccctcctctcgaacaatgcaggagagctgtgtatcatttcattaaaaagaaaaggtacataattgggggggggggttaaaccctcctagtacatacaacctcgaccaatccgggggctatcttaccccctacaggtcgagtttttttattgtcttctgttcctggtcacgtaagaggcattgctcaggatggcacagaccatgagcgcaagctgatcagctgtccaacatctatcatgagctacaagccacagagaaaaacttgcacttgccaggaccccaacttctccgaattcattcccatggcctaaactgaattgctctttgaaaaagatactcatatcatatgccaagtttgttgaatattgaccaaaggaggataagcgccatttgtgcatgtcttttacatcagtctgcagcgagaaatccatgatgagatcccaaagaccaaggtactccattagagctccaattgacgaagctcctcatgcatctgaaatccataggtattcattgagagcttctgccaccgttcttttcttgatatttctcttgaccaccacggagtgcaaggagcgatgtctatgatatgctgcccatgtaaccatctatcttccaaaaaagtgtgctttccatcccctacctggattggaaacatgccccatggccagtgtgactcagttttttccagccataaccagcgcattcagagtgcccgtcctaagcttttcagatctgagatgcccaatcctccaagctctcgagggcgcttcacctttactcaagataaggccccttcacctcttttcttccacaacccactgatgctgaaccactgaatgatgcaactcactattatcagctagttgggagcctcatctatattgggatcactcatcctgacatttctcactcttcatatccagtttgtctgagctcctacccagctccactatgctcacgttcttcgggttctgtgacaccttcgtggaactaactctcgccgccttctctttcctcactccaggttactctgatgtgaaaatggatagtgatcactctgatcatcgcttcctcttggcttattgtatgtctcgattgtctggaaaaccaaaaagcagaccgctgtttcctgttcgagtgttaaggttgatctccgttctatggcaactgtgagtacggaggtgacatgactacgatggtttctcaaggatttcagtgtgcctgttactgcaccaagtctctcttttcacggcactggtgccatcaatattgctcaagatcctgtgaagcatgaactcaccaagcgcattggagttgatgcttcctacatgagatcgcaggtgcatgatcaggttgtgactctccatgtgccttcagaggttcaattagctgatttcttcacaaaggcacagacgagggcacatcatagccttttactctccaaacttagtgttgtagatccaccatgagttgggggaaggggtggggtggggaggttatatttatacatgcagatgtatttcccctctagttggagggttttttcctacatatgtaacacttgtacaatgtacatccctttggacctgtgaatacattgagttgccacttactaacataatgcaccaattgtcacgtaattttgcaaactatattggcattgcattcttttatggtttgtgtcatttattacttctataagctaagaaatatgtcttaaagttaaaagttctcactgttgttaattaattttgaacagatccctgaagcattacaggctggattccctaatgtgattgaagcagcacagcatcctgttgttacactctcctggtgaaaatcttacctcaatctattcccctttttatttcattgaaatcaggaatccagttgtttttagtgggaagacaattggttgacctgtagttttggggccagttgcagctctgataacccatttgactgtattaacagtattaatactgttgtatcaatataatgtgaatatttgtctcttgataatgcaggtctataataaatttttccaggcagtgtctagatccaggaattagggcaaaatacttcagtccacgactaatggaggtatttctctgtactgttatctatcgtcctcgttttctttatgtaaaagaagccccttttgctctggacctaagctaaccattattttctgtgaatggttcttagacattgttttatacttattttagaaagaggttgtcttatgttctttattgatgttggcaggctgtcatctggttcttggccagatgggttgcaacctacttagtgccacttgatgtgagtagaggaaaagtaagcagagaaattgatagtgagggtacaaatggatcccaacattccagaaaactgctaaacagttttgcttgggaaaataaccaaggagagcttgttcttgattttgttgttctcatttcaatgttagcacttactacatatcagggagaaactgagttgcaggtaagcttcgtttttacttattaatcatggtggaattgtgcagagtgcccagacatgtttgccccagttcaatttgcagtgcctaatgcaaaaattgctcttgtgaaacatcttgatcttttgatttcatgatatctttgatgtgactttagccttatcattccatcatactatacgattgatccaaaataccaaatactgcataacttgaccaagctcccacaactttcaagatttctcactagattgttttcattagcgttagacaagataaaagtttcggttatcccttatcggttgctttgattcctgttcacagacactgacatgccaagtttcggttatcccttatatgttgctttgattcctgttcacagacactgacatgccagaagctacttgctacagttgttcgccggaaacacacatgcacttatcttgttcaactggtaagcccaaatatactgctacaatcaatgacaacttactgatgcttgcattttcatatagtacaatgcacattagtttgagcacacaaaagttcggtagcgtttatgtcatctgatgtacagtaattgcatgttttagtgaacacattccagttcagttattgtttcttaccttttttttaagacaagggggagctgtgtatcattatatttagaaggaattattgattcttatactaatttctatatttttaaaaaactaaaatattaatgaccaagaagatagtaataattgtaaagaaaggactatgctggtaacggtcacaaagctgtgactttcaatttccacatgcactgcattaaatgtgttacctagaatatctttgtacatactgcttgtttctgtctgaacaagaaaaacatactatgttgtattgattgctaaaacttttttgttttgttttcctaatctttgtggtgttccatgtacccttttaggattcatggcgtgatcttacaagagcttttgcaagtggacgctctttgctttcattgagtggacgtttacaagtaagtgatgtaccatgtgcaaatcatgttggtctaccctatggcttcatatttttggagatcttatgcttctattgctatttttttacagagatctctagcagaaacacttgcctgtgctgcttcctgcatcaaagatcctgaagcatctgcacagtaagactattgtttacttctggctgttattctaacaaacagagatgagaggtttaacagtgcctgtatttattcctttaaaggtacctgagggatctaatgggaccagtggcggggtgcctggtagaaaatgctagcagaagtgatctaaaatctgtggcacagcaagcagatgttgtttacatggtaagtatgtatggtctttgctttgtgctcttttagagaagaataaaggaaataggtcaatggttgtaggtctgttgcctattggaacgactaagaggcgctgctagagctactcaaccccgcactcaaaaagttctatttgagatgggtcgtactgtgatgaacccacttttgactcttctggaggtctacaaaaatcatgtaatgttatttttcaagcattatactataatccacaagtgaacgttgaagatcatgcaactaatttttccccatccatttagtcctcagtcgtatacatgatactcaagtttgtggtggactttgttgatggtcaagctgtattcctggattctaaagaaacatcagctttggtgaacttttgcttgcgacttctccagatatactcctctcataacattgggaaggtcagaatatgagtacttctattttattctgtatcgtaatattcctttttttttgccaatgtgactgatgactctgactattactattctcaaagaaatgatgtcagccattgtagtaacttcatgatactaattacattttccttctcttttctgttgttacccctatctcaccattcagagcttccctatgccaaaaaacattttaagcttgtgcttgtgcttttttttttgttaatttctgcagaaatactgatctccttagtggactctattcatagaaaaagatccaatgagactgtccaagtggtgctagtgcaggtttaaatagtcatttaatgttgataacttaagtaaggacactccttaaataaagtcagctaaagacattttcctgtttttatttttgtttggcctctggtgctttgtgtgctaatttctgcagaaatgctaatctacttagacatggaaaagatctaactggagatgttcaagtgacactagtgcagatttatttagtcatctaatgttgataactaagggcatgccttgaacttgaataaaggcaattaaagaaattaacgcgagtgccgagtgagcaatattgcattaaaaaggttaaatatggcttgcagtttgtatagtttcccaacagcaatgctaccatttttgtggtgcttgtagataattttcttcagggactgaccctatggtgtctctattttctaggtaatgctctctctttcttcaagtctgcgtagtgagtcacaagcagaaaaatataaggatttgcgagctttgcttcgtcttctgacaaatatatgctcgaaggatttggtaacttttgttctgttacaccctgtttgtttaatttggccaaaagttctgcataactaatagacacagttgtcaagtgcaggttggctttctgtctgattgcgacggtgaaggttcacctgatattgcagaggtacgcagctgatgtttattgcaaaaaaaagtatgtagttactggccttctatctttcctgttgagtgtcgggttgttgagacttgtaatccccacagcaaacaccagagccttcattcgtccttggcatttttagccaactcctctgtacttgggttcataataaaaaaaaaccttgaggatacagattgacaaaccaatgcaagggtcaaactctgcttgttttgaaaccgtaaggtgttgcattctgctagctgttgtattttccatccagggaagaaaaacttactgaggtcatataacttatttatttagccaagtgtattgctatttattcgcatcgagaactaacattaattaatttgaaacataataactgagatgttaccttcacaggttatctacgttggccttgatattgtgacccccttgatatctttggaccttctgaaataccctaaacttagtcgtgatgtaagtccttttgagttttctcctttagtttttgtaatagaggataatagcaatcaaatgctaatcttagtctggtttctttgcagtattttgtgcttatgtcacacttgttggaagtgtacccggaaaaggttgctcacttaaatagagacgcttttacgaggattattggaagtcttgactttgggctccgtaatcaggcatgtgcactttctaaatttgcatgaactcagtttttcttttttcttttttttggttagcaccactaagttcaggaattttctgaacggaacaaaaatcactcctatatgttctaagatttcggattgcagcagcatagcttgcagtaatcatggtatagtttctgcatattgattgcagccacagaagagttggtagctcttgatcctttgtttcacttcaaaacttgactgttgtgctagggaaggctagacaattagtttgtggccttccatttatgtgagtgatacaactggttcgtttttgaatggcatttagaaatgaaaaagattagcttgccctgaatgtcatatatttaaaaaacgaatggaaccttggacattttggtgttatttttcatgctttttgtcaccttttgtttgaattatgaccatgcgtttcatgttaatattatcagtcaaatgcagctcacccccatactccattcacttctggcgtctcttataaattgaactgtgtgtcatatgctcattgtttgctgtcccacaccatttaccctctagtgtgaatttctgttcttcaagctgatatagttcagactttttgtctgttgcaggatagcgatgttgttgagaggtgcctggcagcagtaaatgctcttgcttcataccatttcaaagagagattaggagggagaggaggactgaactcgcagctcatggaatctgaaggatcaaatggcaaactgcaggaaagcatatcaagtcacttcttgagacttctattgcaaatatttctttttgaagatttcaggtgagctctgtgtatcagttatttgattttgattttgactgctttgaatcttaagtgaagtaaattttatttggcataattgccaattatttagtagctctagttttatataaattaaacttctaagctgtcaagctatttttgcagattggagttggcaggttatgctgcagatgctttgcttcctttattgttctgtgaacaggagttatatcaggtccctccccttcccctccgatctgaaaaataagtactatattatgcatattgtaatctcagtaacctgaagaaaatgttatatcaataaattggaagctaatgctaaactcagaactattacatccattttattctgtaatggactgatagtcatcagatagagcacaaacctgatacatatcctcaccttgattttatctgcagagattggtccatgagttgctcgagaaacagcagaatcctaccttgaaatcaaggctggcaactgcgttccataacctcacaagttcaaacaatctctcaagctcgctcgaccggccaaacaggcagagattcaggaaaaacctccttagcttcctggtggatgtctcaggcttcatgcagatcaagtagatgcgatggcatggaaccagtgatgtttgaccggtcaattaaaccctgagtaagcacttcaccattgtggtaggagtgcatgtgggcaccacatggcggtggatcgacgagagcgaggactgccataacaacaactgtcttgatccagtagatcttgaagggctagtgtcaccagaaaagatagggagatgggctattcttagggttggcattcatagcacgtttgctggacaatatggaggcgtctctggccatgagatcgtcgtgtaaatgtgttggttagacgtgctacacagaaacggtgggaattttgttgtggcgactcgttttgttatgtccggcagtttcccacaaacaggagaaggtagaattggttgtagcttggtagctcgagatgttgagttgatgtaaatactgcttgacttcgacgtgtctcattcgcaggaggagaaagcgtcactgcttgctgtaactaccagatgggtttattactctttctcaagacgtctttgctggggtatttgcagccaaatgttgaactgtatgattgcgagaggttttcaatcttatgtaccaaatttggcctggagttatgatgacaccgagtgcagatacaggcaacaggtatgaggcatgccaaaactggcgggcaccacatatgtctcggtgggatcacagctgcaccggcgtgatacagaatctctaggcttcagcagcactccagtccagtccatacctcaccactgggcagcctgtgcgtcggtgcctgcgtgcacaagctgtggccagatctcagatcgtacatgcctgtgtgtgctggggccaatctctttgaattcgattggttggccgtccattcgcatgcctgcgtttgttcggtcggttctctcttgtcgaagatccatttctgcgcaattgtttgcagttctt

SEQ ID NO: 3896 - DNA, 11014 bp, Sorghum bicolor
gaaacttgtgtaaaattttgtgagctacaaaacatcttttggtggccagagctaattctgagtggaaattagctaaattggccaaacagttttgaaattcaaactcaattcaaagaaaatcaaaattttgaattggggcaaatcagaaattctaaaattacttttgattttgcataacaacttgaaaaacttccaacatgaaagtcgttcaaatttttgagccctacaactttcatgttgaccatttttcaaaattccaaatagattttgaattggagatacaaattggaaaaggggacattttccggaaatctgtattttcaaaattactttggattttgtactaaatcttcaaaaactcaaaacaccaaagttgtacatcttgacaagatctacaactttgcttttaaactcaacttcaaattgtgcttggtttttgaattgcacaaaaaggggcaaatctagggtttttaaaactagggtttcccccctaagcttctcggaaaactatcacccaatgtctccaaaacaagcatccatacataaagtaaatacacttaaattcttaagcacatccaaccaaaatttaaacttattttaagttcgggcatcagtgtgtgcttaacaaatttacgatgcaatgctcatgatgacatgtcaggttttagttcgcttaaccagagtgttacagttaaggacttagcttactttgcattcttatgcaaaggtgtttccagattataaaaatgttaaaatataattatataaaagttaaactatgaaacaaaattattggttgttttcatgtacatctccgagataaaactgtagcgttagcacgggtattatactagtacaatagtatgttgaatttgattgtgccactcaaattgtaaattattttaattttttttggtacatccaaaatcaaaacaacttataacttgaaacaaagaagtatatagtaaaagaaaaaagtacttgtttgtgtgtctgcacaatcagtgagagctctgttctagaaacacattttcaacaccgtttaagaaatatatattcaacacagatttttagtagtactatctccacattagactccaggtctccaatagattaatatctactaaaaaaaagagacttgatcaacgtgtttacgcaccgcgaaccggtacggtcggtccctaagagcaagtattatagtgggctgtaagctggctacatgctgatatggagaagagaagggaggagagagaggagaagcagaatgtaagcttacaggcagcttagacacaaaaaccaagaaactttgtgagagagataagtggaccatgtattaactattgtatgggtgggctgcaagaatgctcagcaggtggactgtattattaaacttgctctaagggcactcacaatgcaagactctattatagagtccaagacaattaattacataatatttatgatattttgctgatgtggcagcatatttattgaagaaagaggtagaaaaaacaaaactccaagtcttatttagactccaaattcacattgttcgaggtaataaataactttagactcgagtctgcattgtgagtgccctaagcaaaagcgatccgcaccaatttgttccattttcctctcgaaaggcaaatcggtgggggattccgatccgttattccgtagcacgcgtagcattcagcaccgattccagtctagtctacgcgcccgtccggcgtcccctcccccaaaatcaccggcaggtttcgttccgttcccgttgtgcgtctttcgataacttcggccagacacatccgcgcgcctccgcccgcccgtcctgcccacaaaaatccacctgaactcgttggattctgacgcgaagtccacgaactgccgtcaaaaaaaagagaggtgaagacgttagcaaactgccctcagaggaattggcaccgccacccaacccaacgggctactagagtagtacctgtaccccccattcatacgcgcgtggccggtaggcaaggctgtacaaccagtaaccactttcttcttctcttccagaagcgcaggggcaccatccctcccaccaggccaccagtgcgtgcgccgtcgacttcttcgcaccttctccgctcgtcgagaacgactccacagcgcaccagcgcggcgacagccagcacgcgaagagaacaaaaaagtagaagaagaggaggagcaggggagagcgattggattcggtccaatccagccggcgcgccggccgcctcgtcgctcccgcgcgcggccgcggcgcgaccaccagccgatcccgagggcgccggccgagtcgatctgcggggggcgcgcgggcccatgaggagggccgccgccggggatcacggtcgccgcgggggatgtgtatgaggagggcgtccggcccgcgaatcttctggattggccgtaacccgatcgcgtcggtggggctgcggcagtgaccgcgggcgggacgcgggggagtgagaagcggcaagtagcatttcgaggcgagcgagcgagcgggcgggcgcgatggtgagcggccacatcttccactgccggaagaactcgtggccggcggaggagtacgtcggccggaccgcgctgcagctggtgagcccgcccacctttggctcctgccgtcctgcgtcgctcgcggcgaatttgttttgtttctcgttttcctattgctgggtggtctgatgtgaccgcttcgggcgttgggaacttattgctttcgctgcagttggatttcgatggcggggcgccgccggagcaggcgtggcggaggcggctcaacagccacgctaacattctcaaggagttcagtgtcaccttcatggaggcaatgaggatggtatggacgcctcacggattcggccctctgtgttgggtgttttacgacgcgtgctttctgttcgttcctcgacctcaaagttgttggtgctaacctgctaagttctgctcccgcaaatttcagatgagccttggcctgagactctggtcgtatgttcgggaggaggcgtcacatggacgggtgacatcagctgttcctatgcacgatttggtccaaacacagatgtatccaaaaactgtgctgacgggatgtaatctctgttgttgtgcttgcagaaagctccgatcgatccattcacaaaagagcgctgtaaaccgtcagcttctcagggtgtgccacttggtgggatggggtgtgtgctaatgccagtgcttatctgaacttcatatatcgatgcattctggagaactttgccctgatatcaccagattggttttgcaggagcggtagcatttctagaggtttcaggggagagtttaagaattggcacatcatacctggtctgtgtgagagttcgccggtcatggagaaccagttctctgtaatgcttctatcttgtattgctgttgcttgctattagactttggattgctgtatgatatatgtgtgctatgctttctgtattcttgaatcttgatgtgtatgaagatatatgtccctttgagtaccatagatgctaaaagtatcacttaaacaaacacattttaagttccactcgcaaatgggttatcatattttaatagtatgtgagcactgcatttttttttgggagtgagataagatgatatttcttagctaagatggcataatgctgccttttctcaatggttgcatgcaaccaaaggctatgatgtcggggaaggttgcttaatcttcacagttggcacttgatggtgggctggtgacactttcttttttcactgatatatgaactatggttgctgggggcattttttgtctagctatgcttcttgaccttttgctatgcatatctttgataatgcattttatttctttagtaggtatagtaactttaggtcgtgttcatttcatgtacctacttccattctttgataatgcatttcgtttctttagtagacacaataactttagacatacctattctaatgtctctacacacttaattaaaatcttatgattgattgtgctatatttcaggtagattacaattttactagtgctgcaatttttttttgtattttggccttattaacactataagtattaatttttcacattaaggctcaatgcatgaacagttaaatatactgcttttccagatatttgtatctcgagatggggggaataagaaatactcatcagttttggctcctggacatcatgaaggtctgaagtaagtcaccatcctgttctgtgtacttaaaacttgccatcttatgtgcagattatcatgttaaaatcatgcacagcacagaaacatttgcccaagtataagctactgttaactttatgtccttgtgcctatccttcccacccaattgcctgtttctctttttccatttttacttcttgaaatctatatataccgaacaactttcatcctgtatccataagtgttatggttatgccaacttggtgattgaaggtcagcgtactccctttaggttctaaatgataatatagatattgcaattgtggtatttagctttggttcaggtaaggtactgtactggtgcaacaaggcatgctgatcagattaacaacttggtcaggtttttgtgcttttcatgttatctcttccgtagaagtaccttaattgatgttttatgtgattttcaggaaaaatagtgactctggaatttcttcatgggactggaatttgagtggtcaacactcgacctatcatgcattgttccctcgggcatggactgtttatgatggtatgccattgtagatctatggtaacattgcttaaattggcaacctacacaaggaattcgttgtctttttaattgtgcttacgaagagactttattgtttttaatagggcactgtagttcaataaggtggctgtgtgttgatagcacagtgatttcgacccttcttaagttttttattaatttattgcaggtgaaccagatccagaccttaaaatctcatgtcgtcaaatatcacctttcattcctcatgattacaaggatagcagccttccaacatctgtgtttgtgtatactgtaagtggctaatggagttccatttatgctaagctgaaaattgttgcaggtctacatttttaccttcctgtttcctattttttagcaagacgttttgaaaagcctactgtgccatctttatgcaagatatttcctttaaaatggagatcacatatggccagtcagcaagtggctggaatatcatcttagtgtaaaatctatttgaatattttagaactagtggaatatgaaataattgccgccatacataaaatttggagatgccagttgttcatgaataaatgaatagttcaatgatagtatatctgccgattgatttttttctgtttgtttttttagatgtttttgatattaaaatatccttttgttccaataagttacctgacagcctttctatttggttgttaattacagctagtaaacactgggagagaccgtgcaaaagtaagcctgttaatgacatgggcggtaagtacaaatctaaaggtttatatatatatataaatgtgcagtgtatttatgttctttttttaattttgtgcactatctgatgcaaaatttgtgttaagctgtttcggttttattaccatgatgaagtgcatagggtatatcgatttacccagtgttaaaatctgagctcatcgatgatcattagggataacccttatgatccgttctaaagtttgaggtccattgtcaccattgctttgtgcttaattcaggataccctatgttgcaaaaagatattagataccaccctgcgtcccaaattataggtctttttggcttttctaggtgcatagcttttgctatgaacctagatatgcaatatgtctagatacataataaaagttatgtatgtagaaatgccaaaacgaccttaaattggaacggagggagtactatctaggtttgaagtattacagaagtcaaatcctactgtgcattattattattcactcaaagtgtcctttagtgatatattttcttaatgacagaattctattggaggtttttcacataattcaggaggccactacaatgagcccttcatgtaagtagatcagtagatataatatatacttgtttagttcttttttgggggttgtttgtacttatagtttgatcttatgatatggacagtgcggaagatggagtatcaggagtgcttctgcatcacaagcaagttttgattctcttcttcgagttgatgattgtgaattagtaaatctttttgatgatatgttatagcggctgacaagctgttatatttttgcagaacagctaaggataatccaccagtcacttttgctgttgctgcctgcgaaactcagaatgtgaatgtgacagtcttgccagtgtttggcctttctggagaaaaccatgtttctgcaaaggaaatgtggaacaccatgcaacaggtaattacttctaccttgtctgaacatttggtttatatgatttttcatactggctgttctatgacattctcttaagtataacagtcctatcttaccatgctcccattttgattctttaattgttttacttaacattcagaatggtcacttcgatcgggaaaatttcagtgctggttctagtatgccttcttctccaggacagaaactctgtgcagccgtctcagcctcaacttgggtagagccacatggtagatgtactgttgtgtttgctctggcttggtcctcacctaaagtaaagtttcaaaagggatgcacatataacaggttagtgtccccttgttgtcaatatagacgacaccttttgattctgtttacacctttatttattgatacaaggcttgttccgatggaaatccaacttataaaatactatgtctcataggagcaatgatgtgtgtctcaattttgttgcctatcacattacacacgacttaggcataagtactgtacaacagttccttttttgtttcacccttctctgtgtttgcacatttgaatatttggtgtttggaagttcttgaaaatttgcacgtagtaattagttatgttaatgtgcatcgtagtacattctaactgtaatggaataattcataaatgtgatttcatgttgcaggaggtacacccaattctatggaacttctgagaaatcggctgttaatctggtacatgatgccttaacaagtatgtttttcttgtcagtttcttgacttcttaatctgttttttatgtaaatgcactaggggagagccctactgtgatgtgataattatatacataaatgaaaagattcaaaccaagctgtaaagcctaaaagaaaacagaaggctaaaagtaggaaacagtgcaggctatttaactttaaggtgcggaaactaattctcgtgttacaatatttgctaggactatgaaaaacacttccacatgttataataatcgtcttttagattggatggagtattttccctccaaatgcagtcatatgttgaaaacaagattgtggtgatattattactgggaaatgttcaacattggcccttgatttactgatttagtttacttatcaagtcttctgcattctgacctatgctcctggattcgttttccttgttttcagaatataaactttgggaagaagaaatcgagaagtggcaaaaccccatactcaaggatgaaagacttccagaatggtatatgctctacttctattgctcctatattaagttcgttgttgcccctcaagaaatttactagtccacttcttcctctgtagagaagaaaatgaaatttaactgaatgtttgggtgtcaaaatgcttgcaggtataagttcactctttttaatgagctttactttctggtagctggggggaccgtttggacaggtacgctgtaactttgttatggttgcttgttcagatcaccactcgtcttattacttttgaaagtcacggggataatttcttcttactttacttgttctacaatctaaagtcgccatcatctgagtttcctttagcttataatgtctgctcttcctttttgagtgcaaggaaccttatatttttccttctgatcatgtagatggtcaacccccagcaatcgatgagaaaaacagtcctggttctattcagcagaagtcctcaaagaggggcactaaagacactaaacagggatctgttaaagataaccatgtcaacctgacagtggagcaagtacctcatggtggtcaaatgactaatagtgatgatcacagtgtatcaaagttcgcagcagttcatgggtcacaaatgcaagaacaagtcaatggactcaagtcagaagagccaattccttacttgatctcaaaggatggccctgaacatgttggcaagtttttgtatctagaaggagtggaatacatcatgtggaacacatatgatgtgcatttctatgcatcatttgctctccttgatttgttcccaaaaatagagttgagtatccaacgtgattttgccaatgctgtgctgtatgaagatcgacgcaaagtaaaatttttggctgatggcacatcaggaatccgcaaggttaaaggtgctgtgcctcatgaccttggaacgcatgatccgtggcatgaaatgaatgcatataacatacacgatacaagcaaatggaaagatttgaaccccaaatttgtgctccagatatacagagacttcgctgctacaggtgatatgcaattcggtcgagatgtttggcctgcagtctgtgctgctatggactatatggatcaatttgaccgtgatggtgatggtctcattgagaatgatggatttcctgatcaaacctatgatgcttggactgttcacggaatcagtgcttactgtggttgcctatggcttgctgcacttcaagctgcagctacaatggctcatcgtcttggggatcggcactttgctgaaaagtacaagctcaagttcataaaagccaaagcagtatatgaggcaaagttatggaatgggtcatatttcaattacgacagcggcacaagtagcaacagtagatccattcaagctgatcagctggcaggacagtggtatactgcctcgtcaggcttgcccccgctttttgacgagcacaagataagaactgctctgcagaaaatatttgaattcaatgtgatgaaggttaaaggaggacggatgggagctgtaaatggtatgactccaaagggaaaggtggacgagacatgcatgcaatctcgtgaaatctggactggtgttacatatgctgttgctgcaaatatgctgctccatggaatggagcatcaaggctttacaaccgcagaaggaatttttattgccggatggtcagaagaaggatatgggtatgccctgttccttacattgttgagcaatttctgattttgcagtgatgcaacttttcacatggacttccatagtgcatttcttatctcatattaacttagcagtgcatttgttatcttttctttttggttgcttctgttatattccattagaagcctaggaatcagatgtttctagtgctgcttattttatgtcattcccaaatctgtctagggcagttgcctcgtactttttttgagtaacgcatgctaaattgtctctaatcaaatgaagtttttagtagtgtttgttgagtcatgttcatcaatgagatatataacattggtttaccgtggtgctacaggtattggttccaaacaccagaaggatggaccacagatgggcattatagatccctcgtatacatgcggcctcttgccatttgggcaatccaatatgcagtttctcctccaaaggctattcttgaggccccaaaagttaacctgatggaccgaatacatatatctcctcacatggcccgagcaattagcgagataagcattagaaagatagcacctgacaacagatgtttccctagctctgcctttcattgtgaatgctgatccaaaggtaacatgcagctgctgagcaacttaccaatctattcggcttttcggtttctccttgccctttacaaggtccagtgtgattcaggagttcttttcttgaatcagagggcatacccaaaccaccacaaaacgggactcaaaagagttcatgttgtataattgtacagcaaactgttaatcacataatctttgtttttttttccttcactctaagttttgtgctgccaaggtacattttcacatgaagagagctagaaatcaaagaactggcaatctggtgtctcatacaccatcacttcagaaaatcttcctactgctccgttttggatctggatctaacgttttatgaagtcatttgggtatggatcaattctatatttctgttggctgagtatacggtcggcacgtcaatgtatcattgttcactataggatcatggattgttgcttttcctaaaaggtagtgttgctatttctgctagtctagagcctcatctaatcattttaggttctctcatttcttcgttctttaaaaagcaaccgaactcaaacatatggttggttctgaaagtcgtttgttatgttaatatgatatttgatttccgtatctttgccagcatggttctactgcaagaaacctaactaaagttatgttaggaaaatgcactaaaatctgccccttccatttcaatttattatatatctagaattctagatgtatagtaaaaaatgagggaaaagccaaaacggtttataatttaggatagagggagtataatattatatagttttattaaagccatgatgaaatatgttcataatctttatactgcatttatttagtatatagatattaatatattttctataagcttaaaagtttgacttgaagtaaaaactgagacgatgtgtacaagcggctgatctgatgatcatcactgcacatgtagaatgtattactacctgctcttctaggca

SEQ ID NO: 3897 - DNA, 6701 bp, Sorghum bicolor
tatataaacactttatgttctatgaatattttgtttgaatttttcatgtaacaatctatctctagtttttttaaacttttagaaactttgagacattttttgtgatttaaaaaccttatcaaaataaaccactttaaaacaaggtcgggagataatttggatggttatgtgagtttagggtgcaagatgtctagttttaaagttcgatgagaaaaacatgctacattattcaaagagataaaatggaccttttgcgaataaaaaaaatcgaagaagcccatctaggccctgcagtattatctgcttagctctagctcatgtggacctcctagggtcggtgatcgatcgtcaacccggcgaaaaaccctatcaggctatcaccaagcaggcaagcaccaacgccgcgctctcttgcaagaaatccataggccattacatccgttcatcagtactgacgtcttggaggttgatagaagctgatgaacccatcctatccatttgtcaatgaaacccctcgctcgaagaattttgaatagactgttcctgttaactgtgtcaaaggctttaagcaaagtcaagtttcagaacaacagttggggccttccttttataacagcattgtacaaactccatcacatatacagaattttcagtcattcatctcccttgcagaaaaccggtttgatttagaggctagagatctctttccacaatcaggatttttgcaattaacttcacactacagttttgcaggtaaattggccggagagcatccgtggcgggagcagtatcaccatctttctttggcagcagcatcaggtaggatcggtttacccttttccaagtagacagagtagaaggacgagagaaagttcgtcagctcaggtttaatcgtgttccaagttgcacggtagaaactatggactgtatacccatcgtgactcagcgcactgcaacgattcatgctcaggattgctaattcagcttcatcttccgagaacggtgccatgagcgcatcagatgcaatgcaccccgctgcggcgctgcctgatatagatcatccacattgaactgcaaattctcaaagccagggagcccaaagatagacctgaagaagtcagttaaagcttcagtcttgcgggcactgtgtgagaccaaagtgccgtcaacctcgatgccacggcttggacaacaaggtgttgaccccgctgcttggtgcttgcagtgggaggccttcctttcagagcaaagagcaagccacttgacacatcacgcggatctaaaactttgcaggagaaagcacacgtcctccttcatagatgtgaagaagtaaaataataaattcggtcattgtaacatcactatatatattcatttttttttcaaggccacagtttcagcgcacccgaattttcaaaggccccttattatactgcagtaccaaaacaaagaaggctggaactggaatgactaaactagttatcatgcaacaaatttgagccacttatttgtcaaagaatatcactactgtatataaacaaaaagtttgagagtaagcattacatatggtaatatatcagcttctgaagctgaagaatacttggtgctcaacctggccctggccctggcccgttaccactgaaatcgacaaggaattactatgcatcattcagttgaaagacgggtagtttagtatcctgctgcatcacgcttgctactgcttctgttcttgcgaaagttgtttaagggcgtgtatgtgagcctgtttttcttttggttgtgtctcttttggggtttctctagtcccctgtgcagtcttttctttcccgatataaaacaaaattcgagaaaattataaattatataaagaaaaaaaaagagtgtgattctgcgtatgggcgtgaccacgctcatcagaagcgaaggcaagtgacgacggaagcggttggtttctgcacacaacaggcgaacaacacacaaaaaaaaaatcctctttgcttctctcgtctcctctcacctctgcactccacgcaagagatactcccgcgcgaggacgcaacgcaaccgaggcgattcgttccccttccatacacccgcccgccctggtatctgcatatcctccccggtaaagaatcctctgctgctacaattccagttccatacgtctgcctctcgccaatccattccctgacggatcaaattctcctcgcgtttattttcaccccctttgcctctgggtctggcctggtggttactttgcgtggctcgtttggtgggaactctctttctggtcggcggccatggccaagcggcggagtagattcggtctggctaggtatatcggccgaattcgggggtccggggttcttgctttcctcaattccattactggttttgggcaaaaaagggttctttttctttttgaaaaggtggagtttctgtagtagtagaattcggggaagtccaagctctgtcgaatgggctccgtctcgactttttcatgtgttaaattagcaggaagagaaaagcagcagctaacttcagttgcgtagtttgttcggcttgtccttgctcggttttgcaattgccaacttagtcgcgtgctgttttttttcccccttgctaggttcagctgcttcgggggccaagctcgggcggagaagatggcagaggtgggcgacggctttctggcccccatgtttgctcctaactgaatctgtctgcatctgaactgagtgatggatgatgatctgcatctgcatggcttgtgcaggatgggtacccggtgaagctgcacatctacgatcttagccaagggatggcgcggcagctctcggcgacgatcctcggcaaggctatcgaggctatttggtaagcatccttggttgtatttgcttcgtcctgttgattgttattatgcacgcaagacttgcctttgatagaattcaaggacttgtgttgcaagagactgctttttttcttctgtcttataattttacaaaaagaaagatgaaatgcacgcaggtctccttcatcatgaaaaaaaaaaaaatcccatccactcctggtgtttacctttttgcttggttttgtagatgtgggacctactgttttgcattaatattgttgatgttaattttgtagtagctactgtgcatctgcgatatcagccatgtccatgatacatgtttgtctctagtctctagtaaacagagtatgttttccccttcactattagtgaattaaagcatacctctgcaaaatgtaagattcaaagtaagtaaagcttcaatatttgagcaaatcatcagaacattgtggggggtggggcgcggggtacccttttaggaattctggtgcaaatatacacatgcaaacatggcttcatggtttgcttctagtgcaagatctaggccatgtttggatacaagggccaattgctaagagcaactccaaccattatgcaaatggacttggcatttaccaaaatgcataaaactccaaaaaaccccctccaatcgttatgcatttggactttgcattttacatagctatgcatttggagggagaaacttggcatatatgccaaaggagtccggctatgcaaaacccctcccttcgcgcggtttggcttcgcgccgccacaaacttcgtgcgatagagaagcttcgcgcgtcctcttcgacagcttcgctcgcgacgaagccttcctcatcaacgccggccaggtaatcatgcatattcatcatatatagagtagctgagcgtggatcggagcatggccgcggctcctaggtcgtttagggtttagggcgacggcggatgttcattcgccgaagaagggtgcagcggagggcgacggcggcgatgctgatcctggacctggcgatctgggttatggcggcgatgggggtgggcgatggcaagcgtggttggtggcgcaatggcggggggcactggggcaggcaagatccgcgagggacggggacgcgtgcatggctgctacacgaagggagcacgtggatccattctaaacgtgcgccggcggatgaagggatgtgctgtgcaatacggctagatccattctccggtaccctcgatcccatgttggtttcacaaaattctgctgctcgcgatgatggagatggcggcgaccggaaactgcgccggcggcgggctgaacgtgcgctggcggcgggcggaacgtgcgccgccggcgagctgaacgtgcgccggcggcgggctgtttggccgcgcgtggaaggagtgtcgcgcgggaaggacagctgcgcgggatgcagtgccgcgcgggatgcagtgccgcgggaagtttggcgcgggatcgacttggcattttgcataacggttggagatcacccgattttagccttgccattttcatttgggggtttgcaatttgctaaaaatgcataacttcaaatgcataatggttggagatgctctaactagctaaaagttagttcaaattagctctagtgtatccaaacagaagggctaataggtggactaattttttatccaagttctcaactagttgttagccaattagctaaccaactatagctaatctaggctaatttttaacccaactactaactagccatgatttgtttggagtatatccaaacatgctcatagtcgtgtagctaaaactcgcctagcaaagactttgcatttgccttgttgcttatgaagagagataatcaaatttgctgcattgatgcttgtttatttgctgttgatcctggttgaccacatgtgcaatttggcacaattgtctcaattgcattttatagtctcatgactgtgtagttcatgccttttggagtccaaactccactgaacatatggttgaaattactgtttgctgatttattgtgagagaaaaacactcctggctggcagaaaaagtacggctgaaatgaaaagaaagacccatgtagattcactacttcagacaaatcatgaattgcataaaaatgcagttaagctgctcctctgttcgcattatagaagcgttgcggatgacagagtaagcacttttgttcatccaccattgacatgtccttgtggcttgtgccgctatctcaggcacaccggtgttgtcgtctacggccgcgagtactactttggcggcggcatccagcaaggccagcccggccggacgccctacggcacgcccatccgtgtggaggacctgggcgtcacccacgtccccagggaggtgttcgaggagttcctccgggagatcggcccgcgctacaccccggccacctacaagctcctcagccacaactgcaacaacttcagcaacgaggtcgcgcagttcctcgctggcgccgccatccccagctacatcctcgagctgccgaaccaagtgatgaacagcccggtcggcgctttgatatgtaagggctctgactctgagttttttttttcttttttctttttttggaattttagaattttgcatcaggtcgccacagaattgacggttcacactgtttcgctcttgcagtgccgatgatccaggggctggaggcgagcttgggagctggggctgtgccgcagccaccacaattcaggccggctcctgcagccccggttggcgccgccaccgtgactcggccgctgacgacgaaagacgacgtggtgccaagatcgacgactgctgatgatgataaaccggaggctgccaagacagcagcgggcaataatggcagtgccaatgacagcacggccgtagttccaccggcggtgcagcccgcagcagcaccggcgacatccgccggtgaggtgagcagcgcggcgcctactacggtttcaaccaagctggcggcgcctcctcctccagacccccttgcggcggcgaagagccgggtgcaggaggagataaagcgcgagttcgcggccatcatggcggccggcacggcgcgtgccggcgaggccgccgcgctggccacgcgcagggtcatggagcggcacggcctgcagcgcgccgctgccgctgccgctgccgcccaccgagggtaggcggcataggtaacacgtagtgtcggtggcgttcgtcgtgcaactgtaatcgctcgttccgttacgcttgttaaatttgtggatggtcggtcggtcggtcagtcagtgttggcctcggatttctcgagtaggagtaattatctgtccatcattatcgaagtatcatctttgcaaacagaagaaaaaaaaaaccaacgaagcatcataaccactgtagtagcaaccgctttacaggcccttaactgatcaacttataaaatccatcacagcacaaaataaaatatggacaaacgagtatagtaacaagtagaattccacaactaccaaagtcgttgtgctggggattccacatgagtactaacatagtaacatcagcatcgctctcaagaaagacgcacgcggatgcttccctgatggacacgcgcacggcgtgtccaactcccgcggctggctggcgcgccatcctcggctcacctcccggcccaagcggcgagctgcgtggggttgaccaccccgggcacgcgggccatgccgcgctgcaccagcacggccacggcctcgtaccgcgaggccccgcccgcctccgggcatggcccgtgtcctggcccgcgccgctcgccgaggaccgtgccggacgagaggaactc

SEQ ID NO: 3898 - DNA, 5501 bp, Sorghum bicolor
atagttatatatatatatatatatatatatatatatatatatatatatatatatatatatatatatatatatatatatatatatatatatataatatgctctatgcctccatgtatgaatcataaaatttaatgtgacggagaatcttgaaaactttaaaaaaatttcatgacccctagcttgaagaaggcatgatataactactgtagaaactgtgcggtttcgtgcttcaccgacgggctcctcaattactccggcaaccaacatgcggctagtttgcagcagcagctcctgttagcagtgtcctcctgtgtgaggactgaccgactgaggactgagccagctccagcttaagaagccgctgaaagaaaaaaaaacacttgccgaatgggaattatggatggatcctatcctacaaggtgttctcttggaatacagtgaggtattgtttagttgcaaaattttttataaaatgaacactgtagcacttttatttatatttgacaaatattatttaatcatagactaattagacttaaaagattcgtctcgtaaattacagataaattatgcaattagttattttttatctattttaatgttctatacatgtgccataaaattcgatatgatgtggaatcttgaaaaattttgcaaaattttttggaagtaatcaagtcctgaaccttgtttcgacagtaaaacaaagtggtgtagaaatctaattgaggcttccattaaaaaaatctaattgaggctacatatatatacaaacaaattgaaaagagcacttgagtctacgctaataaaatcataaataacggatcaaaagagtattaaaaaaataaacgctatgcatccaaaaattacttgggctctcatgggctgtacatacgacctgcttctcatgggccaaacttcaaggctatacatgtttgagaaaaaaagtatactttacctccttgaactaacatcgtcgtggtctgattttcctactttaaaatcatacatcttggtcccttaattttcaaagtcctttaaattactccctatcccggctagaagtggttttcaagatggtttcgtccttttaaaaaaaatatctggcgagattcttaaaccataaaaagaatctctaggcttctaaaaattttacaaaactcctaaagaaagagtgagccacaaaaaacctaagtaaaatattcagatctcatggaagtgtctctagaagtttcaaaaaaatagatttaacactatgaaatggatgatgtaagaaaaaactagaaattctcaagacattctaatcaatgtctaagcatattttggaagcatttgataacataaacacgagatgcaaccaacaagaatgcaacatacatttagtgtaaaatgcattcgtgctggttgaatctcatccttttgttgtggaaagtctatgaaacatatttacacatcaatcaaaaaatttgggaacttttcgtttttttccattttgctagaattttgaagcttctatagatattttcatgatatctaaatattatatttgttcctttcaatgtcctaatctatttttacaatgtgtttcagatttttttagaagcttagagtcatttttctttaaaaaaccttatcgtttattttactgaatttttggaactaaaaatataaaatcactttgaaaaccaattctaacgtggacttggaggtaaatttaaatggttttaaaatagggtgatgtaagttcttatttcttttgtttcgctaaatttaaatggttttaaaatagggtgacgtaagtttttatttcttttgttttgctaaacgtaaattcttacttgttttttttctgagaaacacgtaaattctttttcctacacccgataaccaaacgtaagtgtcattcgggcccgaggctcaactttccaataactcgcatcaatgatcagcccatctttttttggatggatcaaccctgtcaccacgtgaaacgggccacacagcccaccgacaccccctcggttgccgcgagcgagcgagagagagtcgtgtctcatttcgcgagcactatccggcgacggcagccaagagccacacctggccgccgcgctgcctcccctccctggtccctgcccacttccccggtaccacccacctgccacctccaccagctgcggtgccgctcccccttccgccctagtccgagcacctattgagcagcgcggtgggcagtcgagcgagcgcggaagggtcgggcatggaggcgagcggcgagagggctgcggtggtgcggcgcctgatggaggtgaaggaggagtccgggaagaccttctcggaaatcgccgccgagacgggtctcaccaacgtctacgtggcgcagctgctgcggcgccaggcgcatctcaaggccgacacggtgcccgcgctgagggcggccctgcccacgctcaccgacgaactcgtccaactcatgatgcagccgcccttccggtcctacaaccccgacatcgtccaggagcccgccatttacaggtgcgccgcgccgcccatcccctgtgtgcaaagtgcaaacgacgacgttgcctcttgcactccttcaatttgattcggaatgtgagtcgtcaagtgagcgcagcgaaatcttgtttttttttttttgacgagtaaagtgaaatcttgtttgtttaatcggctactctccaagcgtttaggtggtcagtggtctagtttgaaagagatatagttttgttccaggatccattgcaatttagtgaagctcgaactactctgtctcaagggtttgggcacagctttcctatttctaaacaggctttttgtaagttcagaagactgaatgttaacttatggtctgatagtcggattaaagacacgagaggccagaagacaagttactaaaatcgcgtgataacaaaatgtgcattgcttaaaactcttgcaatgttctcccaattgagttaggggcaaaaaaaactgtgtccgtagaagaatgtttacagtccacaatccacatactaggtaattcctagtcctaagacactgcctcccatcccaaggtttagaactttcagattctgcacattcgcatgttttgcttgtcagtcttcaatattattcttttagacaacctggtaatagtttcaaattgtagttcactttggccttgtgactttttaagtttaactacaccagtgtctacaacatcaaatttgtttcattaagaggctgtttggttcgaagccataatttgctataactaacatgaggcaattgtggcaagtcacaaaaattgttgccagaaaatttagagtcatactctgttatgcctaagggaatcttaccacacttttttactctatatgacatgtggagcacaaaaaaatcttataaccttacctaagtttagttgccaaccaaatacttgctgatctggtcaaacttgtctaaggtgaagtacgacaaagtatggttggcaaccaaacacaccctaaattctccatgaaaaatattctgaaagtgtatttatttgaacctattgatgcaagtataattttctaaaaacttgatcaaagttaatgagctttgacttaggaaaaagccagagtgaactatactttgaaatggagggagtagcttttatccagaacttcgttagtttattccagtttatcacagaacttcgttagtttattccagtttatcagtactaaccagatattagaataaccttcttataaatattgttactatatattgcacacagattgaatgaagctgttatgcattttggagagagcatcaaggaaatcatcaatgaggagtttggtgatggaatgtaagagataccagtgcttcatttatgcataaattcctgttcttggtaatctgacatgaactattgtgtgatatagttagtaaatccattagttatggttacgagtagataatcctttaaaaacatggacacctggatgcgcattcgagtttatttttgtgctaagcatgatgttgctgtggtgtttgcttgtagacatttgttaggacttggaatgctttgaattttgtgcagcttcatttaagccctctataaccacacacttgagtatgtccagtttgcaaatatattagtgcaaaactgcaaatcctgtccatgaagctccattgaattgtctatcccttttctaaaaaactgaatgatctatcaaatattgaaataaaaaactatcatctttgtgaaaatgactgatatcatattaccattgcttcctattgcagcatgtcagccatagatttctactgttcagttgacaaggttcaaggggctgatggaaaagatcgtgtagtggtcacatttgatggaaagtatctgccatacactgaacaggtttgtgtcttcttcctgtttttcagctgccactctgttacttgctagctcatggtgctgaactgctgatctgctcgctacgtgtataataccaaacatttagttcttttcagacagttaacatatatgctaccaattgaaattgtaccaaataaataatccttgaataggttggcagggcgagtgattcaattagaatagacaacaatatatgtcgataatattatcacctgactggcccatctgaatgcttgacatctgcagaaatctgaacatatgatgtcaaggccaacccgcaagacatcttgatatggctggcgacgaggagaaacatgatgtagcttccttactgccttcgtagtgtttgggctcagaaaggatcgagcatgcctttttttagggggtccaaatggtcagcacaataaacagacctgtattgataataactgttaaaaggcacattaaagtcatggttctgccattagccttactttacagggtctccgacaataataataataccatgattgttgaactgcattggatgatgccgagataaaaagacaagtgaaacatgtaccgtgtatattcccggctccagaagatatcatttccatagacatgacattatcacatcacctaccaagtcgttctttcatcaggctttatggttttggttgaaagtatgaaacccataagctaccagtggccatcgctctggttgttgtttggctcaaattccgaaagaagcatcaagagtatgccaacacgtagaggtgggattcggggcatgttgtgcttgcctggaaaaaaaaaatcgtatgcgctcataccgcactccgactcccgtacggcacggcctatacgccgtccacgtaacctatacgacctactccttttgagtatacgctattaggctagcacggcaagtctttccttttgaatacagtccatggcccgccggccacctctatgccacgtaggctcatgatatttttgctagttttgttcatatactcgtaattaaaaagtatattttgtatgcgtcattttttattcatacccattcaagaatttgagtaaatatattataataatt

SEQ ID NO: 3899 - DNA, 4248 bp, Sorghum bicolor
ccgtcgtgctcgtgcagcgcatcttgacatgtcggcggcgccggcgccggcggggcaagggcgactcgttacccgcttgacgcttgtgttgtgtgtcgctgcccgtggcgcctggtcacaggcgttgaccgggacccgggggtcaacgtggcggcatcgggtttgggtttgggtttggcccagcatctagcaatacgttaacaaatcggaggctgctgcctctccttttgcaacctccatccttgatggcgaccaaaataaaaatcagatttgtccagggtctactttattgaacagaagaccatttctagaagcactaattgaagtgacattttttttaattaagaagaagagggagagtacaggccaatttctggagctcaactatagatgctatacctcagcgtgcacgtatggtgaacgtgtggacccctgtagaatacacgattttgacagtggtctaggtctagcacaggaagttgttggcctggtgactggcgtctggccgggcaactacacatactccctccgtctcccaaaagaatgtcgttttagaatttcaaacatcttgtttaatcatccgttttattcaaaatttgtacataaattttatatattttgttaagacatattttatcattagagatactttactaatgatttatttattttatataatttacataaaatttttgaataagacgaacggtcaaacacgatttttaaaagtaaaaaatgtcactctttttgagacggaggaagtatgtgcttaagtagacagactaatgatttctctccgaatggcccaccaacacataacatttatatattggttttgttgctgaaaaggttaattgttgttggaaaacatatttatagatgtttatcgtgccaattcaaaagatccaataaaaaacagcttccatgtagtaatatcaaatgtatatgcttcacattgggtgttcaacctagttaggccttgtttagttcccaaaatattttgcaaaacgactaacattccccgtcacatcgaatcttggggcacatgcatggagcactagatatagataaaagaaataactaattacacagtttacctgtaattgacgagatgaatcttttgagcctagttagtctatgattagacaatatttgtcaaatacaaacgaaagtgctactatttctattttgcaaaaaaaaaattagaattagacaatgcaaatagggcttctatgctacatgttcaaggatcatccaaggtttgttaaaaaaaaataaaagtcctgatttttaggctaaggtttttggtgagtcattacaggatacccatggatttatgggtttaaatactgcaaaaccgtattcgtaccacaaactcaataaacataagtttttctcattaacctaatttattttcacacatatgctctaatggtgagatactacattcattctattttatctagcgcacgttagaatgatagggtctcctaaattatactttgacaatttatttattttataaacttataatcattagatagtataatcccttgcaaatataatcatataaagatttagttttaacctaactactggtcaaagttttaaaatttttaattttaatatgtgtgtgcgctagataaaatggaaaggaatacgagtacccatatgctttccctcattgagggatgtgagatgggctttttcctcagaaaattgttatcgtgctagcaatcgaattcgattgctagtgcgataatacttttttcgaattcaggacatatatccaactttgtctagacacttaacagaagggaaggaaaatagaagggaagtaaatgggcttattttatatctcaacacaaacctgttagtaccaagcccactcaaacgagctcagcccaacaccagcaccccatcaagccccaatcccccacaaggcccccaaagccattcccacactacctataaagccgtcagctcaccgaaaccctggcaaaccctagcgctcccccccacacccgcttcagccgccgccacagccctcgccgccgcgcgtagcaagcaggagcagccaggatgccggctggccacgggctgcgctcgcggacgcgcgacctcttcgcgcgccccttccgcaagaagggctacatcccgctcaccacctacctccgcacctacaagattggcgactacgtcgacgtcaaggtgaacggcgccgtccacaaggggatgccgcacaagttctaccacggccgcaccggtcgcgtctggaacgtcaccaagcgcgccatcggcgtcgagatcaacaagcaggtatacgacgcggatcccctttttcgctagctcgcagggagttaaaattgtttgtgcagggcacttacgtttagtacgcgggcgcatcttctgttcgtttcattctttgacttgaattggaaggttttaatttagaatggtttagaatggcgacaatttgctagtgtgctgttcggtttggatttatttatataatctgtgtaagcccaggttgcgatttaagtatctttgtagtggcagtaatggccaatcagagacatttctttgtatgatctggtagtgatagatgctgtaagtaggtccatgtatgattgggttcttgtcactgcactggtgtagtacaattctagcttgactaaatgtgcgaggtgtctatagggccttgtattcatgtaaatattctgtgctaagggtttagtttttctgcagcaagtatgtttggcttttaaatatgatgccagacactgagttccagaccttttagtatgatgagggtttctcttccctctatatgggtgcaaggtatcaatgtgcctcttgaatccttgttatgaattcattcctgtttcaaagacagtatgcaatgtttattggttgatgtagaagtgcaaacatttctgatcaaccaatatctacaacacttaagacaccttatgcaattaaatctgcaatctgtgcaggataggattgtgtcaagcttggttatgctgggcataatatgcttcgtgcattagtgctatcagtgataatgacataatctatgttcaagttcttctaattctgataaactgttcatcttttcaggttaatggtcgcatcatcaggaagcgtatccatgtccgtgtggagcacgtgcagccgtcccgctgcacagaagagttccgcctgaggaaggcaaagaatgatcagctgaaggcggatgccaaggcacgtggtgaggtcatcagcaccaagaggcagccattgggtccgaagcctggattcatggttgagggcgccaccatcgagaccgtcactcccatcccgtacgatgtggtcaatgatctcaagggaggatactaggttgttttggtctatctaccagcagtaccaagttctccatctgtgttactcctgtgcgtacaattttgctcactctgagcagtagtatgaacccattgtgtgttcctgttgaaagatttcccattctaggtgcaaacctgagtttcgcaaaacgctttataccttgatctttgcttctcagaacaaagatgtgcctttttgaaccacttacagtgctaatatttatgttgtttgaatcatgcagtggaaactgggaggtgtcactgtaggttgtgaccttgaaagagtgaacgtagttaggattctagtggtattcctgtgctatattcaccgttgccatgattgttgtgagctgtcagccggccaacatccctacatttggatcgttatcatgttttcacttcatcacgttggcattattgattgagggcctgttctagttggctttagagcatctgcagcagatgagaatcatcttcgctagttcgagaatacgtaattcgtctaattcttgtaactagatagagatggaattcgaggcaaaaaaaagctttagcagttagcacactcttttcaatactcctttcttttttttttcttctgaattgtgaaaattactccctcaattcctcagaaaatgggagggcaacgatcccctttcccttcccttcgatgggcgtcgccgggccgcattggtgggcgtacaacgccgggccacgcattggacagtggctagtgggcatcgagcggcgggagtgggctgcccgagagcgggcaccactgcgctgtcaggcagaggtgggacttgggccttgtttcctaaagatttttttaaaacttttcagatttcagatcacatcaaattta

SEQ ID NO: 3900 - DNA, 9330 bp, Sorghum bicolor
gcaaaacatgagatagggcctctatatctcgacaaataaaatagcttaggtttcattatctaatggttacaaattttcaataataagatctataataaatactccaatgttctatgtttgttagttaaggctagttttaattgagttttattaaagttttatggacattaaatatgttacactatattaatgaatagagagatgataagagtttcatgggagtagagagagtttcacggggatgaaactcttctgcaatatttctaaaatatagatgtgttgaaaactgagccatgaaatctgcattgaggatggcctaaggtgatcgtgtttgtgtgtgtccgcgtttttttattgtcatgatccgcagcttcgccataacatttataccacctcgatcggtactgcttgctattagtaataggaatgattaaatctctccataagtgatcgataaatacttacacggattcttgcgagctgtgtaaaaaaaactaaataagcaactaacacttaggctaactaagcttaaactaactagacttgatgactaaatactaattagagggctcttaatttttgagggcctggtgtggtcgcgccacttgcgctgcccaatatacgagcctgaatatagataaaaacaaaaactaattgcacaatttgtctgtaaatcgcgagacaaattttttaagtctagttactttatgattggacaatgtttatcaaataaaaacgaaagtgctacaatgtcaaaacccaaaaactttttggatatatacaagaccttagtttaccccaaaaactaattttttttcaagatttcccgtcacatcgaatcttacaacatatgcatgaaaacattaaatatagatgaaaacaaaaactaattgcatagtttacctgtaaatcgcgagacggattttttaaacctagttactctataattgaacaatattagtcaaataaaaacgaaagtatcaaaattgaaattttttttgatctaaacaaggcccaatcccacttcctcccttccctcccgcctcctcccttgcggcgccgcatctcatgctgtcacgcacgcagaaaccacgacgcgagttgccacaattccgaacgtcgttgcccccattcctcgcgactctagacgacatattttatattagactatttgatcatgtgtttgtatggctagtttgtttgattaatttgttattggtttgtaattctttggttgaaatgggagtttgatatattgatacatgtacttttgatattacaaacattcttagatccatgggtaaggataacccatggttacccgtatgggtaagggtatagaaaaaattcttacctatgcatatatataagtaaattagtgagtaaaatattttctcattatgggcagccataattcgatgagtaattacccgttgccatgccccactgcatgccatatcccaaacagcaaaaaaaaccgaatccacacgtgaccatatccataacctaaccttcatctcggtggttcagacacccccgcacgaaatcaacggtacagatgtctccgacgcacagggacagtgcggccgtcggaggaccaactcctccagccaagcgttccgaaaccacacctgattttgcccacagtttctgagagaaaagaaacctacagctcgacccagatcatctctgactcccttcagaatcaaccgacagcttccagaatttctttgataacacctcgcagggtttttatcgcacctaaatttctatctgtctgttgtctgggtctgctgtatcattctgatcattggttctagcccaaatcttgttctctttccggttcgtctgagtttgatcccgcctttatcctctcaaatccactaaacctcctccaaaagattgattttttccgcctcgaaagctcagatattttttcgttgggtttgtgccgtcggcgggggcgcgaaatcccttaagctggcgaccccggcgcggccatggacctcccagagagctctgtcccctgcgcagacgagggcccggcacctcaccgtcttggccccgtcgaccgcgaggagctggtgcgcgccatgacacagtcgctctactcgctcgggtaccggcgggcggcggccgcgctcgaggtggagtccggcgtgccactgtacccgccggagcacgaccgcctgctgctcgaagtgatggccggccggtgggacgcgtccgcggagaccgtccgctcggtcgccggcgtcggcgacgcggaccgcgcggtcgcggagttcctagtatggaggggctactacctggagctcctggggatgcacggtgacgctggcctgcgccgggcgagggaggtgctacggcgccggattgcgccgctcagcgtcgacaggaggtgtgtacactggctggcgtgcgccatggtctccggtgagggggcggttgcgccggaggccgtggttgggtggaggattgcggtgttcttggatttgattgaggtgttgccaccatggttccatgtgcctagtgggcggttggagcatttggtggagagtgcggttaccaagcaggtagaatcttgtatatatcacaatttgccggatgagatcactctgtttgaagatcataggtgccatgaagagcatatcccctcccagtgtgcacaggtgcgagttaaacagattgctgacttgtttcccagtttcgacagatgtccaagcttatcatgtctataagattgtgaaaagaaattgccgaactcatactagagtcatcaatttacaattgggaaatatttcaagaacaacccatttctacatatagcagcactccttaaaagttttatatatttggttttattccaagtaggtttaacggacaattcagtatggctattcatttcagaaatttaaatttcttctgtaccatctttgcaatgtatgcagatctctatatttgattttggaagcataaaagtgcaatgcagttgggaaatgcttctcaaagtaccgcaacaatattaaatttctcctgtaccgtgtttgcaatgtatgcaaattcatccctctctatttgattttggaagcatgaaagtgcaatgcagatgggaaatacttcttaaagtgcccccacattatttttcatccagtaaagcagggtttggataatttcagaatctttaaggaaaaaaaagaacagcacagttcaaacctttatttctaaatttatattcaagcagtgctcatttttattaaaccgtgcttcatcttcctgtatgaactgcccatgcccaccctacttaattaacaggaaccttattgttggtagagaaaagaaagataatgcacaggaggaactgtgtatctttgattttgacgaatctgtgtagttgtatacccatgaagtcagccactagaaaatgtcataagaggccatccatagattgcagccattgctgaatgctaaatgaaattggtctaaatctaacacatttccgaagcagcatcgaaaaatatcaattcattcaaagtatttttgttgcacctacactaccactgtaaaaactatcacaaaaacaaacttttaatcacccatttccaagaactacatacttgttcatataacatgaaatggacctgaaacgatagacttgtctgagttactggatccaaatgaagttgacattttagatttgattgccttgtggggtggatatatttccctgtttctcaaggcacacataaaaacaggaggaataaacacatggatcaagaaaataaacatgatggtgctcttacagaagtacagttttgtaaaattacgcacaattatacataattctttgaaacatgtgcttaaagatgttgttatattttttttagaatgacagtagtggtttgctatctgaaagtttactcatttgtttttgagaaaaatggatgactattcaggtaaacttctcatgtatttttcaggactcgacagccctataaaattttcatgctgggggtttggggctgtattgcaaagttatgtatttcacatatccatgcctgtttgcagatattatgtggtcatagtaatgaagtttggtttgtaaggttctcaaataatggaaactacctggcatcatcttcaagtgactgcaccgctataatttggaaggtattattcagcacacccagccattgaactgaaaaggttatgcagtttgttgtttgagtgcataaagtttgaactgaaaatgatatctcaaatttaccttgctatattggtgctctggaagccaacttattactgattatgcacacattgtgaatatagacattgcagaaataactgcaaaaacgccatataatctaattatgaaaacattgaatttttgaagcattaactaacattgaacttttgaagcattacctgatgctagcagtagataactcactccaaactgcccaatgagagccttacctactgttacgcagatgtgctgtttcgtttgactattggtacaccctagtgttcattttgttttggataagttacttagagtgttcgctgtgtcgcaccatacaccatcataggaagcctacctctgggcttctgctatcactcttttgctatgacaacaatgaaattctgaatgtaagttcagcacacagttaaatctattagttttttatgcactgaatagcttaaaactatgactgccttatcattatttcgcaatttatgacttcccagttttgggacatattagtaggctggctgttcattttcaagagtaaatcaattacaactgtatactactgtatgaattgttggtttattgcctatacgtgtttttgtctttgatttgataggtgtgatgagcatagattggttgggggtagattgcattgattgtagtgtaggtaggcgggtgagggatgcgaacatggcggcggcgcagggccagagctaggccggccctggccctcttatgggcccaccactgtaaggtctgatttgacccatgacaataggtttcatttctattagtccatcagttgaatgcaatttgtgggtttcgttgtagtgttcagtaatagtgaccctttactgaataaatttactaatagctgaagaaaaattgactctttactaaaaatctaccaattattgaaggaaaaattcatttgaacagctttgatattttcaggccaaaaatatagactgctgaacttcaggtcagaaaataagtaggaaaatgattcacctctctataataatatgggtttggctcctggcaagcacctaaccaccaatatttttggccatgcaatgcaatataagttgggaacttgtgcaaataaacttttgtttgatgtttcaaaagttgaatgatatgcagtatgcatcagcacatttgctagtattagtggcttatttttctgaacgaaagcattaatgaacttcacatagtagctattttcctaatttgggataactctcatagaggaaggctggagaagggatgcaaagttcttttaaaataagtgaagtgcttttttctgtaatgctctctctatagggaaaagtatagaggtgaaatggaatggataaaacatatttctttttattgtttcctctgtagcattcttaatgttcatcatccatattattttgtagttttgtacacatggaaattgttatgtttggttattttcagcccatctgatttaatccatattgctttactagtttacttgactatattttgatcacgatgttatttccacttcgataaccttactgaaaacactttttttgtatacgtattcacattaattcactagacatagccttgtacttcctcttataaaaactataagtcatataggtttgccctaagtcaaacttttaaactttgaccatcagtatctaaattttaatacagattacaagattggcattactagattcattaatgaaagaaatacttttatgatatataactcttttcatttaaggtaatatatatttattgatattagcagtcaaataaatttagatcgacttacatttgtgatcagaagtacatacactatgcatatttatatttcagacatattacctctgttaataagaatataaatagtggttttaacacgtgcacgactatttttctaactttggtcattattatgtacaaactatcggaattgaatatgtgaaaatcatggtcacatttttcacgaaatgtgttttgctaaatataatatttttagtttctttcttatacaattctacatgatgatgaaagtaaaataatggagaccatgtcaatgtcgaaaacaataaattcgagtagaactctttgtttcatacttggactgcattatcacattgttaagggccatgttcccataattcatattaatgctatcatattacaatgcacctctctctggacttcagagtattaactatcaccctcaccagttttgatgcaatgataaacagatggaagtaatttgaactgagtaatgatacaaaatgtgaacttgggaagaaagattatgtgtctcatgtcatatgagatcttggtttgattctggattgctcatatgcttcattgccaactttttctttttccattcatggtatctaggaataatataattgaaggaatcttaaatttcaatgtttaattgtatagtcaagttgatgccaaaattaacaaagttgatcaatcattcaatcatgctcataaatgatcctattttttattagtctcatgataaacagtacttaatttgtacaagggacacatgtgctagaagcctagtgatcagcactgctagtgataatattaaagctccctctgttgttagattattgctgacctcatattcatctaagctagaggaaaatggagacacatgcatgtaaattgaaatatttttttattaggtgaacacatggtcatgttaacagtgcaatggtagagcacccagattaaattgtttacactgaaggcagtttcagcatgcttcctggctgttactggccacaccagtttggtgggcccctccttaagagctatgtcaggggaatgtctctccctctgatcaattttttcttattgcttgaaaacactacgggtatgaagcttatgaaagcacacccatttgcattttagatgaatttacagataaatatccattctccaagcacatgtttcatctacagcagtttttgcttatttgatcaatttataaaattttgtttagcattgatgataatttcttttccatttattacaacttcttgtggttgtcttgtctgagcctggtacatgttgttaggtggaaaaggatgatacattgaccaagaagcactgcctcgagggtcaccaaaaaccaatttcctttgttgcttggagcccaaatgacagaatgctgctcacttgtggtactggtgaatctttaaaactgtggaatgttgatactggtgaatgtaaccttaaattcagaggctcagtagactacatcatcagttcatgtgcatggtttcctaattcggagaaaatagtatgtgccagctccgagcctgcaagttctccaaataggatcttcacttgtgatctagaaggtcaagagctggaagtatgggccggagatagaataccaaaagtcagtgatcttgctgtgacacctgatggccgacaccttatctttgtatcttgctatgatatctggattagagaacttccaaaggggcgggaatggagatttcgtgagaagcagacgatttcatctgtttctctctcaggtgatggacaatcactcgttgtgaaccttaccagtcaggagattcatttgtggaaaattaatgaaagttgtactgtgcctgaaaagttcaaggggcacaagcaagacaagtttgtgattaggtcttgctttggtggttcaaactctttgttcattgctagtggcagtgaggattcacaggtataattttttactggacttcaatcttgattttgaagaaaatattagccagttatggcttctgttctaatttattgcttaaattccatggtcagcaatgcatatggaatataacacctcctcaagtatgtgatatttcatatttgtgttaaaaatggtggattaaagcagcactatgcgtcggggtttaatgtgcatgatgctagcaatggtaggtaggttaactaatgatgtctataacatctttgatataacaaaatccattgcatatatatgaataacatctaaagttccactagtctactcacaaggctttgaactttgggtttggacttgctaaatgctaattcagcatcgtggttggtaactagtaactttttgcgtgtgtgcgcgcttgcttttgtaaagctatgttttacattacctgtcatgtgccactgtacaagggcagcctagtagaaagaagtggaacaacttttttttatggataactatattttaggtatactatatacacaaaatcaagctaagaacactgaatacgaaataaattgattgattggtagtaaactgttaatttaattatgggaagataggataacctatggattgttgctcttgtttaccgttcactaacctttaaaaacaatgagcaggtctacatttggaaaaggcacgtggagatgccaataaaggttttgcatggccacacgatgattgtgaactgtgtcagctggaatcctgcaaggccccatatgctggcttctgctagtgatgaccgcacggttcgaatatgggtagcgcgcaaaatgcatagtaaatattgttgaagtgtgaaattttgtatgtttgtgtaaatagttgtacatctggactgcatccacaaatccatttgggatcatgttctgatgttcttcccgaaataggtcgtagctactttcagaaataaacctctaaggctccaacagccagaggtagccggtgctgtgttccagatgtatgcctggctaaccggtgagttttgacacatgtacaggacatagatgcatcagaactttgtacattttgtgatttgatacatgcctttgacactcgttgaaagtgctgaaatgtgccttctgttgctgtggatcttgtgttcgtgtgcttacctttttcgctgggttcatgtgctgtcatgcattttgtttagaatactccagaacttctttctggagtccttttcaggtgactttctgaaggcctttgcatgagagatggaagtcaggccttctttagttcatacaaaaaccaaaaacttttcacgatttctcattacatcgaattttac

SEQ ID NO: 3901 - DNA, 23744 bp, Sorghum bicolor
gctgcctcgactgcacccggagagtcctcgcaacaatctcaacaatagtactgtctttctacaacacatgattcacacctattgcaacacttgaaaatcacttttgcaacatcccaaaaatctattacaacacggagaaacaaaaaaaacttacaaaacaacaaggggatgagttcgaggtgtaggatgctctagccctagcccatcaccttcgagctcgccagaggaaggagaaaataggatcccaacccactattgtgtccctcagatttagagaagaaggaggctcggatctagaggatgagatgagtatgaggggaaggaggaggagggctcagatctagtggaagaggaggaggaagagggctcagatttagtggaggaggaggaggaagagggttcggatccagtagaggaggaggagagctcagatccagagaaagatcgacctatccgaagtcgccgccatcatcctcatctctggtgggaggagcaagagctgagtcgctggtggagtagaatgaagctcgtagagaagggatgaacggaggaaggaagagagcacgagcggctgggggtgacaacgaacatgtgtcctggtgcaggagccgtatggggtgggtgagaaagcgagcagcaaagtggggataaggagaagcgagtatagagcagaaggccaggagcggatgcagacgactcgatcaagttattccgtgtgcggatctgtccggacggaacagacgcccgtcatatatcattaccggaggagatatcttagcatgcgccttggcagatctcaacaaggtgactatgagaaaaaagaggataaccattggtgacttagggggtgtttgggactgctctgctctatattttttttatcttcgctccacgttttttagccaaacggtttcagctccacgcactcaatttgaagaaaaatagagttgtgagagcacctaaagagatacttcacaaactccagttttttatgaagctgctccacagtggagtttatgaagcagtctcaaacaccccttaggccagcatggcttagaaggagggaccatgggttggaaaggaagcttgcggatgacctagagaggcacatgggctaggcaagaacttgcgtggagaagctgagcaatggtgatgaccatcctccgtccatgaggagaaaagagaaaaatggagatatatagattgacaataaagcctcacgtaacattcagaccttgtttaattagccagaatttttggttttagctactgtaacatttttgtttgtatttgataatttttgtctaatcattaattaattagacttaaaagattcgtctcgtagattgcagataaactatgtaattaatttttacttttatctatatttaatactctaaagtttggtataacgaattttgaaatttttagaaactaaactggacatcagttacccttagttttatgtctcccaaccgcaattacttgtgaatgcccattttcagctcagctcaagtttgacttgatacaatctggtcctattaacaacctcggaagactccagcaggcccacttttagacttttaggcttggattgtggccttgtttagtttccaaaggaaaaaatttcaagacattgtaacatttttgtttgtttgtggtaattattgtctaactatagagtaactaggctaaaaaaatttgtctcgttaattccgatcaaactgtgtaattagtttttatttttgtctatctttaatattccatacatgcgtgtaaagattcgatgtgatggaaaattttgaaaatttttgagtttttgttgaaagtaaacaagatgtggatagactcgtgggttcgtcgtggcagtagcacaagtcccgctcgcaactccaaacccctttccacgtcagccgcggccgtccgcatccttctccatgcttccgctggcttcgtcctcgtcacgacttgtcagccgcactggcggtacactcttcttcatcacccggacgcccggaacggccgcacacggcacacgcattgcttgcttgtcgtgctgagccgctccactcctcttccccccgctgctcgcctctcgattccttccgcctcatcgcgtccggcgaaccccatgtccactgcgaccgcggccctcgccgccgcgcgatcccccgctgtcgcgcttctcagcctgcgccgccgcgcccacgcggctgctcccattcgcttccccggtctccgcgtcggctccggttgccgtcacgtagctatggcttccgcggcgcatgcccgcgcccccaccgacccgcttcccaaggtacgacctcgacgcaagcacgcacgcttttggtttctctttagggcccagaacgcaccgttttctttttcttttttttttctgagacagaaggacgcactgtttccttttgagagtgtaacgcactgtttccttctgagagtggaacgcactgttgttagcttgttattgtcagagggactatgatctcagatgtcaaattggcgaggcgtttgacataagtacaatcaatttcatcgtactgggtcagcaccatggaaggacattgagggtgactggcgaccaaacgggcgcttaatcgttttgcatcttcagggattttttttttcgaggaagcactttttggacttaattatagtggctagcaaaatatcatgcctcaggtgaggcttttactttggatgccttttagggtttagggttgatttctgactctcatggggcagaaaagtcaagtagccgtgtggcgaagttgaggcaatgcaatttctgcatctctgctgggtgcacatgaatactgacttagctgaagatgtaaatgtagactacagagtgttgacctactgtaatggtggaacacaaaacctggaataatttcgcgataaaagggctatatagcatgctttttgcatctgaaatctaattcttattatcaactgcagtatatatgatgaatacacttaatgcatggtttgcttactctgatgtttatatactgttcaaaacagatagtagatgtggcataggaacaaaatatacttatacagcaataagagaatttcagaatgtaaaataatttcacacttgtcctcccacctttatgtataccttttgttttgtcctgtgtgatttatgttttttcccccaaatttatgaggggaattgagtgactcttaatttccttgtatttcagggtgctgattcatttttccgggcagtgatctcgaacatggaaaaggtttatttgagcaggaatcctacagccaaaaccattctagagcttgtacgatcttatgatggtgatcacatttgttatgaccaccttgctttccggacatttggggtgagcactagcataaattcagttatatgtgttacatagtgtcaaatcttgatgtattgatgactgtaaagataagcaatatttttatctgttgcaattgcaggtcaatggttatggtataaactcactttctgaatttttcactgattttggttatgtacctcgcgaagaactcagatttccagctaaaaagcttagagcactatggttttccccgcccaccaatggtggctactctggaactggtacatatggacctttgccaaggatattcatttcagaactgcttgtggatgagttgactactcaaagccaggtaatctgtgtcacttgattcgcccattttttttgggtgaaatggattacaatgaagaattgcgcggttcattgatcaatacttatgctaagggaaggattttgaaatggattcacatttcacaacgacattgcgtgttttaggggaaaagtaggggtaaccaagaagtcaaatctcccatattgattacagttttgtttaggactaaagtaactctatggattaaacgattaagcatgtttcggaaggttaaaattacttcctgggttgccatgccttttggatgtttctgtgcttcaagctgatggcagtgtggcatgtagtggctcactgctgattagtcaggctagggatctgctcctcctaggcaggtgttatatattttttatatgctattaggtgataagaacgttaatcatgtatgctagtttgaaaatcagaccataattcagaatttcagatatgctgtcaggcaagggatatgatattgttttcttataataactgcagctagtcttgctttatttctttagacctttgttcttgcaaatttcttttggttaccaaacaaattcatcagattgtttgtctgtacaggaaattatacataagtacattaaaacttctggcaatggaaataatcatgctgctcttgcaagtacttctggggagctgacatgggaaaagcccatctattcagatttccagattttgtctaggtaaaagtttaatgactgtttgagaactgaagcatatgttgttaacacataattgtttgaacaaattaggtcttcatttcaaatgatggaagacagaaagttatccttttgttcatttcttcactggtgtttctgatgctgtcttttgttgttttgtgtctttactccattggtgttttcactttctcactcttgttcttggacaccagtgaaagtgaatatgctgcatggactcttgttaatggctatgcactaaatcatgccacaattgccacccatcgcctagaatcagatatcagaaatattaataagttcaacaaatttgtggaggacaatggcttcaagttaaattcagaaggagggattctgaaaggtcagctgttgatatctgtcccacccagattatatttagtagctagtgtcacctgacatagtacctttaattttttatgctctatttgattacataaattttggaaatctactttgctgggagcattacaaatcactacattttctgatactttaattagtagtataatttgatcatattgaagtacccatgtgtttttggggaaataagtacacatgtatccaaactccaaagtaggtcattagctcttgcgatgtcttgaataataataaatttttaagtatgtatctggcccatctatcccatgtgttgtttatgtgtacacatcaagactaatggagattgatcttcccacagtcggagttatggtatttaaacaaaatacttaaagcgtatgcacctaagtcatactgtcacacacctaattcacggggaaggtttagaggtagaattgggggattagggggaggaacggcagccctagggctggccacgcctagagaaagggagggaatggcggcagcagcaagctgcagccggcctggcagatggtggccggcacagccatggtggttggagcaggtggtggaacggcgggcggcatggatgtcagtggcggcagctcccgtcgcctgctgcggggaagggcggtgcagctagggcgggcatgcgtgggagagggagatagagcgtttgttggcacctgcacacaagcaccaggtgaacagaccctgctcaccttccctttcccactcccctgctccaaggaagaggaagagccctgagctccctcactcactcacgcagcacacacacacacagttttcagacttgaactgaaaactggagaactgaatgagtggcaatgaacttgctacttcttccattgcattgggctggtttatatacaccaaatacatgtaccttctaaggtacagttctaccaactacatacacctagggtacaaggctgaaaacagccaacaactactctagtaccagccatactgctggtgtacttctactagtacaagtatggcctattgccttatactctacaggaccaaagacttgaccagccatgaaatgatctgatccactaccatgcctctgtcctggtcagcaagaagaaaggaagggagcagcagattatgtcttacaatcttcccctaatctttgctgccctcatttgacttccaccatgccaatcatcttcctcagttcctgaaaccgaagcttcccgagtgacttggtgaggatgtcagcgagtagtcgaccggtttcgacgaactcgatgaccagctgccctccatcgacgcaatcacgaagaaagtgaaacttcacatcaatgtgtttgcttcggtcgtggagaactgggttctttgccaatgctatggccggctgattgtccatctttagtgccggtgcctgagctttacttcctgtcagctcactcagcaaccgctggagccacaccacctggcatgctgccgtcgctgccgcgacatactccgcttcacaagtggacagagccaccattttctgcttcagtgattgccaggcaaccggcgcagccccgaggaagacaagcaccccagaggtgctcctccgtccatccacgtccccggccatgtctgcatcactgtaagccaccagctctgcttcccctgtcctgggtggtgcctcgctgaagacagacagccgaagcccgccgcgcttggggaagatgagccccatctccactgacccctggacgtaacgcaacaagcgcttcactgtcgcccagtgatcttcccgcggatccttcatgaagcggctcacatagccgacggcgaacgcaatgtccggctgggtatgcgtgagccacctcaagccaccgacgatgctccggtacaaggtggcatccaccttctccgccgtgctctgtttagagagcttcacgcgctcctccatcggtgtagccactggcttgcagcccaccatgcctgccctttccagtagcttgagcgcgtacgcacgctgtccaagcttgatggagtccgccccctgcctcacctcgatcccgaggtagtaagatagcgatccgagatcactaatcttgaattggctggccatctcctccttgaaccgagcgatgtcgctcgcccgcgcgccggtgatgatcaaatcatcgacgtacaccccgatgatgaggtgctccttcccccgtcgtcgggtgtacagagcatgctcgctggcgcaccgtgtgaatccaagctccgtcatggtggcgtcgagcttgcattccaggcgcgcggagcttggcgcagtccatacaacgccttccgaaaccgcagcaccttccgctcctgccccgcctgcacgaatcctggtggttgcttgacgaagaccacctccgccaagtcgccattgagaaaggcagacttgacgtcgaggtggtggacctgccagtccttggccgccgcgagcgcaagcaggagccgcaccgactccatgcgcgccactggcgcaaagacctcctcgaaatcaaccccttccctctgtacaaacccgcgggcgacgagccgtgccttgtgcttcacgacggcgccccgctcgtcgcgcttgaccttatacacccatttgagcccgatcggccggcatcccgccggcggatcgacaagctctcaggtgcggttgtcctcaatggacttcatctcctcgagcattgcacgccgccatgcttcatcgcgctccgcagctgcaaacgtgcccggctcctccgttcggccagtcctggcacggctgcctccccgaccacgttgtccacccgccggaaccgcacctcctccccttcatggaaagcatccacgaagtctgagacgttggaaggtggcgaggcgtactcgactgtggccgcagcaggtgtcctctgctcgggcgagccaggggattcttccccggccagttcgggcgcaaccaggtgtccagtcctgcttggactgggtggctcccctgctgcaaccggcgactcggcatccctcgcagctgctgattctggtggctgctccgccgctgcaccgtggccttgaatcactaggtgttcgacgtcgaagaagtcgctgatgccaccgccctctgatgcttcccccaaatcagtctcctcctcccacctccaggcagccgcctcatcgaagacgacatctctggacaccatcaccttcccgccagccgggtcgtagagcctataggctttggacccttcctcgtagccaaggaacactgccttggtgctcctatcttcctggcttggtgatgcgcacatggccaatgcagccgaatgtgcgcatgaacgagacattaggcttgcgcccatgccatgcctctaatggtgtctgccctctcagcgccttggtgggagcccggttgaggatgaagacggccgtgctcaccgcctcgccccagaaagctcccggcatcttcttcgccttcatcatcgaacgcgccatcccaacgatggtttggtttcggcgttccaccacgccgttctgctgaggagaatagggcgcagtgagatggcgccccatcccctcctcggcgcagtaggtggcgaattctatcgccgtgaactcgcccccgcggtctgtcctcagcaccttcaacttcttcccggactccacctccacccgcgccttaaagcgcctgatggcgtccgttgcctcggccttgctcgttagaagctgcagccacatgtagcgactgcaatcgtctacgagcaggaggaagtacctccacccgtcgtgggtccggtgtgattggtccgcagaggtctccatggaccagctcgagcagctcctctgcgcgacgcttggctgccttggggaacggcagccgcctctgcttccccgccaggcagctgtcgcagagctcgcctgcgtgcctgatctccggtagaccgtccaccatcttcccgagccggcccagtgcatcgaaattgagatggccgaaccggccatgccacaaccatggcttctctgtgcacgctgctgctaggcacactggttgctcgatcttcaaatcaaggaggtaaagtcggtttcgtgatcgctttaccttcgccacgagtcgcccgtcctggtccctgatccggagcacgccgccgcggatgagcacctccgcgccgtgctcgtctagttgacccaagctgacgatgctcgaccgaagttcggggatgtagtaaacctccgagagcgctcggtgttccccgttcttgcacctgaacaacaccgtccctcgtccgcgaatctccacccgagagccgtccccgaaccggacgctcccggcatgcttctcgtccagctcggagaaggcggcgcggcaaccggtcatgtgattgcttgcgccggaatccaagtaccaccgttgctcggactcatctccggcgactccaagatggacttgcgctcgcggctcatcaaagtgatggatagccagcggcgcaaaactatgctccgcctccaacacttgatctccgccactctgctccgcgcagtacaccctcatcaggagtgcgtgatcgccgtcactgtcgtcctgagccaggtgcgcctcatccttctccttgcgctccgggcactcccgcgcccagtgcccaaccttgccgcacttgcggcaggcgttcgggtcggagaacttcttcttccccttcttcttgtcagccggccccttgctctgctgcttaccgccgccgcgatcgccgccaccacggctagagccttccccggaccgccgcttgtccttcatgcgtgctgaccactcttccttggttagcagaagcttgggcttctccttctctggcgccggtgtggtgcgactctctgctacccgcagccgcccggccacgtcctccagagacagcgtggagatgtccagcatggtctcgatggacatggcgagctgcgagtatcttgccggcacggtgcaaacaacttggtgttgaggtcctcatcgtccaccttcttgctgtaggtggccagctgcgtggccagagattggaggcgaagggtgaagtcctccaccgactccccggacttgaacttgatgtcgttgagctccctgcgcagctgctgaatcctctccctcttggctcgatccgagccaatgcgcagggactccagcatctcccaggcctgcttcgcggtctccttggcgcccagcgcctcgtggtactccgccggcgtcgaggccatgagcgcctccatgatccccacctgggcatcctcgctccgatcgtcctcctcgatcggccgccaccacttccgcgcgcgcagcttccacttcatctgtgtcgcccactcaccgtagttggtgcgggtgagcatgggccaggagccgctcccgccgaactccttcaccacgcgcacctcgacctgcggtggcgccggctggagctggcgctcagcgccctcccctccgccgttccgggccgcactgtccgccattgtcggtcgatggacctagcacacggcttgtacggctttgataccacttgttggcacctgcacacaagcaccaggtgaacagaccctgctcaccttccctttcccactcccctgctccaaggaagaggaagagccctgagctccctcactcactcacgcagcacacacacacagttttcagacttgaactgaaaactggagaactgaatgagtggcaatgaacttgctacttcttccattgcattgggctggtttatatacaccaaatacatgtaccttctaaggtacagttctaccaactacatacacctagggtacaaggctgaaaacagccaacaactactctagtaccagccatactgctggtgtacttctactagtacaagtatggcctattgccttatactctacaggaccaaagacttgaccagccatgaaatgatctgatccactaccatgcctctgtcctggtcagcaagaagaaaggaagggggcagcagattatgtcttacagcgttttaccccaaactattcttgcttaattccaaaagatacatctccctttatatttatagggaggactttactcgacttgactaacaagtaatcctagcttctagactcttcctaatcctaaacatagctgggtcttgcaacgtgctactgttcacgttgggcccaattggcccgacttgggccccacacctccgtagcccgtcatggctatgttggcccatgacacatacattaccatgttacattgacccgaatcatgggaaaataaatgtcttcattagttttgatgtgtgcatttatacgatgtatggtccagtatgggcctagaatagattggcctgatacgtacttaacagctgatggtcaataccaccttcttgcaaacatttagcattcgcctagagctatttactatatactactcatagcagttcaaaaaacaacagctaaggcactaacacacaggttgggttcctcccaccaactcgctcaatataactgcttctaatatgacaccaaatttctttgattatgtaagaaaaatctaaaaggctgaaaattggagcatttttgctggaaaacaaacagtctgcctacccccccaaccctgtgagacgatgtatgagcttccctcttgattttgctggttctggttttttgaatccttttctttttttgtctcaaacatgcaagaggaatgcacatcattatattaaaaggagaaaaagaaaaccaacaacccaagtggaccaatgcaatataaagcaggaagagaccacaacagaaaactcacacacccaaactcacaaacccctgaaagctaactaaaacattgaattcatcatcaacagagagaggtaccagggtcaaggccccgagtcggctccgaggataagcgcagttgagaggctgtaatcaccactgtttataggcccgtatgttagagaactgtgattcattgcttaggcaaaccctaaccagggtggccatatagttaggaatacatgggcctcatgggcctagccacatgggcctgcattacacatactctaacacccccccgcagtctgaactttcggcgcagcggagtttgcagactgaacacgaaaaggagtacaacacacgggcccccccacagacgcaactagccactggtgatgttgaggctggagcggaactcggtgaaggtcgaggacgggagacccttggtgaagatgtcggcgaactgggaggtggtcgggacgtggaggacccgaacatcgccgacagcgacccggtcccggacgaagtgtagatcgatctccacatgcttggtcctctggtgctggacagggttggtggagaggtacaccgcactgacgttgtcgcagtagaccagtgcgctccgggagagagggctgtggagctcggcgaggagctgccggagccgggaagcctcagccacgccgttggcgacagcgcggtactccgcctcggcactggagcgggagacgaccggctggcgcttggacgaccaagacaccaggttgccgcctaagaagacggcatagccgaaggtggagcagcgggtgtccggacacccggcccagtcggcgtcagtgtagacgacgagctcggtggaggacgaccgtcggtgaaggaggagaccgaaatcgatggtgccgcggaggtagcgaaggatccgcttgagagcggtgaggtgtggctcccgggatcatgcatatggaggcagatctgctgaactgcataggtgatatccggccgggtgaaggtgaggtactgaagtgccccggcaagactctgatatgcagtgggatctgtcactggtgtaccctcagcctccaagatcttgccctgtgtgtcaactggagtggagcagggcttgcagtcagtcatcccagctctctccaggatatcaagagtgtactgccgcgggtgaaggagtaatccagcagggtgaggctcaacagtaaccccgaggaagtgatgtagtgcacccagatccttcatagcaaactcctgctgaagagaggcgatgatccgccgaaggagtgactcagtggaggctgtgaggacaatgtcatcaacatggagcagcagatatgcagtctcagccccatggtgatagatgaacagagaggtatctgacttagcctccacaaaccccagagtcagtagaaaagcagcaaaccgatggttccacgcccggggggcctgcttgaggccgtagagagacttgttgagccgacacaccatgtcgggacgagaagagtcaacaaaccccgccggctgactgcagtagactgtctcagtaagaacgccatgtaggaaggcattcttgatgtccagctgatgcacgggccacccgcgtgtgagagctagcgagagcaccgtgcggacagtggccggcttcaccaccgggctgaaggtctcgtcgtagtcgacaccgggccgctgagtgaagcctcggagaacccagcgagccttgtaccgctcaagggtgccgtcagcccggcgcttgtgggtccagatccacttgccggtgacgatgttggagcccgggggatgagagaccagatcccacgtctggttggcgaggagggccgcgtactcctcttccatcgctcggcgccagtgagggtccagcaaggcctcgcggacggaagagggtaccggtgagacctgcgagtccccgggcatcgccgcaagagcccggggctgtagggtcccagccgcgtgtcgcgtcaccatcgggtgaacatgacgcgggtgtcggtgaaggagcggagggtggtacactggcgtcgcgacccgggaagctgggtgcctcggcggcggggtcggtgtcgccagcggggaagacgtcgtcagtggcgcaggtgaacccggcgaagagggggccaccggcgccagccgggcacgtcgctggtagacgcgcaccggctgggcaaaacgtgccggtggggccggagttggagacgccgacccgggacccacgccgggagcacgccgctggtagacacgcaccggctgggcgaagcgtgccggtggggccagtgtcggaggtgccgacccgggacccgcgtcaggcgcaggggccgggtcggaaggggacccctcgggacccgggcagggtagaggcccccaggtgtcacgggcgacaggcgacgtagcagtacctgcaggaaacactagcaaaggtggctcgaccaccgggtcagtaggaaacacagaggagaggtcaagctccgaggtggaaccgggagtggtagtggtggaaaagggaaagatcgactcattgaacaccacatggcgagatatgaggactcgacgagaggtaaggtcgtagcatcggtaccccttgtgatccggggagtacccaaggaagacacagagagtcgaacgaggagccagcttgtgaggagcggtggcggtggtgttggggtaacacgcacacccaaagactcgaaggtgatcatagcgaggaggggtaccaaagagagcgtggtgtggtgtgggagctggacaagcagcggaaggaaggcggttaaggaggtaagtggaagtgtgcaagctctcggcccagaagcgagcaggaagagaggcctggagcaggagagtgcgcacggtgtcgttggtggtgcgaatcatgcgctcagccttgccgttttgagaggaggtatatgggcaagacatgcgtaactggacaccgtgagagagaaagaaggcacgggaggtggagttgtcgaactcccgaccattgtcacactggacagccttgacagtgaggccgaactatgtggacacccaagcgaaaaagtggacaagcgcggggaaagcatcagactttgcacgtaaaggaaaagtccaggaataatgagaataatcatccaccaccacaagatagtacttgtatccagaaatactgatgacaggagaggtccataagtcacaatgtacaaggtcaaaaatgcgggccgcatgagaagaagaactagaaaaaggaagacgaacatgacggcccagttggcacgcatgacacaaatgctcatcgtgagcccgagtacatcgaatatcggaactacgactaagctgcatcaaagcatcacgtccagggtggccgagacgccggtgccaagtagtggaggtagtggtggcgaaggcagctgacaaaactggcgaaggaggcgaggcagatgccggaaagcgaagagtgtaaaggggccccgtgctgtcacatcggagcagaggacgccgggaagccaaatccttcacagtaagaccagaagagtcaaacttcacagaacaagaattgtcagctgtagaatgacgaatagaaagaagattgtgaaccatagaaggagcaacaagaacatcaggaagacgaaaggaaccatgggggccggcggcacccacagaggtgacaggaagacaagacccattagcgaccataatggacgaagggagagatggagaaggagggtgaacagaagaaagtataccggggttaggagtggtgtggtaagtagccccaaagtcggtgacccactccggcccaactggaggtgtcagggccatggtgctgaaggagtgcgccaaggccgcctagtcccagccggcagacccgggcaaggtcgcgggtgaagtagcccacgaggacgcggggaacggggccgcctacggggtcactgaggggaatcccgggggggcacccacgagcatggccgccggcgggcgaggctcgccaccggaagcctggaacggccacatggagatgcgccctgaccatgggttgtggaaggatggccagggtgcaccccgtggaggtggctgcgtcgtgttgcccccacgacctgctccacgtcccccaccacggcgacggcggccgccacgccccccccacccccgctcggcccgggggaagaggaccaagaagtgacgactgtggtggtgtggcgggacggggcggagtggcagcgagagcagtcgaggaggatgaggaacccgacgtggaggtcgagggcacctgaactccctgctgtagctcctccatgacgaggtcgtcacagatctgcaggaaggtggggaaaggccgctgacgagtgatccacgtccgaaggtgagagtagcgatcgctgagcccgtggaggacgttgaggaccagggtacggtcctccacgggccagcccagatcgccgagggagtccaccatgcccttcatctgacgacagaactcgctgacagagaggtcgccctggacgaacgtccggaagctcgcatcgaggcgcagagcccgggcctcggcattgcccagaaactggccctcgagcgccagccaggccccgcgagcggtcggggtgttgcggacgaggtcgtggaggtccagggagatcgtcccctggatccaggagaggacgatgctgtcgaggcgcagccacgaggcggtctgcgccacgcccacggtgtcgaggaggacgtggtcgtcgagggcgtagcggcggagggtgaggagaactaggtcccgccaccgggcgtaggaaggcgactccggctcgaggacaaccgggaccaggagccggatgttctggacccctccagcctggtagtgaagctgggtcacgagtgggtcggccgggtcgtgccagatgaccgcggtgtgagacccgcggggaccggccgatcccgaggacgtggccccaccgtcgggcgaggcaggtaggccgaggagctgctccgcgtcggcgatctgacgagccaaggcatcagctgcatcacgttcgcgctcccaggcgatggtggcctcacgcacgcgggccatgccctccgcagcagcagcccgagctgcgacgagggcggcagcgacggcggagcgggacgtgggcgggggcagagtgggaaaggcagcaccaggccaagcggcggctgcctggagcagattgcctgcgcccacggcctccctgggcagagcaggcgcggtcaggagggagccgcgcacgcccactgccagtccaggtgcgggaggcgcccgtccgggcagatcaggcgcagccagagtccttccgcccagctccagtgtaggaggcgcccttgcgggcagagatggcgcaggaggaggtagagaaggcgacgccaggggcatcccgaggccagccgcggcggcggtggcggcggcgcgggcgtaggcggcagcggcggcgggatcctcgacgggcgcgccctggagaaggccgtcctcggctcccccagcggcggcggcgccggctcctggcgcggcacccgccggtgcgtccgcggcggggtcgcccgcggccagggcggcggcggcgcccgcgggcatggaggaggcggcgctggcggatcctggtctgggagcgaccgtactctgtgcccacgtcgaggtagggagggaggggaagtgatggaagtaagaggaaggaggaggaggtggccagccggccatggctgccgccggcggcgctcctggagaagagggagcaggaaagagaaaccctagcctactgataccatgttagagaactgtgattcattgcttaggcaaaccctaaccagggtggccatatagttaggaatacatgggcctcatgggcctagccacatgggcctgcattacacatactctaacaccgtagtctaaaaaaactgacaatctatggagttggcatgtacttggcccaggttctacatttaatataatgacatgcagctctcctgcagtcctgcatgttgagagataaaaagaatcaacagagggtgtgaccatttttacgatcgcaaaggcttcaatgccataagctacgaagcccttttatgccagcgaagcaccatagtttgtcttatcttgaatattgtgcaaaatagaagtatagaacttatggtttggagaaatgtcatcagcacattcctatgtttccacaggatgtcaggaggttatctcattagcttgatcacataatgggcactattcaggatgatcaagtccttggtgtgccaatttgtcagctgtccagcagcaattcaagggtaaccaaatgaaaaatttgcatcttggaggcgttcaggatttccaaacttccttccaaggctcaaactccaccacgccagtgaagaaatgtgcataggtcgatgtgcaagaaaaatcactatccagtggtgttgatcctcaatttcaggattgagctgcacatcactcattaagtccaaaacatggaggtactccagcagtgcctcagtagatatactttatgacctcaaacccaacagttaatagttaaagcctcctggactgtcctgttattagcaaactgctttggaaccaaagtcaccaaagagggtcacttaaggttgatcatgtagccatcgccctgtccaaaagagcattctcttgtcattgcctacaacaatatattttttctcgaactacacaggagagctgcgcgtcatttcattaagaagtgaacaaatacaaaagattaggggagaacccccaatcctcacacaccaacacacccaccaaaacagtaaacaaaaaattgccaacaaaaaaaatgcagacttgaccgatagtcatggcgcctaagtgcccagcaccagtgacctagtgaggagctcctggagctttgaggccccagccatacaccacaaggagctctcatttgccactgtttggagtagtatctggatgcttggacgtgctccttcaaacacacaggagttgcggtgcttccaaacctcccaagccacaagtatggtgagatagttcaaaccttcccgcatatcttctggcacagtccgaatggtgttgcaccaccaggacgagaaactagaggactcagccgtgggcaagtcgacgaccagttttttttttcgagaacatgccaaggcatgtatttcattaagcagaaagagaatccgcacaccccacagtaatccgtagattaccgaaagaaagccctacgtctactgccaaaatacaggatcagagattacatagagacagattttgcttcaaagagagacatggcgcgcacttagtcctgaagacggcgacacaacagaaccaaaaggcgtcgaaacccagccgtgatccacaagtcagcctcagcgatgatcgcctggaaaagctgcgcaggcgaacgagggatccctccaaaggttcttgcgttacgctctttccacaagaaccagccgactaggaagaaaagcgagtcaaaggcgcgtcttatcaccttgggcagccactttctggagtcaatccaccagtacatcacccttcgctcgtggacaacgattaacccctgcatattgaatgccgcgaggcagagatgccagacttcgcgactgtagccgcagccaagcagcaggtggtccatcatctcatcctcttgatcgcagagaacacatttgcagtcgtcctgcaatccatgacgccatcgcctatgcgctgtccaacattttccatgcatcactagccagaagaacatccgaacgcgtgggggcgccgatgttttccaaagctggcatgctcccaccggccgagagcagccaatgaacattgcaccgtaagcagatgacgccgagtaagcctgatcggcgctcagcctccacgagaaagtatcagggacaccaagagtgagctgaatttgtttgatggcgttgctgaggttgacgaactccgcgatgaggcgcaccgttcgcgaccccgtaacgtggtgtacccatctggagttctggagcgcctcagccactgtgactccatgtcttcgcctaggcacaacacagaaaacagccggtgccagggagcggatgcaagtcccctggatccagttgtccacccagaacaatgtggagcaaccatccccagtacagccactgttgctgccttgaagaactccacagtcgccttttcttctttgttagggagcccaagccacggacgctgcaagtcggtacgtcggagccacggccatctcaagcgcagtgcaagacccgcacgttgtaggtcgacgacaccaagtccacccagctcggaaggacggcataccgccggccatgccaccctgcatcggccaccagaggcggtcgcagtgccagtccagataaatccacggtgtagcttgtcgattctcttgagcgcccactgagagaggcaaactgcgatggccgtgtgcacaggtattgccgagagcgtgcttttgaccagcgccgtccggcctgcaatgtttagcaggttgcctttccaccgcggaatgcgtgaggcaacagcatcaatgagtccctgctcatccccccgcctgagtctgaagatagacaacgggatgcccaggtagcggcaagggaaactctccactcggcacgccagaatgtcgtggattctcgcaatgtcgtcatcctcacaatgcagaggcgttgcgatgctcttctccaaatttgcaaagagcccggacgcctgaccaaaaatgtccaaggccgtccgaaggaccaagaggtctagttccagaggcgccacaaagagaaccacgtcgtcagcatacaagctgatgcgctgtcctggtccaagcacgcccagctcaaaagcagctcatgattgtgcagccaattaatcagatggttgaacacctccatgacaagcacgaaaagcatcggtgacagcgggtcgccttgtctgaggcccctggcgtgacaaatgcgtctccccggcgacccgttcaggaggattttggtactggccgtgcacaggatggccgccatccagtccctccatctagcgccaaagcccatctgctgcagcacctcgagcaagaacggtcacgagacaaagtcaaaagccttggcgatatcaattttcaacatgatcgaaggcacccgtgccctgtgcagcgccttgcaagaaagtaggacggcgcggaagttatcctggccgaccaccatgttgagatattggaaaaggaagaaccaaatctgacgagtgaacacgcatgatagaagaaggtgctgggctgtttcctgtgcctggtcacacagaggacaggcgtctgggtgttgcagcccacgcttggccaggcgatccgccgtccagatccttcctttcaaagccaaacaaatgaagaatttgcagcgtagaggtgtccagctccaccagattcttcgccatgctggaaattttatggaaccaacaaagaaggcctcgtaagcggacttgctgctatatgtaccagtttgggtcaacttcgaaaatgatcctgagcttcctgctgcaagaccactctttccaaaaagtcccaaatcctaaaacagtgcctacaacaatatcacaggattgccaaatgttgccgaggtgttgggatgcacctttatcttttcctgaccatggttggtctggctgggttttcttcaaccataaccaccctcatatgtatgcttcagttgtgtaaatagtccaaagattaagtgtccttgcgccccaagtttttgcattggtctcaaaaagaagagctagctggaggactatacatgaggccctctcaaataatttgtggatctctgatatccaatgtgctctaattgtgggagtcatatcagaatttctatctctatgggatttgatcttgcagcctggagtcacagattatcatatctggcgactggcgtttatcttcaaatggccaatattcagcaaggttggcttacaaaaatctcttccagggatagttcttttcggccttatactagaatttggagaacctgggctccaggaaaatgtaaattctttttatggttggtagctcatgatcagtgggcttcctcatcctgatagatgtcctcactgtgatcaagctgaagaatctatcaaccacttgctcctgctttgtgtttttgcaagataattgtggttcaaacttctacaaagagtcggcctgcagttccttgccctgcagattgatgaggagttctttgatgattggtgggaaagaatcaatttgaatgctgggtaccagttacagaaaggcctcaacccccttgtcatccttggcacttggaccttcatcgtaataagtgtgtgtttgatggagtttctccaaagcttggctagagccttactgctcgctagagaggaattatttttggggggtttggcctgggctagaggtatgtcctacctagggatggcaatgggtaattacccgctgggtatgtgttacccatacccttacccatgaaaaaatattttacccgttaatttacccatacttgcgcacgggtaaaagttttttaccatacccttacccatgcgggtaacgggtaacccatgggtatctttatccatgattttaagaatattggctacgaaaaaatacatgttttaatatatcaggctcccaaatttagccaaaatatcataaatcataaataaactcttcaaatatacaagctatatgaacacacaatcaaatgatctaatggataaatccatcattactagataacaagtcataaaatctacaagttccatgattctagtatagtttatcgggtttaatttacccatgggttaacgggtatggacaatgcagtcccataccctcgtttttcccattatcttacccatgggtataaaaaatagccatacccttaccctaatgaggtaattacccatcgggtttcgggtaaaaactgccatctttagtcctacctgctcgcccttgtgccggtgtagtgtatttgctttagttgggtcgtttcatcttttgtcacaggtgagtcagattgttagtagcatggctttgtgttgtttgtgtgtgtttgtaaggacttttccctttttttcttctcaatacaatgatacaaagctttcctgtgtgttcgagaaaaaaatgtgtataagcatatcttaaaaatttactgcatgaagtatacaagttctttttattgttattccacatattgtagagaagctaatttgcatgtttttttttctgtctatgtttatgatcaatagtgagtcctgatggtctccttcagcaaagttcaacagtagctgattcatcattgtttacatttgctgatggaataactgaatctattcctcgatcttacattgaatttgctgaacgtctcctgctaccacagttcaaagatttgcaagatgaagaggtttgcatcattttctcactgattcacactgctcttgtacatgacactaacattgaaaagcatggcttagaattttgtatgacactaacagtatgattccctgaagacctgttgtgctttattcaattactctttacctgcatcagatgccttatctggtactcaatattcccctttgtaatttctgcaggtgaaagaataccacaggcgtgatggttttgaggtgggcaatgcggacaagatattcgaaagtacatcgagggatcagctgacaaggacatctgcataaacagtgaactctagatctattgtgcaaatgacccaatgtgcctcttggaagtgtgttggaggcatgtattgtgaaatgattgtacctacttgagtgaaataaaacatgagaatcaataaaaagtaactgttttttattctacatctgttgaatccaaagagagaatcagttactgtttctgttcctttggccctacaatctttcatcatcattaaatccatgtctgggaacttgggtgttccagaataaacatggcacctgcagtaaggacttcacctacttctcccttaaaaaagaactaacgtgcaggatgactagttttgtttttgttaatttctgttgttttgtgttgtgcatcctagcacttatggttaatgtattgggaatccttggaactgtgaaagcaggtgggctgccatgccggggtgtgcacttatctttcagtaaggtattcagtaggtactaggatactactacagtataacttggtgcgagtagtc

SEQ ID NO: 3902 - DNA, 5801 bp, Sorghum bicolor; identical to SEQ ID NO: 3689

SEQ ID NO: 3903 - DNA, 4583 bp, Sorghum bicolor
agagtgctaaaaatcattaagaaaagagtttaaactgtcaagaaaataatcagtggccacaaatccttaaacaaattcactcactcaaggataggagataagggaaatgaatccacgccattcagataggtggtggactggtggcatcgtcaggacttcagagagggagataagtatgcagtgtggtgcgcaatttggagaatagccggaggcgggaattaaggtctaatgtgcctagcgacgtgtctagcaacgagtctagcgagtcagcaaatcgccaaagcgctaaagtcgtgtttagtttttgaaggaaaaaattccgtgacactgtagcactttcgtttgtttgtagtaattattattcaaccatagactaactaggctcaaaaaaattatctcgtaaatttcgatcaaactgtgtaattagtttttattttcgtctatatttaatactatatgcatgcgtctaaagattcgatgtgacagggaatcttgaaaaaaatttaggttttggggtggaaataaacaaggcctaaggaggaggaggaggcttttttcaaactcaattcctctagaatctatgacttttttcaaggtgggaaatccataaagatatcatttgaataactgatttagttatttatatggagggttttctatttctgggtgtgccttctccttattttcaaattaaaccttagttcaaacaaccacagatgcagtcacacgcacaaaaaaaacatccacagatgcttccaataagctacaacgagcattttttaaaaaaagtttaggtgtcaaattgatagatctttcaattatttatcatttttaaaagttttatggttacttatattatgaaaaaaccaaaaaattaacaactacctcgaacataaacaaacgcgcaagagaaaaacattcgaaacacgaatattaggtgctattttattgtaatcattaatttcttattaatatacagttataaaattccagtctctgctgatcagacggtgatcatctgcccagccaaaaatttgatttaggggatctttttttattgtattccatatcttttgtcctaatcttctttcctcgggagcggtatacttaaaaaaagaataaagggttaatttgttcttgatagccatttccttattaacaagtgaatgggatatactctagaccagaatctgaagaaagtatcatttccaccaatttgaagtccttattatgattccttttatgaggaaaaatatctaatgatttagattatctcattactaatcctgtatgtactttagtgtttctaatccctcactaacatttaatggattgccttatgattataagtttaaattatagtaataactcaaaacattctagtaatggaattccagtgtccccaacatacacccaaatttagatgtctttcttttgcctttcgtgcggaaaatagatttactacggcatcgatttcagacaaaccctcaccgtttggcctttgttggttctcaaattttaatcatatatacactaatgccttgtttagttgacaaaatttttggattttgggtactgtagcactttcatttgtttatggcaaatattgtccaaacagattaattaggatcaaaagattcatctcgcgatttacagacaaactgtgtaattagtttttgttttcgtctaaatttaatactccatgcatgtgccgcaagattcgatgtgacgggaaatcttgaaattttttgggaactaaacaaggcctaaattacttcgttacacctcttaatatggaagaaaacctttttatttgacgtacagtgaccgcagaaatacgattgagactgccatttacttggttgagacattcaaacgtccagccacgatgatttgacctagaccgtccattttaatttgcgccacaatataatacgataattatttcaataaagatgcaattgctactataaatttagccacgggtcatggctgctatcatgtcgagcacgagcaggagcagaagtgacacatcacacacacacacacacacagaaatgagatagtctcgaaaaatatatacacagttactccagatagctagctatccgatccacaacaatataatggaggagaaggtgctcctcgccgtggccgtggccgtgctactcgtcgtcctctccaagctcaagtctttgctcgtcaccagggcgaagcttaacctgcccccggggccatggacgctgccgttgatagggagcgtccaccacctggtcaccagcccgtcgatctaccgggcaatgcgtgacctcgcgcaggagcacgggccgctcatgatgctccggctgggcgaggtgcccacgctggtggtgtcgtcgccggaggccgcgcaggcgatcaccaaggcgcacgacatcacgttcgccgaccgccacttgaacgccaccatcggcgtgctcacctttaacggcaccgacctggtgttcgggacctacggcgagcggtggcgccagctccgcaagatcaccgtgctggagctgctcagcgtcgcgcgcgtgcagtcgttccagcgcatccgcgaggaggaggtggcgcgcttcatgcggagcctcgccgcgtccgccggcgccggcggcgccgccgtcaacctgtccaagatgatatctcgattcatcaacgacaccttcgtgagggagtccgtcggcagccggtgcaagtaccaggacgactacctggatgccttcgacaccgcggtccggcagacgtcggtgctgaccgtggccgacctcttcccgtcgtcgaggctcatgcagattctcggcacggcgccacgcaacgcgctcaagtcccggaaccggatcacgcgcatcctggagcagatcatccacgagcaggtcgaggccatggaccgtggcgagaagacggcgcacgagagcttaatcggtgtcctgctcaggctgcagaaagaggccagcttgcccatcgagctcaccaacgacaccatcgtggcgctcatgtttgtaagtcttgcttcttccgatggatccatggatcatatcacctttgttcaccatctggatcgtcgttcagcgtgtcctgagtgctgacctgagctttgtttcttctaggacttgttcggcgccggtagcgatacctcgtcgacgacactgaactggtgcatgacagagctaatccggtacccggcagcgatggccagagcgcaggccgaggtccgggaggccttcaaggggaagaccagaatcaccgaggatgacctcgccggggcagagcttagctacctgaagcttgtgatcaaggaagctctcaggatgcactgcccactgccgctcctgctcccgcggcagtgccgtgagacgtgccaggtcatgggctacgacatccctaagggcacatccgtgttcatcaacgtctgggcgatttgcagggacgccaagtactgggaagatgcagaggaattcaggccagagcggttcgagaacaccaaccttgactacaaggggacaaactacgagtttcttccgttcggatccggccgccgtatgtgcccgggagcaaaccttggactggctaacattgaactcgctctggcgagccttctgtatcactatgattggaagttgcctgatggagtgaagccagaggatgttcaggtttgtgagggtccaggattgatagcaaagaagaaaacaggcctgattttgcacccggttacctgtatcgctccagccgatgcgtaaacaagcccgttaacatatatgcttcttgggccagtatggtactgcatgggccatgattgagcgatataaggttcgatggaaaaataagttggaggatttggatggctcttgtcgctttcaaggatactgtaaaatgtttataaatacactactattcccttcaagcagcagaaggtgaccttttgggacggcgttgttgtttagtcaatgtttctagatgctaccttttacatattataatgtatatatctatataaagcatggcaaatgaaatactgtagaggtcctctagttatatagcatttttaagcagtaaatcctatttggttttcttagtcctttattttgaatccgatggtctggcaaatgaacactgctagtgcatggtatgatccagtgttgatgacacctaccctgcacgcaataaacgatagtgcaacataatcccatcgctaactcccatcgctagtaggatgatcctaacctatctccaccttggtctgaaagaacttattctacacatataaggtgttggctgtacttgatcatgttcaaaccttctagttcttatccttagagaaccaatacatatacttgatggggatgtcatccttcactataacttggatgaccgtcttgtacagccccatgacacgaattgactcaacatgcactctccagttagatctagcaaggttgagtcagtttgtgttagctcctgctcgctgcaataggaacctgaacatatatctcctacttctatcgaagatgagggagaaggggatagcgtcctctggcagggaaccagggagaggaagacaaata

SEQ ID NO: 3904 - DNA, 5239 bp, Sorghum bicolor
ttattaaccgcttggcaatgaaaattttagaaagcgcaataaatatgacaacaagcaagccaactaaacgggggcgtagagttcaaaaagaaactaaattatcacgatgccaatccaagaaaagtaagacaacaagacatccaaatggctctcgtaaattaaggaacttcttttagtccaatctcaatgcatagttttatgtcacagttatcaagactataaactaggtaaccgagccacatgagtttcatggagatgaaactcctttctcatccgatgaaactctttcatttaatgaccctgtcaagtcagcaattttgcttatgtgacaacctatttaatgtgtatgacactgtcatgaaacatacattgagattagccttacagtaaacttctctgatatttcgtccgttctaaattataagttattttaatttttctagatacattattatatatttagacacggcgtttatttaaatttgtagcaaaattatgtatttagaaaagtccatgcctcttataatttgaaaatggaatggggagtatatcttttctctacggggatcctctaataaaatgagggatgtaatgtaatatactccctccgtccacgaaagaatcaatttctaggatccgtgccggtcaaactttttaaagtttgactaattttatagaaaagagtaacaacatctataatgtaaaatgcacattacataaaaatatattctatgatgaatctaataatactaatttgatactataaatcttagcatttttttctagaaatttggtcaaagtttaaaaagtttgacttaggacaactatagaaattgactctttcgtggacggagcgagtacctttttgttgacataatcgttcgacacaaagaatttggaatttgtaatatacttttgaacggaattggaattgcgattactcatgtccatttataaattttgtttgctgttgagttcccagcttgggtacgttctccagttctccgcgcttcactgtcgaaagcatttaaacctctcgctgtccagaccctcacatttctctcgccctcgctcacaccccaaagcacggaaccaaccaaacagatagagacggcggaggaggaagacgaagacgaagacgacgaaggccgccgccgccgcgcgtagcgcacacgagcagacacccacccgccccgcaccctccgatccattgacctgttaattaactcttctttacccctacccaatccactctcccaccggccaccgcccttgtcaatactttctcggccggggtggattccgacgagcgatcgcgcgcgtattcttcccccgtcccatgtgcaggtgaccaggtgagcgattgaaccaagcttgtttgtttttttgctcttgggagggaactgggaacgagattcgttcgttagggtgggtgcggaggagcaagagatcgcggcggggtagggtaacgccattgacagcgattgcgtggacggtgaaggttggttgtgttgggtggttggagggggaagaagggaagggaggacgaacggcttgaaaaaatgtttgctgccatggctgcctaatcgactccctgggcggcgtgacgacgtcgttgctctcgtgggtgtgccggtgtggtggtgctttgcctgccgctcgcttaatttcttcagatttggtgggtggtttggtctccactgattattggtgatcggtcttgtgattttgagttgttttatctttgttttggttcaaaaacttggctttcttgccaaaaccatcttcttttgatccgccttttgcccttttggccttgttttcaaatcccattcccattttgggtttcaaatatttatcaatgttcttgcctgtcgccattggtgcccgttggagcagagtgaaaaagaaagaaaaatctccctcttactttgtgtgtgggtggccacaatggatgcttttgcagagcaggcgcggcgtctccgagcatcagaagcgccatgcactgcttccggttcgcgagctgggagcgggaggccgacgagcggcgcggggcggcggcggcgacgacgacgacgacgggccgttccctgtccgcgcggtccaacagcagcacgacgtcgacggaccgcgacgtgcggcggtcggcgtccgagtgctccctgaacgcgtcggagctcagcagcgcgggctccctgggccggtgccggcagctgtcgctgtcgtcgcagcggccggccaacgcgctgcgcgtcttcaacttccaggagctcaagtcggccacccgcgggttcagccgcgcgctcatgctcggcgagggcggcttcggctgcgtctaccggggcaccatccggagcgcgctggagccgcgccggagcctggacgtcgccatcaagcagctcggccgcaagggcctgcagggccacaaggagtggatgacggaggtgaacgtgctcggggtggtggaccacgccaacctcgtcaagctcatcggctactgcgccgaggacgacgagcgggggatgcagctgctgctcgtctacgagttcatgcccaacggcagcctcgcggaccatctctcctccaggtcgccgcggccggcgtcgtggtcgatgaggctcagggtggcgcttgacacagctcgaggcttgaagtatctccatgaagaatccgaagtcaaggtacgcttcattcacctctgacctctccgtccagatggagatggccgtcgtgttctgaatctctgacgttcttgttcttcggactgcaactgctagatttgatttcccctgttccgtaccttgaattcagaagaaacgttgcattatttaaacttctgtattagtacattgttatctaacacagcctgtgtcattaaatttatgtttgcagataatatttcgtgacctgaagccttcgaacattcttctcgacgacaactggaacgcaaaactgtcagattttggcttggcaagattaggacctcaagaaggaagccatgtctccacagcggtacgcaacaaacaatcttatcttcttcgcacaatgtacagagtttgacgagccattgttcttagtagcttctggcacattgatctcaaagacggcttctcacgttcctcctggttcctggaaccaagtagccaaccaaagagcggttagaacacagaatcattctaccattctggtccggtcaagcaattggtgcacgtgcccgaaaatctttcaaatattggtggcctcgtgcccgtggaaacaaggggctgaccatatttactactagtactatcttctacgcaagcaaatcaaagtagaaaagtagcacaaatgcaaccaggcactttcggttattttgcacgctacttaccgaaaatcacctgacctaacctttctggtcagttacaaccagctagctttctgggagctttccagttctcaacacctctacttttttttctagaacacggacttcacatgtatttcattaagaagacctttaccacactgattctaaaattctgcatcaatagtactgtatatgcaaacatatttataacccgtaaatatcaacctctgttcaaagcgtcaagttattgaaattctagcattgtatatcaaacaggtggtggggacaattggatatgcagctcctgaatacatccacacgggacgcctcagcaccaagaatgacatatggagtttcggcgtcgtgctccttgagcttcttacaggccggcgacctctggaccggaacaggccaagaggcgagcaaaatctcgtggactggatgaagccctactcttccggcgccaagaagctcgagactgtaattgatccaaggcttcaagggaactacagcataaaatcagctgcccagcttgcgtcagtggcaaataagtgcctggtgcgccatgccaggtaccgtcccaagatgagtgaggtactggagatggtgcagaagatcgtcgagagcagtgaaattggaacaccggagcatcccctgatcagcaattcaaaggaattagtgagtggtgaaaagaaacggaaaggccttgacttgaaaacaaggattgcagatattaaagctagggaggggagatggtttgcatggcaagggtgcacgcctaagcttgtgagaacacaatgattcagatcatcttgcatagttagtagcaaaagcagcaagtgacttaaaaggtcacctggagttttcttttggcaaacaagtcacagagcatgacaattgtaaacaacggtttggtgcagcccgtggaggtcaccactaaataatggataggttcacattttctgggataacaaataggctgataggtaatcttctccacaaactcggaggttccatggtttttattaagctcaagcagtcaatttttttttcgtgtagaaggcttattgtacagtttacttggttttatggagtgacttttgagatgcatgatgtggttttatggagtgacttttgagatgcatgatgtgccaaataagagtattgtagtgccattgctgcccaagtttacaggtgttgcattttattacctgcctgcagaaattccattactttatattacgtacaggtgatattatgcataaaaagagagggagtgtatgtaccaaagcgatgtaaagcagaaattgcttatgcacttcagcacttccatataaattgccagagcatgctcctggactcgtggcagattgcaaaattgctccatacatagttgacttggacaatgcttcagtagacaactgagcaacaaatacagattcactctgagaaaatgatcagactgcttcatggaattcttgagagagccacaggtgcaaacagtctagcgtgtacggagcaacacgctagcaggcctggaggtaggggcagctagcgtgttgcttcgatgtatagtgtcagaagtggcattgtgcatggttgctttgacgagctgcttaatggactaaatggctggcagataagctcaagcaaatagacaaaaacaatgtcagataattttttgagatgagcgtcctagcactgacaattcatcagattgagtcgatttattcatcctccagcagctcctagttagagcatcccaaccgttttgcataattagtttggcaaatgagggagtttgccaagtctcaaaaaaatatggcaaagatgaaaagagacaatctccaatggttttgcattaatcacttcacgctaatttcccaataccaa

SEQ ID NO: 3905 - DNA, 4018 bp, Sorghum bicolor
gtagatcatatttgctaaaatatttagtttatccatatatcgtgaagataaatatctatttatgaccaaggttaggcgttgtacttagtttccctatgtgagtttttacatgaagatttcttacacaagtttttccatgaggtaacatgtgtaatcaaggtgcaaatgcgatgcactctcttctctaagaaccactattttcactaggttttttagagtttttagtggggcatgtgatgaggacatcactccttcgaatgcacccatcgatcctccaactgttatgcaaggtctaatgactagagcttgaatgcgataattgaacctagaggtgagctcattattaagtgatcttttttcataattttgagagtagattactacctaatgatgttatcatacttaggaacattggagaagatcgagaagtacttggagagagatgtagaggtggagacgaacaacaaggacgtccaagtcaagcgggagacccaatccaactcgagtttgagtctacctaggcctccagggtcagcatgtagtagaagtgtaaaacgaacgtccaagacacatacaagctccattttcgatggtcctcctatccatggaaagttaattttataatataaccaatagctttggtttgacattaaaattccactaaattcaatgggaattatcaaaacaagttaccataaaaaaatctgccaggttgatgcatcaccgtcttttggttcgttgggccatgtatcattttagatgctattaggggcgcacctccatggggtatcatgcacccagaaactttatattgattagttatcgcccaagttaaggtttgaatttacttgagatgaacatatcttcgaccagtcaccgtcatcggttgtgaacccaactttgagtgcttgataatagatctgcaatttgtcacttcaattattgagtttcttctttcgagtttttgcttgtgttctttgttacataggcagggattatccttctcggtgaggtcagctggtttgggacttggttaataaccagagaagatatggtgctaaggttccatggattcgggtcttttgatctgaagctagatcggtgtgtaacattccaatcaaaacaagagttatgttcacttgatggaaataagaaaccccccatcctcatcggtgcatattgtagtaatcaccgatggggaagcgtctaaaacatacaaattctagtagagaaatgaggaggagaaatcataatcatagtctattatttatatggactcttaccaaactcttagggcaggacaatatatacgtggagggtccatgatgcaatcatcaacattaagagaaataaagaacaatctctctattttgtgtctatgtgctcttttgcatttatctaccatgctaactatgagagagaagagcgaaaggttctaaccactggcgacatgttttacaactgaatccacggtgaactagcatatcactcgtaccttaagcaaaaacattgaccaagtgatcataaggattaataatgattaaccacacagcatctcggcacgatccatgcatgggcgagggcgggcgggggttggcctgggtacgtcgaccgccgccggcctcacgtgaccgcgcatgtgcatgtgccagtaattcgtatcaaataacaaatgggtttagttgcttaacttgtcggagcgatggagatgctacgatactatctgtcgagttcttgcttatcagcgctagcttcttgttacttatcaacgcgtccaatagacgacctccagttcatctctaatcattctgtccacggaattcaacccttaatttgttttgacaatcgcctccatcgggtgtcagagctgactttgatggacgcggccagagaatggaagtataacagaatcttgcatgttacgttcctgaattaacaagagccgggcggagctagagcactcgagaccagaaaagcgcacccacgccacgccatgcacttgcgcttgcagcgccgatctgaatctgatcggctatccgcatgcatcagcgcaactgtcgctgcgcgcgctcatgtgccgtcgtgcccgtcgatcttgatcgcttggattcagctgtttctcgtcgacgactccaacccttcctagctatttaagaaccgattgtagcaaccacatcgaagaccaccacctttcgtcttgatccctccctctatcgtgagcttcttcctgtgtgatccatcttcacttgcactggatcctgctgttctgtttgagacgccaagctaagggtggcagtaatggagacacccaaacctctggccgtcgtgttcctcgcggtggtcgcgctggctgccgcgccgccggccgtcgacgcctggtccaggggcaccgccacgttctacggcggcggcgacgcctcgggcacaatgggtatgtacccactaccgtctaccctacccatgcgctagtaacaataatgcttcatacgtacgagtagtagatttcactggatgcatgttatgtcacgctcccatatgtgaactgccacacgtacgtttcgatcaggcggggcgtgcgggtacggcaacctgtacgcgacgggctacgggcagtacacggcggccctgagccaggtcctgtacaacgacggcgcgtcgtgcgggcagtgctaccagatctcgtgcgacccgcagacggacgcgcggtggtgccggcagggcgccggccccgtcacggtctcggccaccaacctgtgcccgcccaactacgcctactccggcagcaacggcggctggtgcaacccgccgcgggcgcacttcgacatgtcccagccggcgtggctcaagatcggcatctaccagggcggcatcatcccggtgctgtaccagcgcgtgccctgcgtgaagcagggcggcgtgcgcttcaccatcaccgggttcaaccactacgagctggtgctcatctccaacgtcgccggcagcggctcggtggccagcgcctgggtccagggcgccaacaccaaccgggtgcccatgagcaggaactggggcgccaactggcagtcgctggccgggatcgccggccaggcgctcaccttcggcgtcacgtccacaggcggacagagcatcgtcttcccgtacgtcgtgccgcagaactgggtgttcggcatgtcattcaccagcaacttgcagttctcctactaactacaggaagaatatataaatatatatagcgctcgcctacctactaagcctaggctcggagcgagcccgtctctttggatagcatttcagtagatagttagcttggagaaagctttctgcctacagcattatgtatgcatgttgtgcaaatcttttccttcattttgtatttgtaatgatcttggtttagttgtgggaagtaattaagattttagtctctatgtcgggccagctgcttgcttgccccgtagaaccagacatacaaaaatgtaaggtgtttcatatttgattgaaaaatatttagactgcgtgtgataagatcagttgcgcaccgaccgttgttcaatgactgatgcgaaattaactagagtaaacatgagtcagaatctctaccgaaaaccagagctttgccaagtgtcatatgctttgccaactgtcaaatgttgtcgggcacttggcaaagagattttttgccgagtgtcagcactcggaaaaggttggctctcggcaaagaggctctttgccgagtgtcgagcactcggcaaagcacaacactcggcaaagactaacggtggtacacatcgccaccctttgccgagtgccacagtttgacactcagcaaagaggctctttgccgagtgtcagaattgggcacttggtaaagattttttttgttttttgcctctaaactttttcttctggctttacactttattttgaagggcatgttcaaatttggcacagttcttgatatattttctatatatttttaatttattttatttaaatatatttttgaaaatggaaaattgaa

SEQ ID NO: 3906 - DNA, 3361 bp, Sorghum bicolor
catgatttgattcactgcaatgcaaccaagttaaacatgatagaagcaatgctcacaacttacagattactaatcacattggactcaggtgcactatgtgattttaataatcaattgttagcaaccatacgtcaaaaagcaaaccaaatttagaaaaggatgccatagaaaaaagtaccataaccaaacttgtctgattctctagaaatgttggcatacattttatcagtccatgtatttttgtcccgtagaggataactaaaaatctataaagcagcccgtctaatgtatttgcaaaactagagcttaatttcttccacagtttttcctagctatgagaaggagaaaaccactttaatcttacctctcttttttaaggcgtgaaaagcacggctgtatataacgcgctatgcaggactgtctgctatatatacctatcttgatctctcttgagctactatgtatgttgaaaaaataatataagcgcatggtcttatcagctaaaataacttgggaattgaagcacaaaattggttcagcgtcagctaaatcaacaacctacaccagaagagaactccaacaagtactcttaggtacggctattaatgttcttaggtacgaccattttgtgaagctaactccagattgccttgcatgatggcatggaattcaatcaaatgatcacaaaagcacatgatcgatgcaaaacatcatccaagcatggccttgcacatttcaatatgattgattcaacaacccatattcttgtggttgtatccgtccaagatgaccaagcaacgcccctaactaactcattatcagggtccatggcttagctgaatttgtcagtaacggtggatttacaagtatgagtcaaccctaataaattaggatttctcatagagtagtgcatgtattcattactaggtcatgatctgcatggacttgattacttgaaaccctaaattgtttatttaccggatagctagattaagaagagcaactccaattttgtcaaaaaaagaagatggagcaactccaatgggcagctcgctagagaacaataattagctcatgcaaagttactcccgttcagaatgataaatatattttgatcaggtaaaattcaagttttgtaaagttggaccaacaattagtcaaattatatgtaagtttagaacttaaaacttatgtcggtattgctaccctcttaataaaatatggtcatcagggaaaaactaaaacttgtactggtacatttgtcttcctagctagcagacctttaaaattatattgatttctagcaatatatagcatattgtaagataaaatatgtgtcaaaatctattgtgtctgatcaaaatgtgcttaccatttctgaccagatggagtaacggccaggcgtgtggactgatgggttaaggtagttacaacttacaccatgagcatgtatcggtgacggtggcccatgtcctcgtcagccaccaacgaaacaaattgatgttccagagcggttacaatgttgatcagagtttcaacgaactaatgcgtgtggaaagaattcaagttagttgatagttcgttgctaatctatatgttatataggctaatcattagcatatgaaaacgtagataaattaaattaataaagaaattgtccatgattaattccatccccaaagtcaggccttggagcttagctagtgtcgtcgtgcatgaggcaccttgcatgcatgcatgtgcttgcttcgatggaacacggtgaatttcctttgctctgactaaggtacggtacgtactctgacgcgctcaaggcacgaccatcattccctagtcaatcaacatccccacggccccaccgcagctagcccatctccactatttaagcactggcctgcgccaatctatgcatctctcatctcgtcatcacacaagaagtccagaacacgtatacggttgatcgtctctccattgccaaatccacttcgatcgtagtagtcatgaaaatcaacaagtccctagttttgtgcctatccttctcggcgtgcctagccctcgccgccgcaggctggtctcccggcaccgccacgttctacggcggagccgacggctctggcaccatgggtaagcaagcagctcttaataattacacacacattgcatccatttttgcgcaagagctacgcacattttgctaactgcgcgcccatgcacttattgccaatgcaggtggtgcgtgcgggtacgacaacctgtacaacgccgggtacggcgtgaacaatgcggcgctgagctcgacgctgttcaacgacggcgcgtcgtgcgggcagtgctacctcatcacctgcgacgcgtcgcgtccgggcgggcagtggtgcaagccgggcaactccatcacggtgtccgccaccaacctgtgcccggccaactacgcgctccccaacggcgggtggtgcggcccggggcgcccccacttcgacatgtcgcagccggcgtgggagcgcatcggcatctacagcgccggcgtcatcccggtcctgtaccagcaggtcaagtgctcgcgcaccggcggcgtgcgcttcggcatcgccggctcccagtatttcctgctcgtcaacatccagaacctcggaggcagtggctccgtgggcgccgcctgggtgaagggcgacaggacggggtggatccagatgtccaggaactggggcgccaactggcaggcgctcgccgggctcgtcggccaggggctcagcttcgccgttaccactaccggcgggcagtacattcagttctggaacgtggtgcctaggtggtggcagttcggacagacctacaccacaacccagaatttctactactaaaacctgcaatcagcgctagcagagttcttggatcgatcttcctgtcgctatttcttggggttcggtcaaatcgtaagggtgggagcctgggaggtcctcttttgttttcacgactgtgcctaatggacactatttcattgagaagtatatatagaagggtgggaggtcctcgtggcctgctctcttaatttctttcaactttgtagatatatttcctgaattttagatatttctttcaacgtttgtagatatatacttactatatacactatacatgtatatgatttccgatactgcactccacatgtttcagtcagaaatcctactggctaactacttacgcagttagtttcggcatcacttgccttctgctgctgagccaccatttcaaggattgatggtgttggcgccgtgttccgctgtcaggcattcacatctgcacagttaaaggaaccattatatctggtatctctcggcagaactctcatggcaacacaaga

SEQ ID NO: 3907 - DNA, 12108 bp, Sorghum bicolor
tgcattccacttaccacaaagcttacgcaaaagcataggatgggagcgagtggccagtacaaatcgtactgaaaattgtttagcaggttttgaacgtggtccacgacgatgactacggagaatagaaggattaggtggtctcgttcctgcgctcaagtttggttcggagatgaaggctacgcccgctgataaactacgccgactctgatgattgcccgtgaaggaggagccttcaccgctgacgcgctacatcaactgtgatatagaccgtgtgtgtttccgctagaaaaacgatgtaataggcttgttgaccaagagttgtaaagtaaatgtgttgtaatcttgtttttttcatgatgtatgactatgataacagctgatatatgataatgtgatggctcaatttttgaattatcacattataattcgaatctgaggagaaaaatctaggtagtttcacgcctcatcctagcgaccgcgcttagcgactgcacccgtccccaacgcttcgtcctcggctcctcacgcccgcgctcgacgaccacacccagtagccacgcattcacctgctcgagctccgacgagctagccctgatgcctgcttcggcgactgtgtgtgcggccgtgcacccgcccgccatccccacatgcacctccatgacattgggggcagtctcgacctccacatgctagggtctaccggtggcggatgggagccgggagaagctccattttttggctccgactcctcaaaactgctcctctcatcacaatttctagagattcgtggtgggagcactttggttcaagatcgtttaggccttgtttagatctaaaaactttttagattttgacactgtagcactttcgtttttatttgacaaacattgtccaatcatggagtaactaggcttaaaagattagtatcgtgatttacaggtaaactgtgcaattagttatctttttatctatatttaatgttccatgcaagtgccgcaagattcgatgtgatggagaatcttgtaaagttttgggtttttgggtgcatctaaacaagaccttacttgttggagaaaaaaaaaatttcgggagctgcctaaggagccacaccaaacggactctaaaacttgttcttttgtttcctataattgaaaaggattgggacatctaccaaaaagtaatgcacatgaaggggaaatgcttagtgtaacaacaaagtcgcaccacgcctttttacatattaaaccaactggaataactagaccaccacttgctaagctgctagatagtctaacacgaatgttttcggttgcgaggatccacggagaatcagaatgacattcttaactgtgtggtgttgggagccgagtttctcaaaatttcgatgtgtcttgacctagatacgagcatgatctgttcgatcgcgaaaggagcatctaggcaaggttttcaattccggattcgagattttttcgccaccatccaataattatcgaaattcatgtttttttgtgcaatttcgttgaaacttttttaaagtctttaacgagaaatataattttctaaaacttttagctctaaacaaactattaatatgatttatgatgtacatctattaagtaaaaaaaaatacacaacataaataatagaaaaaaagcacatgcagttaatacaaaaatttagatttatcttttggccacccttaaaatttttataaaaaatcatacttcatgtttaagtccctaaaaaaatacaatgaaattgtagtcgaatttcacggattcaggtggtttagggggtgtcccaaaaaatttaataccaaaatataaaacccttcccaaaataatcctttggaaaaatatgctcatcatattccaaacggcatcttataaccgttgcatcaaatttatacatagtagtactagcgtatgaattcataattccctccccaaattggcgccatccaatttatgacgcccaaaacaccagctcatggtcatggcatcgtcacctccgtcctccgtccggctggtcacgagtagtctgtattcccttcctgtatcgtccgcttggtgtggggcccgcttcctgttgtgctgaagcagcctttcttcttggcactacgcccgcccgcccgcccgcccgcagcagagtccactgtccacaggcaaaggcgactcgatagggagagacagagagcacacgggatgggttgagaaacgagagatggaggcacaaagtgggcagcctgctggtgctggatcttggcttctcgccgccgccgctcacttccgctccacctggtatgcccttcctccccgctcccccgtctcactagacagactctgctcgctgctccaggattggactggattggattggatctttgcttccttcacccgtgccgtgattgttgagtactacccgcttatcgtatttcttgacctgtgtgttcgcgcctggatgctccaaagatccatcttttgctgccgctgctgccccgtgattcggttttgctgggaattggattcccgggaaatggttggtgttgacgagtgggtttggttggtggagcagcagccagcaggcgtggatcatgtgatctactatatcctctctttttcttcttgctgaatggcgcctgactcgcgagattttgcttccaaaacccgcttcttgccttctgcgctgcagcatcgtgcctagcagaaacatcgcgcctcgatggtcctgtcttatcgggaggtttcgtttctggggaaacggattttgggttctgttggtttcctgtttatttttgcatataaaaaaagaaatccttgattggattgctccccggttctattggttaccttgcttatcggttagttcgacagaattgtgattgctctttttacgtcacacgaaggaggcgttgcactatcatttcggtagcgcttactgtgcatgcacaattttttctcgtcatccagttactgagggccagtgctatctttttcttggctccagtttggtgcagtgtgggcaagttatctactagtagacagtatcttcgggccagttcaagactaaagacttgccgctggtacgtactaactcatagtcataggcatggtgtcctttactcctcttcatcattgctgttgataccttgcttttttgatcttttcaagtcatttctgtttgtaataactatgcaggtgctgattccgttgatcccacaactgaaaagtgggggagtcgacgaccctcctggttttgaggatataagatattgcatctctgcattgttctaagtgctgagaaaataaggcattatttattggttggagtagtctgtgttgctatctggcaccaatggcgactgtggttcgtcatgattcaaggcagtactcttggttgtgggttagccatatcagccccaagaactcaaaatggctccaggaaaatatcaccggtgagttcattactgtcttcacttcatctttagcgaagagcatttttcctacattacttcgaggcaaagcttacagtcagccatgctcatgctcatgcattgtttatgtcctttctatcatgatattcctatcattgttctacaatgtatataccggtcaacctggaaattcaatgcagtacacttattatttagttggaacaacatttctgaatttctttgctcatgatcagtctttcttttgatatgaatctttctgctgcattggactgttttctcaatgtcagtctttcttttgataaaaaattgcacatatggtatttgaatttggaaatattttcaaaatctgttaacactattttcgaaactgttggccatatatttgcgtaagagtttccctttgatgtgttaaagaattctctggagagagtttctgctgcattggactgttttctcaatgtcattctttctttgataaaaaaaatgcacatatggtatttgaattcggaaatattttcataatctgttaacactaggtcctaaactgttgcccatatatctgtgcaagagttttcttttgatgtgttaaagagttctctggagagaggcatttttattggtccagttaaactgaagtctatttctgttgtaaacacttggacggcgtaaatgtttcgtttgatgccttttttttgtcactgtggagtaactaacattggtccatatatgttccttttttcataactatggaatcaatttgaagatatggttgcaatgaaaggactgcatttataagtgtggtccatgaactaattgggtcttgttttgtgcaacagacatggacacaaaggttaaagcaatgatcaaacttatcaatgaagatgctgattcttttgcaaggagagcagagatgtactacaagaaacgtccagagctaatgaaattggtggaggaattctatcgagcataccgtgcgctggcagaaagatacgatcaggccactggggcacttcgccaggctcacagaacaatttctgaagcatttccaaatcagatgccgtcaatgtcagatgagtcaccctctgctttcagccaagagatggagcctcatactccagatatgtctactttcacacgtgcggcatttgattccgatgatcttcagaaggatggagttggtttgtcaccacaacatttaacctccaagaggaatggtacacaccctgaggaaaccagcgcattttcaagtcgaaaaggtctaaagctgttcaatgatttgtcatcgagtggtgaaaatgctcctcgtgctggttttgatggaaaggtacggaaaggcctaacttttgaaagcccagaagttaaagggaaagatgatatcagcaacgagatggcaaatttgcaacaagaagttgcaagactattagccgagagccagactctgaaacagcagatgttgtcagaatccgagcgggcaaacaaagctgaaaatgagatgcaaatcctcaaggcaacagtattgcaattaaatgctgataaagacacatcacttatgcaatataatcattcctctgagcgaatatctacattggagtccgagctctcgaaggcacaggctgaccttgagaagttaactgatgaaatggctgcagatgtccagaagttaattaacgctgaaacactcaatattgctttacagtctgaggctgagggtttggatcagaagatgaagatgcagcaacaagaactagaagaaaagcttaaggaattggagagtttccgttcaagcttccaggaggagcatgaaaagcgcatgcaagctgaaagtgctctactttcccaggggaaggaacttgctcaatctcatgaagaagtacagaggttggctatagaaataaagatggcaaatgaaaagttgaatgagctcaagcagaccaaggaggtccttgaggacactgtttgtgagctgaagaaggatgttgagcgccttacagaacaaaacctgtcctctgaggtgcttatacagaaacttggtgacgagataaatacactcaaggattcaaaaaatgaacttcaaagtgaaatacaaagccttaagagcaccatttcacagctaaacactgagaagaatgcagctgagcttcaacaccagcagtctgtggagcaagtttcggtactcgaatctcagctgtcaaagctacagtcagagctagatgagactgagcagaaagtacagttgctgacacaagatcttgaaaagaagaaagaagaagccgacaatgtccatttgaagctacaagatgaatgccataggcgtatgcaaattgaagcaactcttctcatgacagagggtctgcattcccagttgcaagaagaaatgaaaacactgacacaagattttgatggatcaacaaagaagcttagtgagttggaaaataataagttagacctggagagcacactgaaagaactgaataacaccattttaggtttgaactcggagaaggatgcagcactccttcagcaacaacagtctttagagaaagtatctgatttggagttagaactctcaaagatgcagttggaaatggagaagtctgaacaaaaaattctcttattggagcaagaaattgcacggaagaatgaaaatgtcgacagcctggagataactttgaaagatgaatgtgagaagaggctacaagcccaaacatcgcttgtgtcattggataaaatgtattcccagtcacaggaagacgttagtaggttgcagatagagattgagaagcagaatgtcaagttgaatgagttggagaacttgtcatccgagcttaacaacaccatcctactgataaacactgagaaagatgctaccctccatgagaaccagcagtcctcagcgagaatatcggatcttgaatctgaactcatggccttgaaaactgaactggagaatgttgaagggaaagttcagatgctagagcaagaactcatatctaagaaacaagaagcggattacctccaaattagcctacaagatgaaactcaaaaacgagttgaaggtgaatcatctcttcttatgatgacaaatcttcactccgagtcacaaaatgaagtgagagggttggcactggaactcgagaagctgaatggtaagttaagacaggtggagaacagtaaggttgatcttgagaacattgtaaccaagcattcagaggaaatccatatccttcgtgaacagaatctttctactgagcttatgataaaggaccttcatcttgaattggacgcattgaaggatttgaatgtgaaacttcaggcagaaatggggttacacataggtgaaaaagaagcacttcagagagaatttacttctcaaagggaagagaaggaaaatctagaggggatacatcacactctggttgatgagatggataccctaaaaactactgcaacaatgaaccagaagttgattgaggaattgcaaattacaaactcaaaactgaaggaggtgtgtgcaaggagtgaggttgagaaggcacttctctcggaaaaacttcaagaggtggagaagctatctgaagaatattcactcttggagaactcactttcagatgcaaatgctgaaatggatgcattgcgggagaagataaaagccctcgaggcttcagaaagctctctcaaggatataatttcctgtcatgtttctgagaaggctgttcttgtatcagagatagagatccttggtaaaagattatctgaggcttcagagaagaattctatcttggatatctcattatctgatatgaaaatggacctagaagatttgagaacaaagctgaaatattctgaagaatcctgtcaggctctccttgcaaataactcagctctttctggtgaaatggatgcattgagggagaagataaaagcacttgaggcttcagaaagctctctcaaggatataatttctggtcatgtttctgagaaggctgttcttgtatcagagatagagatccttggtaaaagattgtctgatgcttcagagaagaattctatcttggatatctcattatctgatatgaaaatggacctagaagatttgagaacaaagctgaaagattctgaagaatcctgtcaagctctccttgcaaataactcagctctttctggtgaagtggatgcattgagggagaatataaaagcactacaggcctcagaaagctctctgaaggatgcaatttcttgtcatgtttctgaaaaggctgttcttgcatcagagctagagatccttggtaaaagtttatctgaggcttcagagaagaattctatcttggatgtctcattaagtgatatgaaaactgagctagatgaactgagaacaaagctgaaagattctgaaaaatcctgccaggctcacctaacaaataattcagctctttctgctgaaaagaaccacctgttctctaaggtacatactgatgtaaacctacatactaagttttttttcttattgaagtagaaattaatattgttacactgtcataatttttgaactggtctcatctcatgtccttctgtacatacattctttttctcatataatgtattgtgtaaattctttgtttcagctggagagcattacattggccatgaaagccctagaaggtatgcatgccaatctggaacagaagcactcctctgtatccagagagaaggattttgcacatgatcaagtaagggaactgcaggatcagttgagaattaagaacgaggaatttgaagtgtcagcaaagtcacatcaactgcaagcaaacagctatgagaaacaaatttcttctctgcaagagaaaaaccattatatggaggaggtgcttcaacaggaacagcagaaaaacataagtgcttctattagcacagttattttggagaactgtttggtcgatgagcaagacaagaaggtcactcttttcactgaatgccaaaagtatgctgcggaaaatcattcagccaatatgttagtttcagagttgatggaggaagctagatatcatggggaggagagaaaaacattgctaacacacaatggaaaactgagggaagggatttcaaagcaaatgaaggttctgaatatctgcaaagatctaggacctgctgatttagctgaggacgaagttctgttgcagactgtttcagatgaaaccattaacattctgagacttagggatgaaactgaagatgcgaataggctgatggacactgagctctcagttctctcagtagttttgttgcaagtagggatggagctcagagacctgcacttacagaagtgcgcccttgagaaagaagtggagagtggagaagcagagtctctttctttgcaaaacaaaaaccaacaaatgttggaacagaatgaacaactaaggaatggattgcaggaaagcagtgaaagggaggaggtgctgaaaactgaagtattcatcatacaagagaaactatcttgcttgagggagtcctaccagacctcacaagatgaaatttccaacctgactgaaaaaaatgagtccttgtctaaggaatatcagtccttgagtgggaagtacaattccttggaagatgagaatgatactgttcttgaagaatgcatgatgctcgagaacttgtgcctgttctttaggggacataataatgagattgtatctgcattggcttctcttaccgatgagatggctttgttgagtttggctaagggtgatcttgatcttaaagtcaatgaactgagcagaaggtcagtggtgcttgaatcagaaaatagccacttaaaggagtatctcatctacttggtagaaattctcagaactcgattagtcctttcagagtttgatttggacatcaatcaaagtgtctgccaggagttggttgttgaacttgagaattgcatgacacagttggtgcagaaggatgatgagctaatggaagcagaagagaaggttcaactcttgcaagaaaagaaccgggaactctgtggagttgttgggtctcttcaggttgcgattgaaggtgctaaagtggtgaaaggagaactggagaagaaaatcacaagactgattgaacagtgttctagcaaggatgacgaaattttacttcttcaccaagacaatgaggcattgcaatcagaggttgagcagcgtgagagggaatttgttgttctgatggatgatgcaattacctcttctgtgaattctgcggtttatgaagaaaaagcattcgagcttatgatgaatggtaaagctacagagaatagagcaatatccctaaaggagttgctaatgaaggagatctcttcccgagatgctcatgttgaggagttgcagaaaaagttggctggcattcaggaagaacatgcagaactaaaagctgagttgaacacacatctagctctcatagcatcattgtctgatcatgtcagtgtgctggaagaagatacccgttctctgtcaaaaccatgtagtacagaaggcaaagaggtaagcttctttgtttgtccttattattaactaggcaccctttttgaaatctttcatgtagttaaaacaattctattctttcagcaaataaaaatttgaccatttcttaatacttatattacttgattgtaatcttttttttttggcaactgctcttccttgtagcatcacttattatttgttggatatttctactatggttcgtgcactacatggatgtgacactttatcaggccacctccagtcatatatgctatccttccccttcttgacaagtgatctttgattgttacaggaaactgcatgggtacatcatgtgcaagagggcaacgacgggctggaatctcattgcttacccaaaggaactccaaagttgcaagggttgattgcaagaatagaagcacttcaagtggttgtattaaatgctaaagatcgtcaagatcaggagtcagccaagtctgcagctaaattggcagcagcaagtacagaaattcaagagcttaaagcaagaggcagctcacgcatggaggcaaaagaaatatattctgaccttgagaaacaagatgttgaggtctccaaagggaagcaagtccagatcatgaaggatattgagctggacaaaatatctacttgtccaccatatggtgctggagctgccctctatccccttggaactggtgcaaatgttgaacttgatgacgatatgcttcagctgtgggaggctgcagagaggagctgcaagaacgaaacggccaagtcctcgtcatctgagcacgacatacaagcggtcgaggatctgaagagtgaatacccttcgtctgagctagtaaggggaagggaccttggaatcaataagctagaagtgtcaaagggagctgtagagcctcatgaggcgtggagcaagaacgtacttgagaggctcacttctgatgctcagaggctgttgagcatccaagcgagcattgaggagttgaagcacaaaatggaggggccgtcaaagggcaaatccccaatgaattctgagtacagcagtgtgagcacgcagctgcatgagacagagggttttgtcttggaacagatcaatttcaacaacaaattgaccaggaaggctgagaactatcctgcgttgtcagataatatgaacaccgagcgagaagggtattccagcaggaggaagatctccgagcaggtgcagaaagggtcagaaaatgtggcaaggttggaactggaacttcagaagatacagtatgtcttgctcaagcttgaggaagagcacgagtacagaaggctcaaggtctctgataagcgcacccgtgtgcttttgagagactatctgtatggaaggaaggaccgtggtggcgggcagaagaaaaagaagaagagggtcccgttctgtggttgtgttcgtccgaaatcaagaacagagccgtaaacttttttgttgtcgcgggccgaagaaatcgagatgctggcacctgcacctccaagaggttggttagtgtcacctgtgcattggaagaggaggtggtgttcctaggatctcctttgtaattgagctagcattttcttagtatcctaagaagcttatgtactaaaatttttggttccatgtctaaatgaggccattctagctagttccatgtctaaatgaggtgatatagtatcaatgcgttctctttccatctattatatagcacatgcacatgcagtgcattttacatccaggttctgactgcagaagcagtgcatttgataaccgaaatgctattcgagattcctttggagtctccgaatctattgttcgttttggcaacgccagcactgggaatagttggagctgcaatttgcatggtgctctgaagtctcagaaaagggttttctggctttgcaaatctgaaaaagtttgtctatattcaacacgtgcaatcatttttatattactatatatactaatagtggaacttctttggacattattatattactatatatactgaaaaaaataggattagcttttgctattcttccatcttcaaggcatacaatcagacatactgtagatcatagtgtcaatgtcaatgatattcagaccatctcgtccggcggcactacagtttgcaaagtagttgcaat

SEQ ID NO: 3908 - DNA, 5340 bp, Sorghum bicolor
ctagtagcataccgtgttttgtgtctgtccgggaattttcaaatgtgtttaggcgcagtgtagtttcttctcacgaatttctagaccttctggcattcaaacatttttaaggaaaactttagactttggatgctctaatttttttcatgtaatctaaaacttttgggcctatttggaaacactttttttttgcagcagctgctgcagcaaaccctcacatgttactgtactattactgttgcaaaatagtgtggtaaaaaacaaccatatttaggttcatcatattctaatttatctatgagattttgtctaaatttttggaagcttggatgtcttcatggtttgaatacttattttggattcttcaaatttcttttaacatgaaattaaatttattttggagtagaaattttaaccctaacctccctcgacctaaactcttcatatataaatacatctcggtaatatctttaaaatccctgttgtagatctaaaatcgattcataccttgagtcgccactcatagctctatagatctaaagttgaagtttggagaactccgatgaaccataggtgagtatggatacactagagacattcattacatgatgacgatgataatcgtatatgcagacctgacacatttaggtgatgcctttaaaatgtcaactcaaacatctaagattagagtaactctaagagttcttttatatcttcttaatttataggaatagagattttagtaaaaaaaataccctctaacggtctctttaattacatctccaaatatagacatcctttattccagatttaccaaaaatatagagctaaggacgtctcttaaaaatgtgcttgaaaaagcaattagagtatacaaagatatagaaatatttttttacttacatgactctccaaattatgattcattattaggaagacatgctcatgtcttggtgaccatcctcagtggtggtttcataacccaatttctaatataaccatattttggaaacaatgcagaagaattctatccctatgaaactctctctactcctataaaacttttatcatctctctttattaatatgataccatatcaacatatttagaggatgtttggtcggaggtgttaaagtttaacatgtatggtagcgtttttattttatttgacaattagtgtccaatcatggattaattaggctcaaaagattcgtctcgtaaattattctctaactgtgtttttagtttcataaatagtttatatttaatacgcaataaatatatctaaacatttgatgtaatgagatttaaagtttaccacgacgaaccaaacaggacctagagcatctccaagggttttgcatttgagtaatttgccaaaaagctccaaaagaggtatccaatggttttgcatttggagtttacaatttggacaacttggaaaatgagagagcaaacttggcaaaaatgccaagatgtggacgactttgcaaacccgatcgcacgagcaaagtcacgcgcgagaaaagcgctcgcgcctggagaccttttatttttatcctttgccaagtctaaatgccaatttccttagagatgacctacttttatcctttgcattttgttatgggagtttacaaatagcaacaaatgccaaatcaatttaccaaaacctttggagatgctttaatgtctatgaaactctaataaacccccttgagactggcataacgtgctgggccattgattccagggccaataggtgggccttttctttagctgtacgtctcggtctcggcccaataacctcacacatccaaaaggcagcgccattttcacgcaagccggacgcaacggacttgtatcaactgccactgcgaaaccctcgcctcgggtccgacgccgccctaccctacttccccccatcccccccacccaccccactcctccctccctccctcccctgctcgtccgcccccctccgccctttggcatctcactcgctcgccgaacccaaaagcccccgcccacctctacgatttccccgccggcggtcgtgcagggatccccgtggatcgacgagccgccgcctcctcctcctggccgctaagggtgtttccccctggttttcgcgatccggaggtggcgagattcggcgagaaaggtcagatccggcggcctgcttcgagctacaggttcgttgggcttgagggggtgtggtcgatggctgtccctttcggttatgcttgcgagattcctgatcggagatttccgtgcgtgcgtacagtgtgttcgcgggtggatctgcattgggaagtcggtgattcgcgtgacggagacgacgtcgtccgtggtggctccggtttgctcctccgctctagatctggaaggtatacaccccccccccccctaacttcctttttctttccttctaatgaaagtctctttttcggccatctcatactttgctgctgtatgctcactttactctcatacgttgctgctgtatgctcactatattaacagtgttcatttttgttgtttggttctagttcatgataatgattcttgtgtacacaaatgcatctttggtctccttgtctactctgtttgcttttcgttacaactgaatcatagtaggtatcagcaatacttcctatatgtgtgtaattctagggagacgccaagagggcaacagttaccatcgatttctctacgggtttattctgacatatgcacattaagggtgttctttgttttggttggatgtggttgtcttacgctgaaagtgtggttaaaagtgcagcttctcatctccttgcttgccttgtctgtcttttatcagggctttgggacatctgccgctgcaagcagcctgaggtgtactggaaagcgaccatctttcccagacattgtcaccacaacataaccggacatgcaggctcttgtgattgtcccggaggagcgcaaccaccatcaccgccaccctggtgcccgtagcaagtcatcgggtccacacttttcatcaccgcctacctctcgtggcttccgtggaatgaactgccggtctttccactctggtggctgcgtcggtgttctcccatccccaccacctccgcctgcccgcacctactcatccccggagcccaagacacccaagcagcagccacgccatggtggcaagcgaagccggcccatttccataagcccctccacatctcctcccacccattctgagctgtgggcgggcccagcattctccaactcaccaccacccagttcgctgcccatccccaaattctccctccgccagaagcgcagcatctctctcgagctgccaccagttgagcgctctgatgatgtggaggtcaggcagcatgctaaatcagcaccttcatccccagttgagggatcagggtatgacttcttcaatgatgatgcaattgctagtgctattgcaacggagaatctgaggaggattctccagttggatatcactgatcattgagtaatgggaggatggaagggtggttcctgtgtacataggttatctttcactgacagctttctacttgcattggtagggtatagggtaacgatgatagatacttggtggttgtaagatatggtcaggctcatggtggaggtgtagcttgtaggtgaagctacttcgaaagcttagatagttttagttgatactgccctgttaggtgttgtgaaggtgggctctgggttgaggatggccggtggtgtgcagggcagttatagtattcacctatatgcttccttcatctcttaggtgtagggtttaaacctcttaaaacagcatcatttgcatccatagttacctgttctgaactgacggtggtactttgccatagcagcagcctcattttctgcttcagttggttcatatatggtagaataacattcgtcctaacctgaaaccagatgtcaaatatttgtagggtacctgcatcttgcatattcttgcatacttatttccttctgtcctctagccaactggctctagatgtccttgcttcctggtgctctgcaaagaacgccattatctcctcaccagctcttctggtttttggtaaggaagaagctgagtgaaaggtggaagaaattctgttgtcttcctcttgttccaacactaacttccctatccagcccttttgttgcatatctggcatataccatgtatccgttacatctccatgcatttatgttcatctagtgcccctgcattgcatctagtgcccatagtcagttagcatgctcattcactcccacttcgatttcacaaaccagtttgagggttctgattttcttcaagagtcgaaagatactgagagtgccagattctggagccctgcatgcatacaaaccctgatgaggtaactatttgcttatatttttgtggctgtttggttgaatgctggttccaccattggatactgatgtttgatttgtgtcttgatgtaggtttggttgtgttgctcaatgttctacctgttctgtagttacagaatgcccaagctcctgctggtgttacatgcttttgtagcccagtagttttagcactagcagtgaagcagcaatatctgaacttctggaactagactatttagttctctgaaatgctatgtttggttagttgtcttttgttctggtgttatcagcagatgatactatgttgtcagtttaatgtcataatggctctatgctgttaactagttcatgacgttagaactagaaactataatgttgctttagagccaatagtttgtttaaacacctctgggcttataatgtttcagcctcgccatctcatgtcagtctcgttgaggtttattttgattgttagttcgtctgctgagttttgcctctgcgtatccaatagactagtgaggcggtgatatctattgtggatggacggtcaatcacaccatcacatactaaaagcgagtgatgtattccttgaccatgctattctacttacgtcaaacaactaaatgtatgttagccgatgtgtaactagatactctatccagagttttccaaagatctaaattgtctgaacttatctgcccccttgtcgaatgcgtgtttggttgaggtgtaggcgttcccttgtatcttggctcagctcgtgtgtgctaaacctatttgacccctgcagtcaaaattcagttcgtgcgtgtcactattgggagcatgtttggttacgtgaaattgaaggacgtggtatcatgtaatgtaacgcatggctggcttcgttgtggtaaaacaggtcaggagtgcattacagtgatggcttttcaaaggagttgaagg

SEQ ID NO: 3909 - DNA, 6373 bp, Sorghum bicolor
aatacctatagcctccaacagagtacccatatagaagacccattttgggtatcaggagaggcataacccaaatttggatatcctctctcctcgagacccatttacagagagtgttgtcttttaggtcttgttgttggagaagactaataggtatggaaccttttacctgtagcgctacccaaaggacaaatgggtcttgtattttgggtgacgattgttggagatagtcttagtgcgtggaccaccggttcacacaccaacaagatctgaactttcaaggtaatcaccgtaggtccctaaacttagcaagcggtgtcatccctatcaaatatagcctaacctactttatgagctagcgtggcaagctgactgtatgtgagatgtggatccaacatatgttaattaaacaatcattatttatataatatttatcatgaaaatataaattatataaaataatttacattgcaaaaactaaattaaagtattaaataattaacaacaaatatattagatttaaactaaaatagaaaagcactaaatatttatgtatcattaatagtattaaaataatatgaaaattcatagagtattaaaagttttctctattaaaattacttctaattttagtattattttaaagctttaatagtagtattatagtaatagaacttttaataatcgtattaacagttttattagtattgctatagtattataatattaataatagagaaaagttaattctatatcctgctattaaaacttttaaaatagtactaaaattagaagtaacttttaattgaaaaaacttttaatactataggtaacttttaatattattatatttggacagggatgacactgcttgccaagtctatggacctatggtaatcaccttaaaagttcagggatcacgatgatacctccgaccatgtttagggacctacattgattaacttgaaagtccagggatcttgataacattgctggctaagtttagggaccaatggtgaattttgcttgtgatctatttagctgtgtaggaaaaataatttaaaaaatacattgtgaaatgtaaactatcgtatcgtttgtttggctaataagccatggcagaaagtagtgttggttgatttattgtgagagaaaaacactactgaatgattgagtgattcggctgataaattcaagtgaatgtttcgcaattctacgagatttatgctttggtcttggtagattgattccaattttatgattttttcgcaatgcgatggccaattctattaatcattggctccgttcgtttagcttatctgccgaatataccaatcattcaataatatttttctctcataaaaaatcaatgagctataatttcagttataactttttaaataagcgctatgaattattgtttggtaatgtaatagctatatagtttgtaataatggtggcacaacaactgcaggaatgtcctttatctgaacaacagtactttgtatactacgggcttgtttagttcctattttgtccaaaaaaaaataataagtttagaccatgattttggataatgaaactaaatactatgcaaattttttaataaaaagatgactattctctattttatattttggcctacaaaaaactaaaaaagccaaaagaatcttacgagaccctaataaaaagaataaattctacattttagatgtaactaaatgtaaccctaaatatttggtattttacattttattgcatattatggagaactaaacacgccctcacatagcagaggtaaactggcactcgtaggaacgaactaaaaagattctcttttttcttttttgcagaagggacaaaaaaaaaaaaatctgtcaacaatctcatcgcgcttttcgttggcagcaaaagtgcagttaccccaatcccaatcccgtggccccgtgacccttcttctctctataaataaacaaacacaacagccttcggagaagcaccgtgcaccactggagatcgttccttccttctgctatcctctccgcgtcttggtcgtctcgtcttcctccctccgtcccttcctcccccaacagaggcacagagcagaggtaaacccgccgaatcccctgcctagatctccttctgtttgtgtgcttccttgctccgtcacgccagctcgtcccggcccggtggctgcctgcctggctggctttggttctgggttcccggctccgcgcggcaacagctccggccaccgggcagcaatggcgccgctccccttgcatgcacgatgcggatgtgtctttcggctgaactgagtccacgcatgcaggttttaccctcggttgtgtcggaaaaggcggggatcttttagaattttccgtagtatagctccgcccttttccaggtcccgactaccgtggaggaataaccttggaagccgtaccgaggctgtcgccctggttcatcttgatatttatcctattttgtttgccttgcgatgtgaatcttaggatggtgcttgcctgttttgttgtgtgaaatccgtgctgcagcctcgttgcttcgatttgggggacgacggttgacttttccgccgccatgggttgccaagatccgcttctcatgtcccactgtagttttggtgcggctgggtagctgtctctgcacagatacgtgattcaggcacggttcttcttgcaaaagttgaaattcagggggttttttacggcttggtttctgtacttttacctgtgatgaatcactcaattgtgaaaactggcaagtgcgactctcatatagccaacatcagggatacaaggcttagaattccgtttatctacgttcataagtcataacctcctgtcatgtctagttatgataatgaactctgttctctgtttccttctctctttttttatcatcatgaaatggttggaattgctactctgctactggaaagggtgaaagtaaaaggcttagaatttcatcgtttagatttgatttgcacgtcctcatagccttgtataatgcctgggattattagtgagatttgtgctctgtttaagtcaaccagatctacaacggtgctctgaagcttatataaatactacagtatgcgcgttcagattccttgatgccatatcagacaatatttatttgtcaccagtatacacgacttgctgtaaagattccctgagcccatgattggctggtaatttggtatcatcttgttttgttttttatcaaatctatgtcacacattgactatacgttgatgattcatgagctggacattagcaattgatgtgtagttcatgagctgggcttcagcaattgatgtggccgatacagcagtttgtagcatataccttctcttcccaccaactattctcttcaatcaatttttttagaaaaaaaagtattctctttaatcatttaacttcttttggccttggcatccatgcagttccttgccgtctcaattatacatttctgtctatccatattaaatagatacaaatggattaattcttatgcaatcaactattttatatactcattgtgttacttcaaatgtcactaaatgacagaatggggagcggcgagaagaccgtcaccgcttatggcgagtacacctatgctgagctggagagggagccctactggccaagtgagaagctgaggatttcgattactggtgctggtggtttcattggatcccacattgctcgccgtctgaagagcgagggccattacatcattgcctctgactggaagaagaatgagcacatgaccgaggacatgttctgccatgagttccaccttgttgacctcagggtcatggacaactgtctgaaggtcacccaaggtgtcgaccatgtctttaatcttgctgctgatatgggtggcatggggttcatccagtccaatcactctgtgatcatgtacaacaacaccatgatcagtttcaacatgctggaggctgcacgtatcaatggtgtgaagaggtatgccacttcattttctcactgtctggtaaatgctatggtctcatccataaataaatcataacatccatccaatatagttgatgttgtttgattattgttttcaattaaccaggctactacatataaacaatgtttactgtgcatgttagtctttgtgaagcagagcatactgtttgggctgctggattttccattactattcaatccagatctgtatgtagtcaagttgatactgacattaacctaactgaaccttaaggaaaacaagcaggtcactctggtgattttaaaactgtttctgttttctgtaaccatctgtcttccttagtgtggtatctcaactatgcatgatctatttatattcacatatattttatatcattttggtctggcaggttcttctacgcttcaagtgcatgcatttaccctgaattcaagcagcttgacacaaatgtgagcctgaaggaatctgatgcctggcctgctgaggtgtgtttattgaaatacaatgacgtttctgtttgttagacatattcatgtactcaaatttaaattcccttggacgtgaatctgttacctttcagcctcaagacgcctatggcttggagaagcttgcaactgaggagctgtgcaagcactacaccaaggactttggcatcgagtgccgcgttggccgcttccacaacatttacggcccttttggtacatggaaaggtaagcctaccagttctttagtgattgaagccatacatacattaacctgacttgtgactgttagatgataattcaacttgatcaaaatgttatctttctattctaacaggtggtcgtgagaaggcaccggccgccttctgcagaaaggctcagacatccacggagaggtttgagatgtggggtgatggtctccagacccgatccttcactttcatcgacgagtgtgttgagggtgttctgaggtatgtgtgctttggatgtcatccaaataccataccaaaccaaaccaatgtttgcgtagcaatggggaaataacatggtatgatgccacattgtgtccagattgaccaagtcagacttccgcgagccagtgaacatcggaagcgatgagatggtgagcatgaacgagatggctgagatcgtgctgagctttgaggataggaagctgcccatccaccacatccctggtccagagggggtccgtgggcgcaactctgacaacacccttatcaaggagaagcttggctgggccccaacaatgaagctcaaggtattgtcaccatcttgctagatattgtagatatgtagtacatatctcacatatattgaaattattctgatgaagtaccctccatctccatgctggggatgttggtgataaacaaatgtaaataataccattcctgattgtcctgtaaattggaatgtgtgcaggatgggctgaggttcacctacttctggatcaaggagcagatcgagaaggagaagacccagggggttgacatcgcggcgtatgggtcgtccaaggtggtgtccacccaggcgcccgtgcagctgggctccctccgtgccgctgatggcaaggagggcctctgagcgatgagacttcgtccatcagttcaccgcgtaccgtagtgggatatgacatactgtttggagagtttggacggtagaatatactacagtagcagcaaaaatactcttgggccccttttttgggggttctattctatttttctatctattcaccgctccattaatttatgccatgcatcttgttcatttttgcatgtcttctgtaccttgtttgaactcctttggccatgaccggcaataaaattttccctatttctgctgtatgtggaatatgtgtgtatgtatgatcctagattgatatgatatggctctgctcttgtttagagttcaagggcagaaacgcccccagccttttaactgatgtcaaaagacagataaccagtacagcaccagtttgccaagcaaaagaaaacactgtctcacacctgagacaggaaacactctcctcacccacagcgtactgtttgaacaacgacaacagactgaaaaggctgttaaaactccaaaaggctaacaccagccactcatcaccgtctgtagcattacagaatctccaacatgaactccagagcgtaccaccaagctcctgggcactccctcttcatatctcctgtggtatcttcggtctcatcacccatcagcttgccataagcttcacctcgaggcatcttcatggaacgcccagcgttgcatatggagcacagtactcgcctttgacttgatcttcgacaagatcgcctttttttttttgcgagcaacaagatcgcctttaa

SEQ ID NO: 3910 - DNA, 5349 bp, Sorghum bicolor
ttaatttcaattatttattcgtacaactgtacaagactctgcgagcttgtttgtacaggagtggttttttttctacttcatttttaataatctgccattacatatgcatatgctcttcattcacattttcttctactctcttcgcctaaaaaaaaatgtaattctaatgttaaatcttatcttaaaaaacatgtaattatagagttatatatcatcttttttaataggatccactaattaaaaatatccatatatgactaaaaactaccatccatgagaagaaaattctagaagacaacaaaaaaagatagagaagagacaaatgcataaatttacacctacactaatcttcaaaaacgagatttacatgctttctgcgatagaggaagtatatacagtgatagatactggtttctctggaatacaaatgtctacgtacatactccaggacataacgtgtggatcgttgagttactttgcgtctgagtctctgagaagtcgctgtctagttgtgatgggcaaaagttaaattagcaatgggctaaagtgttgagctggatccttttcaaaagggaattagaaagctagggctcatgatattgcagcttaataagattgccttgtcatggagttggtcatggagagctggctggagtagacttgtggccacctttttaatcagcttattattactgttttcccgtgctaacatttgtcaaagggttaatggctctcttcatgagattcaactgccaaccgaaagcgacccctctggtcattccgatgtagacttggataagaatatggatcaccagatcttgatttaatctaataccactgattagtcctaatgtctgttgcattgcatcatgctatgtgtcggcaaaataattcttctgcaaatttgacttgtatatatatttttctcctataaaatacccaaaacaaaaatcgagacacgatgctacccacgaattgtcaagtttgccgagacgagaagcacacggggcaaaaaagacggaatagaccggccatctgttgccagcacactcttgatccctttttcaattctttcagaacgcatttttcaaggcaaagaggaccagcgtgaaagctccttgtatcagacaataacctgtacttacatgcatgttaagtgctactaacttgttgttatgttagtaaagtacttattttttataactcatcaaatctgtcagtgacagacagacttttgatcagggagctagctaggataggacaccgcaagttttggtttgttatttatagagtgcaggggcttttgggctagctcctgccacctaccttccccgtatggccaccgccccatttagattctgttcctcctaaatctcctccccattggccggccccctgcgcttcacaaaatagctttctgcctcacagcaagcctgtctgtctcacaatcaaggagcctgcctctgaggtggttgcaacttgctttggcaccaggatttggatttctcttggaggcaaggtatgtttcttgattgttgttggtttgtatatgtttgtagtatcatttagttttctagactagatagataatgggtcctttcgattttacaaggaagacacaaagtttgaaggagattgaggctgttcttgttgagttgcatcatgcatgttctctttcttcccttccttgattgttgtctattccttgcatcctgacctgcaatctgttcctgaagatgggaaattgtttgcaaagagaagcatgaacccaacccaaacagggcttcaaatgtgttcttctgaaacagttcttacgcattcacaaaacttgaacttggtgtccattctttcttggcacatgcagattggctgagacggaccgcagattgtgagatccaatccaacaaccgaatccaatctaatccaatcagagaaaaaaaaaagaagaaagacggcgaaggcctttgtctgtgtggcaccacatcttggcatcaggggaaatggggctgtcaatctcatacccaccggacgactacctgccagcagtggaggacaacatggggcggctcttcatccggtctctcagcttcgacgacatggaggccgacgccgagtcgcctttgtcttcgccttcgacttcgccttcggcattgccccccgcctttgcctccgggaagctcatcatagaaggctccctgagcttcaaaaggagagaggctgacagcattccgatgcagaatgtgttgtccatcaggagtcctaaacctcctgatagagaagcttgcaacatcatctgtgctggtgctgctacagctacttgtggctcatcaagattcgggccaatcggggaccgtccaccagattttgattaccccatggtcggaatggacagccccaagcaccaggccgcggctgtcaggctgcagaaggtgtacaagagcttcaggacaaggcggcagcttgcggattgtgctgttcttgtggaacaacgatggtatgctatttgttgggttgggtgagcttcttcttgtcatcaagccgccatcaaggtggtgcttttctgaattttatttatgatgagatcctatataaaatgcaggtggaagttgcttgactttgcactgctcaagcggaactcggtgtcattctttgacatagagaagcctgagactgctgtctcaaaatggtcccgggcaagaatgagggctgccaaggtaccaattgtattcttctgttcagatataccatcataataattcagcaatcagcattattaatcttgtacagtgcaataccaactttgtatcagcagttctcttttcatggaacatatatacagcattcctgacagaggtgtagtatcgctgtcgcgtttaggttggcaaaggtctctccaaggatgaaaaggcccagaaacttgcgctgcagcactggctcgaggcggtatgttatgtaccaagaatataaatgtctccataaatgtaatactagtcagattatgccgctgagcaatcaaaactgcattttgatccatttctgattgtcagattgaccctcgacatcgttatggccacaacctgcacttctactaccaccgctggctccattgccagagcaagcaaccattcttctattggtacacacagagagcaaaagtcatgtgtctgaaccaatgaacaacatagttactgatccagtactgacggttttgaaattctttggacaggttggatgtgggagaagggaaagatgtcaacttagaggagcattgctgtagatcgaagttgcacaagcaatgtatcaagtaccttggccctgtaagttccactgtttgttccttctctgattcaaagtgaaaaaagaaacattaattcaggcagaaagaaagggggaaaaaaaccaaatatgtcgtctcgtgctcgtgtagaaagaaagggaaaattatgaagtgatagtcgaggataagaggctgatgtacaagctgagccgtcagatagtcgacacgacgggaagcgccaaggggaccaagtggatctttgtgctcagtacctgcaagactctttacataggccaggtgaatgatgattccctgaaagaattctttagaacgctaagagcaattcagttactgaagtgagacaaaaattttgacatgtttgcagaagcagaagggcgtattccagcactcaagcttccttgcagggggggccacatctgctgcaggaagactggttgtggaggatggaattctcaaggtgcggcatggaacttcatcccaacatcaccgatctcttttttcttgctctcaagtttgagatgtgttcatttcaggctgtgtggcctcacagtgggcattatcggccgacggagcagaactttcaggagttcatgaacttcctcaaggacaggagtgtggagcttaccgatgtgaaggtagtaaggaaggagcctaatgtgtggcctcacagtggtgatcatcccagacgcttcagctgattattttgctggcttttctcttttgctacagttgagcccatctgaaggtgaagaagacggtgacttcagcctgagaggcagccactctcagctggacctgacccaactctgccagcaagaagagagccatggtgaacaggaggcagaatctgatcaacgccatggcaacgccgaagccgaagccgagacgtgcagccacgacgaagccacatctacagagacgtgcagcacgccgtcgccagcgacggcgacgacgatgaggaagagctcctcagacaacaggctgcaagggaagcggccacccaggctgctgatcagctccaacaacaacatagcaccgctgccgcccaccgcgcacagcagcagcggcggcggcaacgcgggcagggcgccgtcgcccggcgtgaaggatgtggagccggactcggccatgctgggcgagtgcctcgacttctgcaagcggaacctgttcgcggaggacggcgggtacgaggaccagtacctggacgacctggcggaggtgccggaggcgctcatcctcagccgcatcaactccaagcgggccatgcactcgtaccagctcggcaagcagctgcacttccactggagcaccggcgccgggccccggatcggctgcgtccgcgactacccgtccgagctccagttccgggcgctcgaggaggtcagcctgtcgccacggggcaggccgccgaggttcccgtcgcccaggccaggcgcgctcacgcccaacagcatccctgccgccaagtgcggctctctcatggcggagggagacggcatgcacgtgtcgctcaagcccaggcagaggagtgccacttggactgcattttgattccatttccattccatttcatttcagataccataccataccatgcgtgcgtgcttccttccttccttccttccttccttccttccttccttccttcatttcaatagcatgctccttcacgtacgtagacgaggatagaaggatcagcattaacaatgccgttgtaatggtcctggtaggttgatgagcaagctcttgctgttttgtaagtgcatggaaagagcaaatatcaagtctaacttcagtgaaaccattctcagattgcacataaatcaaaagcaaatcatgcagctagaccattccagggtattataaccaaacaaaatatttggatttgttgtgacagcgaaacactcgttcagtttgcctcttgttggcaatcattcaaacaactcacgttactagttattacccaatgtgacagcatatcctaattcagatacaaatgtaccaaaactgtaaccagatgagtactcacactacatttccattgctcttaa

SEQ ID NO: 3911 - DNA, 2975 bp, Sorghum bicolor
tcaagattagagccaccacatcaattagatatctagattagcatagctacataggattagaactagaaggagtcaatcttcgattggtttccggatctgtcaggaggattcttggtaattctctaattgtgcttctaattgctttctaattatctttgttctttaatattatgaatatgactttgttctacttcaatatattgcttatgactttgctctacttgcttatattcaagattatattgttcttagtttatcatagttatgtacttggcttagttagattagatctatatacatgcttaggatcgtatagcgtttatccatcggatccatgggtaaatgatagatattgtgtaggcgtggtgcttataccgtatttatctgcgattgtacccaatatgccagatcgtggggtggttcgtgatagtgacagcttcattgattcttatatagtccccctctcgtgtattgggctggcagagcaacattattacaggggagtgattgctatgtttctcatattccttgctaatatcactatgcatgggcgtagtcttgtctcgcaatgatcactacaacaaatctaggcttctgtgacgattatcagatgacaaaacacatatatgtcataaacaaaggttgtttatgacgactatttataggatgacaattatctatgaccaatctgtatctttgtcataaacatcgtcacagtatactctgcatggactctgtgacgataaaacgatgacaatagttgattgtcataaaatatataattattattttttttaaaaaaaaacttgttatactatgttgctgctaaatcacaaatcatatgtcataggtggactcttcctatccacgtcaactatattctagtctcattttagtattgaagtcaactctagtctcattttagattgaagttaattcttagattgaatgaaaaaaaacctcaaaaaaaccctaaaaaatatggatctcattttatggttgagtgaaaaatcttgaaagagaaaaaccatgagcactgcgtcgtttgtacctataccacatggtctcattttaggactaaagttatctctctcattttagattgaatgaagacaactcaaaaaaaaccttaaaaatatgattatagtgaaatactgtaaaaaaaagtaaaaactgtgccaaccaggcaattcgaacccacggcctccaaggtctggcttaaatgaagctcggtagccagtggagacaaacgggtgttaatgaaaagtgaagtgttcgaatatatttgtataatgcatatagatgcagagaaaaagccattggcttctaactctgctgcccgcatcggcagaaaacctcgcgccgcacagtccacgcaagtccacgccgccgtcgaccttggatctacgcaagtccacgccgccggctgcaactgtggatcgcccttgtcttctcgcccgccgtagctgtctccggctggtccacatccctcggaaaagccgtcagccaccgctttctctggctgctccacgccccttgccaaggtcgccggccaccgctgtcactggctcatccatggtcctcgccaaatcgccagctgctgctttctccagctagtccacgcccctcagcaaagtcgccggctgcggctatcgctagctcgtccacgctcctcgcgaaatcgtctggctgtcgctatctccaggccggcaatctctgtctgcactctgaaccgtcgttgtctccaaccaggcactactgtctcaattccgttgacaacttcatcatctttcaacagctagaaaaggtagacatcatccttttttgttttatcaattgaattgatgtggtactgcagtaaatattcataaagttcatgatttactgtgaatgcatatatttgtagcgagtcatggtcagtgatagaaatctagaaggaatagcagtctattatggtgaatggttggttgttgattccttgattgttgttttgttttagtgtgtcgcagatggacagaagttgggtgaatactagactatttagcaaggcacatctagatggggtcactgagttcatgaactttgtttctgataatttgggtgatagacaggagatattgtgtccatgtcgtaagtgtttgaatcgagtacatcaacataaaggagaagttgagactcacttatatatttatgggatgaccaacacatacactatatggatacatcatggagaagccttggaggttggattaaatgagaattttgaaactggggatataattgactgcaatattgaagctagtgataggggctgcaatgttgaagttgagatgaatgagactgaagatgacccagatgatgatagaatccatgagatggtacatgagctgtacacagctgaagaccatggaccaacaacaaagtccaagtttgcaaccataatagaagagatgaaacacgaactgcaccctgatggtccatataccagattttcttttgtggtaaagttgctacacatcaagtcattttacagaatcagcaatgttgcgttcactgcttttttgaacgtgttaagtatagcttttcctaaatgttctattcctgcatcttatgctgaagcgaagaaagttattcgtgcattgggacttggatatgattcaatacatgtttgtccaaataattgtgttttgttcagaaaggagttggctaaaatagataaatgtccagtatgtggtgcttcaagatggaaggatgaagatacaagaaagcaaattccaaacaaggttttgaggcattttcctgtggttccaaggttgcagaggatgtttgcatccaaaaagctttcagagcaagcacaatggcacaagttgaagagaaaaccagtggacaatgagcttagccatccagctgatggcgaggcatggaaggattttgataagaaatatgactggtttgcaaaagatgcaaggaatgtc

SEQ ID NO: 3912 - DNA, 5249 bp, Sorghum bicolor
ttacatgatgtctctcctctccccatttccatgtttctttctctaattagtgaatccaagaaatatatatgtagtggtttctatgaatggtattttcatgcttgggaagagagagaaagataggttttcttttttagctttttaaattatattgtttagaatgttattttttatgtaaatttgatttattatgcaatatgcatttttcatgatggtcagacgatgcatctcctctcaccatttctatatttccttctcaaatttattttagtgaaatcaagatatatatttagttgattccatcaatggtgtttttctaccttgtcaatttgatttagttgttaagtgttctttcttgaattattacttagggttttgtctttatttttaatgttatctccgaggtctacaaattggatagatatacaagtgggaggttttcatcttcacaggttgttgtttgaaaggttagataacaatattccaagacaatatttcatacttgttttgcattgagatcaattaatttactaatttttccatagctcatgatggagcggtccttctgaatgtataacttattaagactagattcataatacatacccgaggttcataggtttgttgatgctgctaggaaccatgctttgagaataaagacgaagcacatatattgtccttgcatcgactgcagaaatattaacatttatgaagatactgaagcaatcatttctcatctggtctgccaaggatttatgaaagattacttgatttggacgaaacatggagaaggtagctcggcgccttatacaatttgggatcctgcgattctagattacttgatttatgaactttaaacatatgatatttttctaacttcctatgcagcaaaaagactttgaaaaggcgaagagcatgagtgaagccactttatacaacatagttgaggacctctacaaattcatcatgagagaagtcattcccagcgaagggaaatatcacaatcggatcagcaccctagcaaagcctgaatacggagcgctaagggagattagtaggctaaagctaactcgatccggttattagagcagaggtttcagaggtgaaacctctgatgcatgtaaagagaaaaaacttgatgtgtcatcatatttgtaattaatgtaacgttatgtataaagtaatagtatatatataaatgaattgcatgttgcaatggttgacatgatctctaggctttagtagtttcaatattatgtgtatatatatatatatgtttgttgtatgtatatattaaaatataaaataaaaaatagggtctggtgggaaaatttagaaattggtgggagatttaaaaattttaacacaggcggttttgtaatgagaaccgatatttctacaggcgggtggcataattgaaccgcctgtagaaatggagttgtacaggcagttctagattacccgcctgtggaaacccttgatttccacatgcacctagcgtaggcggttcttcagtccgcctgtcgaaaggggttgaaaaccgtctatatagtggttctgtgtactagtgagtgtaaatgtctgatttccactggcggttcagttaagtcgaccgccagtgtaaatcaatttctataagcggttcacttaactgaaccgccagtgaaaattagaaacttacactcgcggttatgttaagaaaactttgtgtagaaagtggtttacacatacggtatacggtttttgtgtcccaataaaaattagccacaaccgccgtttttgagtttttgtttaccagtgggccatccacacttctgatttgtgaacgccagctgattaaattagctagtctgcatgtgcattgatttaatgctacgtgcaagtcaacccatggacttgttcgcgaatcgaagcgcaaacgtgttagaagattagatgtcatgtggttcctttattctaacaaatactgcattactcgcaagcttcactgacacatacagtactataccttcaagctaaccgggtggcagccggcttcgagctgagcatacccaccagttggagctttcttcagagcactagagagtagcactagcttgtgggggatgaagcaaggaaggcgcgggagtaagaagcatgggagcggagcggcggcgctgtggctgctgctgcctcttctagttttgatagtgctcaagacaaatctcctgccacagtttgcacgctgtaagtcaccgcttctgaccaaggatagagaggaaagatatatctgtccttgatcagtttttgcttaatttgatacttgtttcctagctagtcagcccgtcgttaccatttcttttgaataatgcatatgatgagttcttaggaaacgcacggtacgttgtgctaatgatggagatcctatcctagctataaggcttagtaaacatggatttgcatggttccacacacatggaaatgtccattgctgctgagcgcattcaagtattttcattttacggaaatatttcagtttttaaaaatatttgattacggtgacacatagcgcagctgtatacatagcatatatatattagggatgatatatacacagaaggagtgatcaattgtccactcaattttctcatacaagtgatctggatgtatatatgtaggatatcagaggaccatgtaacgctaataaatatgttacctctgcaaataaggagaccagatttcccaaagtcatgactgaaatggttcacaagaatccattctttagttcgttgagctaagtttgtacacggaacacttttgcatacgtaatctaaattttcacagagtggaatagttcacctctgtattcatggtatggacagcaaaaagatggcagcagatgcagctggtcagtatatgcatagcgcagttagaagcaaagcagccgtagaataatgtcaaagatctggaaagaaaaaacaattgtactacgtcagttatgttatgttagtggcgtttcacttgtcttcctcgatgtgcatgtattaacaaaaatacgtgccatgtggccttccattcgaattcagattccatggtcgggtcaccaccttctgcggcatcaacatccacacacggggtgaccagcaacgtcgatgcgacgaaaggtaattagttactctacattttctgcagaaccaaattaaggccacatgtgccaggacgactaataatactacgttaattaattagttcgtacaacgcagtgccgcctgcacgcgcaacttgcattatattatattgctacggaatactagctagctaggaaccacagatcgaagaatcagctcattcattatctaaaaatgtaatttaattcgcagctcattcattatctaaaaatgtaattaatttaatttgcagctctggcagcaccgccaataataagcagcaagttgacctgcaacttcagcaatcatcagtccaacacctgcagcatggaaggcgacttgcgcatccatggcaaatccgccactgtgtacgtcgtctcggcgtccacctaccgtccggaaaatgcgaccatcaagctccgcccgtatgcacgaaagtgggaggaccaggtgatgctgctggttcgtgaggtcaccatgcggtctagtccgcctgcaggcagtgccgccgccgacgacccaccaccaccaccgcagtgctcggttcggcacgacgtgccggcagtggttttctctaccggcggctacaacaggaacttcttccacgtgatgaccgacgtgatcatcccactctacctgacggcccgagagtacaatggccacgtccagctgcttgccaccgactacgagcccaagtggatcgccaagtacaaggccatcctcgccgcactgtcaagctacccagtcatagacttggactctgagcctgaggacaccgtgcgctgcttcccgtcggctcatgtcgggctggagagtcacaaggagctgggcatcgtcccgggtctctcccacaagggctacacaatggtgagcttccgggacttcatccgctccgcctactcgctgcagcggccacgggtgagcgccgggcggaagaagcctcggctcgtcatgatcctgcgccgcaactcgaggcagctcaagaatgaagacgacgccatcgccgccgcggccaatgtcggcttcgaggtggtagctgcgggaccagacgacgtcagtgacctggagcggttccccggggtggtcaactcctgcgacgtgctcatgggcgtgcacggtgctgggctggccaacatgctgttcctgcctcacaacgccacggtggtgcagatcatcccgtggggcgagctcaagtgggcgtgccggcattcgtacggagaccccgtgccagacatgggactccgttatctcgagtacgaggccacagcggaggagacctcgttgaaggacagctacccccgcgaccacgccgtgtttaccgacccgctctcaatacatcgccagggatttgacaagatgtggaacatcttcatcaacggacagcacgtcatcgtagacatcgaccgattcacagggttcatgaagcaactgtaccagtccatcacgacggagtagagtacgtagacataaattgacctggtggtcgatctgatcaatgtgagatgataaatgtgaaattctcagcaggtgacctaattaaatatgtactagtctatcaattctaaattgtagcttattttggttttatcctatgtcaaaaaattaattctaaccaagtttatttaaagaaaaataaacaaacatcaacacctaattagcttgattaatcttttatgaaatatattttgatatagcatttatttgaaatagctgacaaacgtgattaaacctgacaaatttgactcggggtaaaactaaaatgaactataagagcagtagttgtagaaatgttcagaattattaagatgtaccaagactgcgaacacttgttttttcttaactaagaaaaaaaaggagaagtgtagttgtggaaaggaaataaacaagacttcaaatttagtttttgagaatcaatggcaggtgcccttttactctcagcatggtagaaaactgtaacaaacggaacagaggtaggatcgacaagtccaaaggtagaagatcgaaagaaaataagagaatgttgtaaaacatacggactttatcctagaaagaaaggagaaggtggaatcctaattctagtcttgtaggtgaactcttaccaaa

SEQ ID NO: 3913 - DNA, 4907 bp, Sorghum bicolor
atccgtgcggccaaaataagagaagagtctcttaaggttgcggcgtggattgccgtatgtttaaagaatctccaacactttgaaacaatatggattccataccacttcaagtaagttcgattaattgtatacttaacgattgttcggtttatcttattttgatgcaaaggtacttatgtgtttatttaaaattgttgtagcaatcactggatagtcataggtctcgatgtcgggatgaacatggcatggatttgtgattctgcagattttgaccctcacacatataaagacttcatgtcaattctcattacgtaagcaaatttgtaatcctagtaaccttatatgattcactttaatatcgacttctgcatactacaagtcacatcgattctcattcaaacagggcattcagggcctatgtcaagaatcacaaaggaaggcatgatccaggtctggggagccacttgcgttttaaatctctatgttcggtaagtgcgacttagtttggcataaaattactaattttttcagtacttatacttgacacatctccatttgcaaattgaaacaaagtttcccaagcaaaggccagggagtctgcattgtggatactatgtatgtgctttcatcagtaacacaaaaggctacaggagacaccctgaattggtaagtttgaatctcttagtgggttgtagtatgaaaacatagtatttctcacttagctttgcaatctcttctttacactagacctaaacttgtcttttacgatcttgtagtggaaagaagaaaaaggactaaaaagggatgtctacagggatgatgacctcttagagattgtcggtgacctttgcaactttatagtggaccatgttgtttattacaaaggtgattaccataacccacagtccgacttaggtagcaatcctctttacgagcacctccgtcagtgggataggctatgtctaggtcgttgattacatgtgaacttgttggaatggactgtgatcgatttgtattagtacctgaaaaatttcggactcttttggatggatttggacatggaaacattttggacttgaaatgtggtgctgtgtatatgtatggatatttatgttgtgaatatgtgatgttgagaatctgattatatatgtatatatgtatgtggtgctgtgctgtcaactcgattattgtaatttttattttttttctgaaaaataactgtaggggcggttttagatagagccgcccttgcaaatgcagacaatagaggcggctgagacacaagccgcccttactaaggctcactataagggcggctggaagcaccaaccgctcttacagtaggccactgtaagggcggctattgtttccaaccgcccttacagtgggccactgtaaggacggctggtgttgaaccgcccttacagtgaattccactgtaagagcgtttgcataagggcggctgggccagccgctcttatagagcttatttagccgctcctgcagtacctgactgtagtagtgatagactgtagcactttcgtttgtatttgataaatattgtaccatcatggactaactaggtgcaaaagaatcgtctcgcaaattacagttgaactgtgtaattagtttttattttcatctatatttaatattccatacatacgtttaaagatttgatgtgacgaaaaatttgaaagattttgtaaaattttttagaagtaaacaagccctaaaaacaaaggcctcgcaacgaaacggcggtcggcggagcagctgaggccccctggtccaacccccaccaaacccctacctagctccagcagctcgaagccaaatccctccaggctccagctcatcagtcgcaccatcctactctcacgtcaagctgctgtgtgttctgtctctgctgcctctctgtgagcacactgccatcacgcgcaatggcggcttctgtgttgtgtctttgcctctctgtgagcacactgccatcacgcgcaatggcgacactccatctgttgctggccctgctgcttctgctcccttccatctctgaggcgacgtcctcggcgctgctgggcatcagctacgggcgcgttggcaacaacctccctgcagcgacctcagtgccgcagattgtggcctccctgggcatcggccgcgtccgactctacgatgctgaccccaccaccatccgcgccttcgccaacacgggcgtcgagctcgtcgtcggcgtccctgacgagtgccttgccactgtctccacccccaacggcgccgcctcctgggtcggctccaacattgcccccgcgctcccggccaccaagatcgccttcctcaccgtcggcaacgaggtgctcaccggcgtcaacagctcctcgctttccaggtacctcctcccggcgatgcagtgcctccacgacgcgcttgcgcaggccggcctggacaagcaggtcgccgtcaccacggcgcacaacctcggcgtgctggccacgtcgtacccgccgtcgtcggcctacttccgcaaggacctcctcccgatgctctgccccatcctcgacttccacgcgcacgcggggtcgccgttcctggtcaatgcgtacccctacttcgcctacgccgaggaacccacgggcgtggagctcgagtatgcgctgctggaacccggccatgccggcgtcgccgacccggggaccgggctgcactacaccaacatgctcgcggcgcaggtcgacgccgtgtaccatgccatcgcggcggccaacagcgcggcggcgcgggccgtggaggtgcgcgtgtccgagaccgggtggccgtcggcgggggacgccaacgagaccggcgccacgccgcagaacgcggcgaggtacaacggcaatgtgatgcggctcgtggcccaggggaagggcacgccgatgcggccggcggcgccgctgcgcgtctatatgttcgcgctcttcaacgagaacatgaagcccgggccgacatcggagcgcagctacggcctcttcaagcccgacggaacgccggcgtacgagctctcctaccgcctcccgcaggacaacaccaccacctcctcctccggtggcagcgttaccggcggtggcggctaccatggccacggctacgggtcggacaacgccgggtactacagcatctcggccgctgccaaggcgacactggtaagcactgctctcttgcttgctgctgctaatgatggtggacatgctagctcctgccctcctagcaacagcgtgggtgtggttgatgctctgctttggaatgatggaatcatatcagtttaaggaaaggttaattttggatttggtattccagtctttcttggcacaaaaccaaaaatgtgagtaggtagccatagacacatgttggaaaggtggaaccacagataatcgcaactgaggctgtctccaacaagagactcatttggaaacgcaaacctaaaataggtctccaatataatacctatagcctctaacagagtacccatacagaagaccccattttgggtatcagaagaggcataacccaaatttgagtatcttctctcctcgagacccatttgcagagagtgttgtcttttaggtcttgacattggagaagactaaaaataggtatggaaccttttacccgtagcgctacctaaaggacaaatgagtcttgtattttgggtgatgattgttggagacagtcgataagcaaaaggtagctactagctctctacataccaatcttcttccaaaagaaattgtgtaaacataatcaaattaaagtcatttttaaagaaattttattaataaatcaagacacaataaaagaagtgatattttgcataatttttttaaataagacaagtgattaaatttggtgtcaaaaagtcaaactttttttaatttgggatggatcgagtatttccattggtgcaatcatggaagttgagaacaactttccagtggtctatctgtccattgttctccgattggaactttgcgcccccttttgctcgtctgctgaggtgttacccctttgtttgtgcctgctagggttggtggacatggccacaggtagctgtggcagcacgtgtggctgtactggccatgccactgtgaccattggctgagatcaagtggtgcctgcctgggcatggtggacgggaagcctctggctttcgatagagtctggcagcgtatggtggagtcagtgaactgatgttgtagacaaactcattgatcgcggtgatctatctatcgctgttttttttttgtccttttttccccatgttgtaaattgaggtgcccttgcaattggtggtaaacaaatgggctagacgattgtcattaatgattcgacaaccatatttttgtgttctgaaattgaacacgatctctttgaaaagataaattcagatggcatccgaagcctaaaacagcaagaccttgtttggttgcatagggttgccagatttgttcaaatcgaacaacgcctctgcggcacccagtacctaattgtttagtattaattatattatatacacctctatctcaaattattataagttattcgaagaattttggagagtcaaactatgtcaaatttaactaaatttatactataaaataataatatttatgataacaactaaatattattatgttctttattagttatatttcatattatatctatttaatgttataaatttttatagttctttctatagttttggtcaaatgtaaaatactttgactttctaaaatttttaaaataacttataatttagaatgaaggaagtatttataaagtggcgaggcacaacttgcttcgtcgcaaaagaaaatgatccatgtggaaagcttgccagccttttgtttcaaacacctccccacgaa

SEQ ID NO: 3914 - DNA, 3982 bp, Sorghum bicolor
cttctccgcctcttcacctttccatcatcttcgatccaactcgccacaatccttgccgccacaaaggccttgttattccgatctacgtcaaacatggctaagccctcatggacagcaaagggacatggtggatcaatggacaaccaagatacaaggtagaatctaactgtatttctacgggaggaagaacggccaccacggatgaacgacggcggcggcggcggtgatggcggcggcaaaaccctaggccctctcctcctcttccctcttctcctttctctctttcgtgaaatttgtagggaggatggcgacggttcgtgactaggttaggaggaacaggaaaaacactgactcgtggtaggagaagggtcgggggcggtactatacaccacgctcactatagcatcagctacagtaattgtttttgcctttttttaatctattttttctcgggcgttacaccatctccctcacctctcttccactctttcacttagggttaggttttctagtgttgtagagaggtcccataaactgaaaaatttatggtgtatttttttttgtgattttgatatgggaaaggagatccaaataatccttttgtcctccggtgtctgtcactgtactgagtttttgagctttttccctatttttcgtgcttaccttctatctcgattttctagagtttggatcaatctcagacaataattttatttggaataacttcgtgctagattaaattatatgtgtgcagaatctgagctcaaaagcttttgaatcgagagagatactttcgttctcgtgtttgctcccttttctccttggttcttgcgtgcacagagcagttggtcggacagcagttcctcgacgcagtcccagccaaccattgcagaccccgacggtgctgtgctcgcctcatcttttcgtctttcttctgaatccgacaaccttcaatcgactaccactatgcgtctagcagcgcggcccctcccggttctgtccgttcgccgtgtaggcgacaggccgtgcgcagccatccccgctttaggtcctgcagaatcaggccccaagctgctcggtgtattgcgacgctgcaacaccggtgaagtgactggagccgttcggtacaagcaggttcaggcggatctggttgctgtcctcctgtccgcttctcagcagcttgactactgatctgttgtttgtgtgaaggagcatgcctcccagctcagcagccgcaggagcagatcaatcagcagagctgcagtagtgcattagtgcttgcattttttttctgttgcagttcgactggagcaggcagcgtgctcttcagcaagtgcaaagcctgatcctgctttgcttttcaaattcttgtgtttgtatctatcaagcttcaggaagtaatcaatgcttgtcatgttaatttcaatcatgtgcatgtaattgatcttgtgcttccaacagtgttgcattagcattctttgtttccgagaaatttttaaatttctcgatagtttcgtcactagttggcttaagtattttaatttcacaacttacttatgttcggtggtgattttaggattgtagccaaatatttcgaattcactccgtcttcgccgttccggtcgttcccgatgatgaaagaaggaaaatgctattgttttggtccaaacacgcgtgatgcggggaagttctcgaacgtgagagaaggaaaaagtattcaaagagtagaaaaaagaacgaccaaaatgctagatccatgtggttagtcagcagtcagcacgtccttgtcataaagagagggatagtcagtgagtttcgagcagtgcacatgtagtcattttacgtacttcattcagtgaacaaacagtttccgcagccatggaggacaaactcaatttgtacaagtaaatgtacacataccaggcttccagaacaatccattcatcgtagctatctatcaggttaccagtccattcttccttcccctctatgcagagtcgatggaatctgccatagctgcggttgcaggtgaactcgtcagccgattcatctccttcgcctttagcagatattgctccagctacagctatgaaggattggaggagaagcgggagaggctgcgacaactcctgatgagggttcacaccgtcgtcgaggaggcagatgcgcgatacatcaccaactctgggatgctgatgcagctcaagctgctgtcggaggccatgtaccagggctaccatgcgctggataccttgacattccagctccacgacgacgaggaggactccacaaactgcatggttagcgactcatcaatctccttgtgttccgccactcgcttcaaacgtcaacgcacagttcttgcttcggcgaaaaaggacaaggtagccgcattggataatctggaaacagctgtggcgaacatatcagagttcgttgcgcttctgtgtgggtgtgatgagcgcttgtcccgtagaccctacgatgcatatctttacatcggcaatttcatgtttggtcgacatgccgaaaagcaaaagctcctcaacttcttactgcagcaaaacccatcagatgaccttgcaccacctcctgtcctgccaatcatcggtgctcttggagttgggaagaagactttggtcgcccatgtgtgtgctgacgagagggtacgctgcaaattcgcttcgattctgcatctgaacggtgaaaacttactgaatatcgtcgaccacgaaaaggccatgctgggaatgccgtcacttgtggttgttgagtttgtttcagatgttgatgacatgaaatggaatgagttttattcatttgtgacaagaacagctagtacaagaagcaaggtgatcatcatcagcaagcttggaacattagcaaggtttgggtcagtaagaccaatctttcttgatgctctgtcatacgaggagttgtggtacctcttcaagaacctagcatttggaagtgcggacccggcagagcatccaaggctagtacatatagcagaaggatttgccaaggaatttcatcagggtggatcacttgttacagcaaatgcattcgctgacgtgttgagaagcaacctgaatgctcaattctggctttcgatactgaacaagtgcagaaaagtgatggagaagaacctcttcgcttacgggcagctcccaaatttactcttcgatcaaggccgcgaggtagacatcacggatttcgtttcgagtcctgctattaatcccattcgcatcttaccttgtactactagtagggctctagccaaaacagaattaccaaaggtggcgtttggagaactactcctagatccttctgttagacccaaaggagaatttcgtctattgacatgggagtccaggttaccaccttatacttcatttattcacttggttccaaattccactcaagatctgcctcaaggacatagtttatcagggaggaagcgccacatagtgcctttctgatgacataagctgtatccaatgtaatcatagaagtcagatgtactattttcagacctgtgcagatattttgttaaacagtgatattattgcaagctactgctgaaatgtgatgacatgatactatcccttccacaacctcttcaaaatagtaaccactagaacatcatgcgcccttcgggcgtcctattatgattttaaaacaaatatccacattcgataaacatatggctttacacctaagcaaaacatagatatataagctctgctctatccagtctaaaagcataggaaaaaatctctttcctagaatcaatactttgcaaacccaaatactccaagttatatattaagatcaagtacatcttacaccaacttagccatgttaataaactaatggctaattaagtaatcaccttgtgtttgtactaaattttttttaaaggaagctactttgtatagtactcttcatattttgacagttgcttagtttggttgcaaag

SEQ ID NO: 3915 - DNA, 3807 bp, Sorghum bicolor
gatgaagaattatctttgattttttttagtttgatgaaacgagaggtagacaaagggaatcgacaagatatggatattgaaagccatggtcaagctaagcaattaaacttggagcttccttgacctagttgagattacttccagttaactatcaagttgaacatcgctgacagaatgtactcatgtaaagcccctgtgcttcgttatgtgatgactttgtgccaaccctgatgaaacaacttaggcggttagggtggaatttagtttaagttccactctaattcatgccaacacaagtggattgatgtaaatatgattatatccaaagatggccgcactaacgagcgaacattcacccaaaccgagatcaacgaataattttctgacatcattaattttgttttttggaaaagaaaaattcccacctgttacctcatttggatagtaggaacgagcggcactttttagcgcacttccacgataagatgttagtgctgatgtcatcaggaaaaggaaacatttatttaaaaatgttataacttctaaaccatatatccgtttttaattccgtctacatcagtgtattctacacgacgagttgaacaaaattagatcccacttgcatatgctctaaaaatgtttttagtagcgattaacttataccatatgacttataacgtataacttataatatataacttataatatataacttataacatataacttatctcaaaactttgaaacacaaaagctattgaatataatttatgtgcaaaagttattaaagacaaagaaatacttaacttatgacttatgcgaaaacttgaaaatacaaaagttattaagcataggaacaatttaacttataacttatgctaaaacatgaaaacacaaaaaagtcatggaacacaacttatgtacaaaagttatcaaacacaatttatgtacataagttattttatacaactcgtgttcttaagttattgagtatagcttatgcgcataagttataacttgtaagttctaagttatactgtatttcataagttaatatacataaattgctataagaaaaaaaatgttttttgaaacatacgcaagttaggtctagttttgtttgcttcgtcactagaatacacagttatatgcagaattaaaaattaatacgttgtttgaaagctatagcaatttaaaataaatgtctttgcttttttaatgatgtcaggaacaagaaaagtgagcagggaaggagtgggcggtcggcatatatggtgcattattcgtttgttttgtgcgttctattttaatcacatttgcatataagcactttaccgatgtacgttctattttaattacagtcgtatgtggttacgtgtgtctgtaagtgtatttttaatacagacacttgttttatgtgtgtgtaataaactttattacagacaccgtattgccgacgtgcgctggcgtgtctgtgatgcagctgaacgcccgtctatgaagtgcttttttggcataggtcctaatctggcatctgacggtgcatgatgttaaagtgtctattattagtcttgaaaaaaaatgttgtttcacgtttgcaatttacttttggacagacaagtaacttgttttgtgacaatgtcacgcatctcacatccttggatagatctttgtttggattagctactaaccttttagctagctgagctaaccgtagtcactattgactagtttgattaacctagtgaaataactattagcaagttattcaactaacaattaactaaactattagctagatccgttttggatcaagaatctaattgttagcaagtatctattagctctatggatcttaatttaagggattatgaaattataagcagtatacgtgtcacattgactgagaacaagtcaattgcttagccgctaagttgagttagaggaatttgcaggtaattaccccctcggactgtagtacccaatttcatcgtcattagctcctaacgacccatcgcgacaagaaccctgctacaatggcgagcctcctcaagaagttcgtagacgctgagcagtgggacgccgaggacatcgccggccggctgggcatggtcttccacgccgccttcctcttcgccggtttccggccgtacggcgcgcagccacggtcgggacacctcctgaagaagcaatcacgcaagaaggggggaggctcgctctgcctctcccgacagtacaccgcgccggaccttgcgcaccgcgacggcgcggacgctgccgtgctgatgctgtgtgcgcaggggaggtacgccgcgctcctcgtgttcctcaccgcggacggcgacgacgacacgccggagatcgcgtacatggagcggctggatctcctcaccgtgtggccgctcctctcccgtagcctcggcggcgtggagccctgggcgtcgcggatctgcaaggcgctcgccgacggcgtgtgctggggcctcctccacgagctgtgcagcaggaacggcctaccgctgagcggcttcgcgtccctgcccgacgacctccagggagccgtcttggagaagctcaccgacggcaaggacctcgcgagggtggagtgcgttagctcccagctgaggctgctcgtcgctgagcgtgaccaccagctgtggaggaccttgtacaaggccctgcctgcgcgccagcgccggggctggtggcgtctgtggtggttcttccccgacgccgacagctccgacgaggagactctccgtgtcggatcgacctggaaggacaaatacgtggaggccaggcggcgttccaatcgtcccattccgcgctcgtggttcttcgactcctttgattttgaacccatctggatgattcgtcggagggacttgtcgtcatggccccttgactattggttcatacaagatccgccggaggaggagaagacacttcctccaagggtcgacaggagcggcgtccgccgccggaagctgccacggaacaacgacaagaagtggcatggtggtggtgccatccactcgccatcatctcgctatcgatggaagcatcgctagctgctgatcatgcgctgctcatatggctgcaactgaaatcctgcatatatatagtcaaactcaacaactgatgcgtttgatttatttgtttcgagatttcgatcgtggaacgaatggaatgaactggtcagattgtaattagttagtgctgttatgctctgctgcataactggtgactatcacgcaccgtggcaataatgtacacctgaatggtttattgggaattcaatgttaaattttagtcagtgtgttgatctcatgataattctgcttgataataaaagtataatactgacggacgtcgtattgttgactggtgatttgggtcagtgtcaccgttcctttgctggttgagagcaatgttttaaatagcgggttaagtctcatatcggcagtgttgatgcaaaaagctgatctgcaaacataaagggctaatacccgatttaaacgttaaggcgtgccagccgatttgaccttactatcggcgaaggtcataactcgaatactttggtcccgacaacagcgatgcgcctggatgccacggccaagaggtattcacgcggatcttgagaacacgtcgagcttaagtcgacgaattcctaagaactcgtaacgaaaaggaaaaagtatgacaaagtcgtcaaaaaagtagatgctgggatatgagtaaaaacgtaggtttgattgattgatagatcctgacaaagcctcagggtctacatttataccctgttcg

SEQ ID NO: 3916 - DNA, 4846 bp, Sorghum bicolor
aattatctccatgaagaaaggtttattaattgcaatctgaagagggatattgtatcaattagattatccagaatcagctcagccagtccaagaatgttctagcctgcagacaagagaggaagacaagaaaacatcgtcatttcatgtagtagagctatgtaaaccgtcatttcatgtaactcaagcttcacttgtagcctgcagacaagagaggaagacaagaaaacatcgtcatttcatgtagtagagctatgtaaaccgtcatttcatgtaactcaagcttcacttgtagcctgcagacaagagaggaagataagaaaacatcgtcatttcatgtaactcaaacttcactggtagcctgcagataagagaggaacacaaggaaacatcgtcatttcatgtagtagaggtatgtaaaccgtcatttcatgtaactcaaacttcacttgtagcctgcagacaagagaggaagacaagaaaacatcgtcatttcatgtaactcaaacttcactggtagcctgcagacaagagaggaagacaagaaaacatcgtcatttcatgtagtagcgctatttgaaatgtcaatttatgtaactcaaacttcacttctagcctgtagagaagagaggaagacacgaaaacatcatcatttcatgtagtagagctatttgaactatcatttcatgtagctcaaacttcactagatgccgacacacaagacaagaacacaagaaaacatcgtcatttcatgttgtgctagatccaggaccacattaggtacctatgctactgcattccaagaggctggtgtcgagatggttcgtgagccactagcatgaatgcaccacctcaggtcggtcgcaactagcatgaatgcaacctaaatacatgtggtttcaatagcgagagttggtgagccactcacaagctcacgtcaacaccataactcgctattctaaccatcaaagattgtttctcatccaaattatcatcatgagcgagctataaacaatttaacttaagactagaacataagattagatcagaattacaagttgaaataataattaaagtcaaaggaacactaattaactaataaataaggaaaaaaatttatagttcgccgtgagctatttaaagggcacacggcgaagaccgtctttgccgtgtgcctcagactagcacacggcaaagattgagggtttgccgtgtgcttccagttggcacacggcaaatagttgacggcagccaacggtggctgacggcgtcagaattttgccgtcaaccccgtgctggcacacggcaaagagtgcattcaccgtgtgttttattttcgccgtgtgtttttcctcggcacacggcaaatgtgttgacttcaccgtgtgctcttctgttcagcacacggcgaaggacgtaaacaccgagtgctagacgtttgccgtgtgctgggctgggtggcacacgacaaatcagctctttgccgtgtgctcgacgtattgcacacggcaaagctacgggcacacggcaacctccggttttccggtagtggttgatgctgtcttttcagtagttttacacgcacgcgggagccgcgagggagctgtgaagatttttctgatgtatatatgttgaagtagtagtggggatctcctattttgtcacagaagatcaaaaatttgagtatatatctcttccaagatttgtattagaaacatgtgtacgtcgttaacccaataaagaatggttggtaaagggataggatcaggataccatcagacaagaggtcactttctaaagagatttattagtttggatgaaggtgtccaagaaaaaagaaaaagaattccacacatatgtctgtccctgttgctgtgtcgtcgtttcgttcccggaaaactacaatatacacccgctcatgtaacaggcgtgattcagctaggatcagatctactagcttctacccattaaaaggcttcttgaccgatggagctcacacatcacatccgcgtggctcctctcacagtcacacggaaaaagctcgctagctacccatggcggcgtcttgtgtttcgaaggaaaggacaggcgtgcccgtggtagctctgagtctgggcaagccgatgccgcgcgtcggcttcggcacggcgtcggcgactctgggccaggccgagggccgcgccggcgtgacggaggccgtcctcagcgctctcagcgctgggtaccgccacttcgacacggcgtcggcgtacaactcggaggccgcggtcggggacgccgtcatccacgccgccgccgtccgcgacgacctctacatcacgacgaagctcgccatcaccgacgcgcaccccggccgtgttctgccggcgctacacaagtcactccggttggttcttgcaattgcaacacatacagctcatcgatcagtctagctatttggttgttggtttggttcttcataagaaaaaaaacaaaggtcctaaaacgacgatctccatctgtgcggatgcatggttcaattcgatcgatggtcaggaatctgcagatggagtacgtggatctttatctcattcactttccggtgagcatgcggccgccggtggtggaaggaggcctggcggtggtgaaggaggacctggtagagatggacatgaagggggtgtgggaggagatggaggagtgccacaggcgagggcttgcgagggccattggcgtcagcaacttcagctgcaagaagctagaatacttgctatcctttgctaacattcccccggctgccaaccaggtgaggtgattcccattccaattcagggcccgttcgtttctgggctggaacggcctggaactatttcgggcctggaactatttgatattttgtactgggctgaaaatattccggaccgttccaggctaggaatgcttaaccgaacaggccctcaactggaaaaaagaagcaaactactcttgaagacgagcaactctgcaactgcatgcatgtatttcttggtcaactactacccttgtagtggtagatgcatgcaacccaagcacagtcattaatatataaggtcgctcatataatttaagttatctcgaaaaaattgtgtaataacccgtagaattcctaaccatttaccagttccttttgcaattggtctcgtgtgtacgtagaaagcaacgcatacagtttagaaattgttccttcgtcttttttcacacttgttctcatattcggagaacaggtggaggtgcacccacactgccgtcagaacaagctaagggcattttgcagggagaaaggaatccagctttgtgcattctcaccgctaggtgccaagggcacggcatgggctaacaactccgtcatggagtgccctgtcctcaagcagatagcccatgaaaagggcaagaccgtcgcccaggtaaattttgctaagaccaaataaagtggtatctgttactccctccattttttctttttttttaactaaatgaatgagttttctaagtagctaaagacgtttgggaatatatttgttcaccttctccaacattttccaaaatctcgttcctaaaatatactccttccatcctaaaataaagtcattctaaaatttgtattaaaataaaatacattctacaaattaattatatttctatttggcaaggtttatttgcatgatagtacaagctaagtgaatgcaaacattaaactttcggaaccatttattcacaaactatttttctcctatcgagttgcaggtgtgcattaggtgggtgtttgagcagggagattgcgtcatcgtaaaaagcttcaacgagaagaggatgcgagagaacctcgacatattcggctgggagctcacggaagacgaccgtcgcaaaatcagcggcctcccagaatcgagaggaaccttcgatttcttcgtccatgagtccgggcctttcaaaaccgccgaagagttttgggatggtgagatcgttgctggccaatccactaaccaagttgctgtccgtttggatccgaccagcttacagtaaactggatttaaattaaatggatttcatcttgatcggtgacgatcttctctcagtcgagttccatcgatctaattctaattaagttggatttccagcaagaataatatggagataaatatataattgcaagaatggttctcccatgtatcaacggcatcttccttcactattacatgcggttcgcaactcctttgtacaggcggattgataaaccgccagtgactataggcctgtggaaataaatgtttccacatgcggttaaatgagaaccgtctgtaggcggttcggttatgtgaatatacatgcaatttaacccaatttttaaattttccctgcaaaccctatttttaatattatatatatatataatatattatatatattatataaattaatattgaaactatgttaggctagaggatttcaaccaatgcaacatgcaatatatttatatatatcattactttgtacataaaattatattaattacaaacatcacacatcaaagttttttgtttacagacatatgaggtttcacatctaaaaacctctgctctaataacccgatcgagatagctttagcctactaatatatcttagcgctataaactcaggctttgctaggatgctggtcgggtcatgatatttcccttcggtgggaatgacttctctcaagagaaaagtgcaaaggtcctcaactatattgtgtagaacagcttgagtcacgctcttcaccttttccaactcatgttgctgcggaggaagttagaaacatcataaatttatagttcataacacatgcttagaa

SEQ ID NO: 3917 - DNA, 9846 bp, Sorghum bicolor
  misc_feature (3412)..(3511): n is a, c, g, or t
tatttcgccttccagcaaactcggggactacataggtacgatgcatctagcgatgcatctctatattggaatttctatgaagattattctctttagaccctggcaccacgtgcctacatcacctactaccaggctcggggactaagtgggcacacttcaccttgcggtgaatatgcttgctttttgagagagtatgcttctttcaaaaagttaagtgggcacacttcaccagaaaagaaatcttttttctcaagaccaccatgcattattcgaacaacctgctttttcgatgacgatgttgatcaactgtcttctgagttggtttaaataccgttgcaattgttcgggtgattttcctgccggttgatgacgtcaagccgtatcggtcgaagaagctcaagatggcgtgttacatcataatacatggtgctcggggactagctgtgggggtataaacccctatacccttacggctaggcttgggccagaagatttggcccatcacgagacagctcgaggcttgatccaactactcgaagtttcacgaaaggaaataagacgtggagatcaagcaggattctagtcggttagaatagagattgatatcgtattatctatggcaattgtaaccgactaggattagtttctagatctgtaaccatgtcctctggactatataaagagaggcaagggacccccttagggaacaacacgattcaacacatctcagatcaatacaatcagacgcaggatgtaggtattacgcccacacggcggccgaatctggataaaatccttgtctgtcttgcgtcaccatcgagttcgtagcttgcgcacctgtctgccgataaactactaccgtgggtataccccaagatagactgccgactagctttcgtcgacacatcctcgcttggcaaggtcacacagtgccaatggagggatccaagcagaccctaagtttcactataagtttataaagaagatcatcaatatttatgattattttctagaaatatgttgcatgatagatctaatgatgtaatactatatttaatagatttgatcaaatataatgtagtttgacttaggacaaaaactagaacaatgtcaaagtttttttaaagctagtcctccttaattaaatttgtatgattacctgaagctgtaatgtctttttggaaaaacaaaagctgcactcggtgctgtctaggttaccatgtagtgtgtcctgctgtgttgttgtcaacatttacatccatcatcctaattaatcaatccccgcacaatgcctggacctgcgcgtggcgtccctaggtccttgtcacacattacgtacccgcacagcaatcacgtgttctttgatttcaaaaagcaatcacgtgttcttgtttaatttgatagctattgctcgtcgttctttgaacgtttcttcttcaattctttggtgttgggtgatttgagagattgcaccgcaaccgcaagtaataatcatagaacgcaagaaagaagattcaggaatggaatcaatcaaaacctaaaaaatattgtagcttttatttttgcgtgaaccacaaaacgagtcattcctagagctccgccaatcgagtctttgctccaccatgccccctccatagctcgccagttcacaccaataatcatgtctctctctctctcgttggatatttattattataaactttattatatctaaacccttttaaaaaccttacttagaagtttccaacaattatgaaacaatgtacatccatgcggttggatgtacatcgtttcatctaaaaaaatctttggtcttaaaaaatagtcatccaagatattttccttttaaatgctgttgaagctgattggccacccacaacacgtgtttttttgcagattcgttttaaatactcgtatcgcaagtgttatctagctagggaacgagtgattcctcgagctccgccaatcgatcctagacctgagcctccggtccaacaggtagctagctagggtactctctgctccggtgctactgctcatccatgctgctgcttcaccttcaccgatcgtgaattcgtgatcgagtctttgctcctgcggcctgcagtgcaggaggagtctgctctgccttgccccctccttaagttaagctcaccagttctcaccaataatcaggtctcctccctctccctctctctctctcctgtcttttacagtatatgccagttcctttttgtttttggatgccacacttcctttgttgcaagaaacacaataagctagatgagtgttctcgctaggaatagtgaggtcggggagatgcggtgggatggaaataacaatatcaatcgtttacagtcacttaactgtgaatataaaagacattacaaaaaaaagacagaaattcagtgtatgattctcataattgtgcgaaagtcatcatggtgcgaaagtatagttgttaactggttacattcatcctatttttttgtttgttctttatgtgatatcgcttgtctccttcagttgcattcactcgacgccttccctgaagagcagacagctcccatggatacacaagatgaggagaggccactgattcatcccttgcccacacaggtgacacatcttccagaaccttaccgtcttatctcctgtccaagtgtcaacaacaacagagattatcttctaggttgtgcaaatattgtttttattggtaccttaacaaacttagacaaagctagtagatgttaatttcagaataacatgcatactttcttctggctcttcaggatgaatgttcagaattcacttgtgatgggacagttgatattaacaaccagcgtgctccgaagcggagcacggggaactggagggcatgcttctttattttaggtactacacatacacaactagaattgcttactttattgtgttcattctttaacaaacagaacccacactaagcttttgaggtgaacacccccccccccccacccccctaaaaagggggggaattcacggaaagggggggcctctatccccatcccaaaaaaattgggccgctacctcaatgggggcccccaaaaaaaaaacgtcgaaggggggaaaaacgtggccccctgggacgggaattcatttttttcaacggttaatggagctttcttatgggaaacattctgggggggaaattggaaaggtgggggcttccccccgggttaagcaaatggaagttgaaaacaagggattccctccattggaatttacacccaaagggtggagtttttgactggccataccaataatggagaccttctccgtcttaaaatgggataaaagagactgggtttggcaggggagggcccccctgggtgggtcggggtttctcccactggggaaggggtccccccannnnnnnnnnnnnnnnnnnnnnnnnnnnnnnnnnnnnnnnnnnnnnnnnnnnnnnnnnnnnnnnnnnnnnnnnnnnnnnnnnnnnnnnnnnnnnnnnnnncccccccccccccctaatcaggtgctgaattcactgaatgtgtggccgtctacgcaatcacaaagaacttggtcagctacctcactggtgtcctccacgagagcaacgtcgatgctgcgacaaccgtgtccacctggatcggcacttcattcttcacaccgctcattggagctttcttagctgacacattctggggacgatattggacagttgtggtcttcctctcggtttacgcaattgtaagttgagaacaagcaattccttcaattgtaatttacagcaaagcagtgcagttattgactgccaataccaataatgcacacctactccatctcaaactcatctgaatgagtctggttttgtcaggggatgctcaccctgactgcatcagcgtttctcccactgctgatgggctcctcctacaaccgtggcattcatcgtgccgccacatacctgggcctctccctcaccgctctcggcaacggtggcataaagccatgtgttcctgcccttggtgccgatcagtttgacgcaaccgacccagtggagagggtgaaaaagggctcattcttcaactggttctacttctcagtcaacattggctcgctgctgtcggcaaccgtgatcgtctgggtgcaggacaacatcgggtggggagtcggattcgcgatcccggcagtgctcatggtgtctgggctgcccttgttcgtcgccggtcacaaggtttacaggtaccagagagtgggagggagtcctctcacgagggtctcccaggtggttgttgcagctgtgaggaactaccgtttggagttgcctgaagactgctctgctctgcatgaggtgcctggaaattgcaagattcagcatacaagtcagttcaggtaatcaccaaataagataaaaatatgtctactcatgatgaatggacaaccatgccacatatagaaaatagatgacactctctctgatcctagattatcatcatgttattgtacaatagtttaggagctcagcttaacacacgtggttcagtcaatcattaggtacgggcgagggtttctttatttccatcaattagagtcatatgaacaaatctgatgggaaacgacaatgacacgagagagttagccggcggcagtcgacgcctagaaaatatatttgatctaattcaccaggttaactcatagatttgagagtagacgtaaacaagctattttgttgggataaccacactagcacacttactagtgacagcagaaacgcttaattttactataatacgaaacagcccaagtcatcacctattcatggaaagaaacattgacatgtttcaactgatcacaacagcaccaatagcataaataaggcatcagatttaatgtggaaaacctttaaatcggggtaaaaaccacaggaccaaaccagccaatcttcttccacgataagcttgtgggattacaacaagttcatccctagataacattagagacaattacattcgcagatcttagataacaacaataaaatttaggggttagggagtggaaagacctcactaaatgatggtggaactcagattagaggcaccaaggatgtggatctgaagcttcataaccttgaggataaatccttcttgatctattacaagatatcctctctaatctcaaagaggctgaacaatgtaaccctaacatctgtatggttactcacagctacttactgttaataaatgaatatgtggttcttgttaaaaaaaaaaaactgaagtagcactcttactgtccagatgcttcttccttctcctagaagcaaagaagcaaatgttagatgcacacacaagttgatccacttcctgtgttgcacctatgacgtgtgggactgttctctaggagcaattactcgccccatggcctactcatgaggaggatttcccaacatatctctccctccaactcacgagaggggcaccatcagtttatatagacaatcacaattgagtactttcttgttaatcctggcatgagcatttggcactaaaccggtagatccaaatatacattactacagctgatttgattttggagcaagagagctttcaagttatgccaaatcatagcccccattactatagaacaccccccccccctaaaacatccaaaaatgagcgaatgaaaggaagaatacacttttctatcagccatataaattcactaaatcctgttagattatcctactataaactcaaaaacaaagagtggcacatgtatctctagtgtgagcaggcaaacacaaaaatgtgaaaaaagaagtagctagggacttggtttattatattattgggtcaaaaagatcaatcttaatgaatatattgccgatgaaaagctatagacaacacaggtggcgtcggcatcatagagcgcaccgactgtaactagtggacaacgaaggtgggggcgactaaggagactatgtgccttagggtgggatagagaagatgcaggagagagtagaggagccaaagagggcttgaggggccaaggaggacaacggacgtggaggaaaccgaggggaggtatgacgtgcaagattcagactcgagtcatccatcaacgaaatcaattgttttttgggtccgcctgatgccgctctaattacgcattagagatatagtagccagtggtggaaacagtgattttgattaaggggaggacgaacaaatataatcgtattgtttagtgtgataaaatatacataattatatttgaagaactttttaaaaaatacactatttttttaccaaaatcatcatattttaacaaaaatatgtgaaatatactataaatatcaatatttatataagtatttagatgaatcactgtgctttgggggagcggccctgctagcccccctagtttggtcagtggtattcactcgtaaaagatgtctgtgatgtgttttaactagacaagtctctaatttcacatcagtcacatgtcttattttcatgtcactaaattaaatgtcttctttgtgtttatttggcatagcgtataaaaatgttgatctatcctcatgtttgaactaacagcatctctagtaaactgagaaaatgtggtcacattttcctgtaaccagtgaacaaggggatttagtagaaaaaattgagctacaacagatcccatttctagatctcttttcactataatttttctcaatctctcaaagaaacatagaggaagtagagatttttctcaatctatgttttttgtcgaattcctacatctatggccgacgctcgtctgccgatagatggcctccgctgaggccagtcgtgtcatgattccgccatgcaagtgcaccacacacaagtgatggtgcacactagccgtttcaggtttttgctgatcgcacggaatggccatgttgaggcaccacacgggcatgcaaccgcggacgagagccatggggctaggactccacacgggtgtgaggacgaacaggaaacatgcaagagcatctccaacaacatcccctactagctagacctcttatcctcaatttcggtagtggatggtaaaaaataagcttcagtagaacctttactaggcccctagacttgttggcctcctattttgcccctcccactacctattccagttggtgctctacttgactacccaaactttttagtgtttcttctccgctctactcctccactcacatgaccaacgcccactccgactaggagcttccctgtggccaatggtcgacagccgaccaccggcatgtccctagctactactgcctgcccatacgccatttgatgaggtgccctcccagctaccgaggcatcttgggcgcggttggccctggcggcgcagcctgccttggcgtgggcgcagtttcgccttgtcgttgttgcactgtcgacacccacctccacactgccggcgcatctccccccgcgtctatggcaagaagaacatcagagaggatgacatgtggatcccacatgtcaataaaaaaaatagtattgaaatagatgattatgcaaatagataaatagggtgtttgattttggtagcattcatggagaggctctaatacaagggtgagaagacgatgtttagcgattgacagacaggtcctatacttaataaaatggttcaagattaccacaatctattgcagcaccacttgtttatactccctccgccttcgaataaatcaatttgtagaattcatgctagtcaaactaactttggccttgtttagttccaaaaatttttgcaaaataggaataatatcacttttgtttgtatttgacaaatattgtccaattatggactaactagattcagaagattcgtcttgtcaattccgactaaactgtgtaattagtttttattttcatctatatttaatactccatgcatacgtttaaagattcgatgtgacgggaaatctgaaaaaattttgcaaaatttttgaggaagtaaacaaggcctttatagaataactacatctatcacaaaatgaacacctcatgaaaatatataaatctaatgatactaatttgataccataagtcttaatatttttttcaagaaactcgatcaatgtttaaaaaatttgacttaagataactttagaaatctatttattcatgcaactccgttcacatatagcaaattttaaggaaaaaaaaaaggaagtggatccgttggagatgctcgaatcattagaacagtgctcctgtaacattgtcatactagttttggttgtgttactttataatctcctaacacgtcacacgaaaactacaaaaattacagcgaagtgaatttagcataacttgttcatgcatgtgcaggttctttgacaaggctaccattgtagtagcgccatcctccaacgagaaagctccaactgcaaacagtccatggaggctttgtacagtgtcccaggtcgaggagctcaaaatgctgctccggatgttccccgtgtgggcgtccatggtgctcttctttgccgccaccgcccagatgtcgtccacgttcatcgagcagggcgcagccatggacaaccacgtcggtccgttcaccgttcctcccgcgtccctcgccaccttcgacgtcgttgccgtcatggtctgcgtccccatctacgacaccgtgctggtgcctcttgcccggcggggaacgggcaaggagcggggcctgtcgcagttgcagcggctgggcgtcggcctcgggctgtccgtggctggcatggcgtacgcagcgctggtcgaggggaggcgcttgtctctcgcccgtagcacgcagccgtcggcgtcgatgagcatcatgtggcaggcgccggcgttcgcggtgctcggcgcgggcgaggtgttcactgccatcggcatcctcgagttcttctacgatcagtcgccggacgggatgaagagccttggcacggcccttgcgcagctcgccatcgcggccggcaactacctcaactctgccatgatcgccgccgtcgccgccgtcacgacgcgcaacggggaaccagggtggatccccgacgacctgaacaacgggcacctggactatttcttctggttgatggctcttcttggcgtggtgaacctgctgtacttcctgcattgctccattaggtacggaggcaacaagaacaacacatgttcttgacaagcagctaggtgcttagtttatgacatcgtcaccatgacaagaagagaatacatccgactacatttgttggactgactctcgtgtgccgtggtggaacggaactctcctcaatttcaagggggtgtttttcctatatctacgtctatgacagaaattaaactatcagcaccatgtacaaataccttgggatacatagccttgctcgttcctataccgtatatattgtaaatatactttacattaccctcttgtttgaagacgatgtgccacgcgtgtgtatacataatttccactccactgctgtatgaatatatatatatatatatatatatatatatatatatatatatatatatatatatatatatatataagactgaattatcggggcagttgtctcaataatcttacacgggcaaggaccgtgcggccttgttcgtttaactgataagtcatggtagaaagcaatgtttgctgaatgtctgagagattcggctgataaactcaaaggaacaacatgggctagaatattaagagacaaaaacaatggctgtcatttaatacctttgactaataaaacttattcgtattaaattatacattttttctctcttggattatctatcatatctatca

SEQ ID NO: 3918 - DNA, 2723 bp, Sorghum bicolor
gtgaatgatatgaggcagatgaactttaattctttcagcaagggatttagctatgactttgtaagcaacattacatagactaatgggtctataatccttaggagtgttagggctttaactttaggaatcagagtgatacgagttctgtgaatatcagaaggcatgaatcctgtttgacagaaggttgtaagcagatgtaagacatcattacctgttcattcccatgaagatttatagaatactgcatttagaccatcaggcccaggggttgcgttactcctcatgtttttaatgatagcatgaatttccttcatatctggtgttgagttagtgaactggtcctcctccaaggtctgcatctgttcaacttcaatgttccatgataaatatccattcctgctatcccatcagaactaaaaatatccatgaaatatttattagcaacatcagcaagttggccttgagtggtagcatatgagccatctggattcagaaaatgggtgatggtgtttttttttctagatctcttaatgatagattggtggaagaaactagtatttctgttgccagcaacaaaccaattctttttgtatctctatctatggtaggcttcctctctatccaggagattttcatgttgaaagatgagatgtttctagaggctgggattctattgatcaggaggtttcatttgaagtggtaaaatttggtcctctatgacttgaagagtagcagaattcttaggtttggttctttgccatttctttaaatctttggcaagaaagaaggttttgatatgaaatggtttgacagaggatttttccagcttgctttagccacattctcataatcatcactgagtagccaccaattttcaaacttaaaaggttttgaagttttacgatgagaagaacttaaaacaaccaggataggagcatggtcacttttcatcatcagcaagtgacaaacaacaatattcgtaaactgcacacaccatgcagcatttgccagaaatctatcatggcactcataagttggattagagtcaaagcgcttattcatcaaagtgtaagcatggacattgtaaccaagatcaaaaaaaccattgtctttaaccaaacaacagaaattagagattaaatgacaattagcaggttttggccccaactttttagttacaacataatattgttgaaatcccccatacaaataaagggaaatacgattgagagataacaaaattatgaatttgctgccaaatccatttggccctaaggtgatggggatcaccatagacacatattagaccaaattttttatgaatatgcttatgataacagatagctaagatgaaatgattactggactctaaaacatataaatcaacttcactactaacaaggagccaaagaccaccagactaaccatcagctgaaacaataggcatcgtcaacattgaatttattgacacgatcttttttagtgattttacagtttctggttttagagacaaaaattacctaggcattgatagaagagacgaggcgggtgacatggtgcatcttgatactgtcaaggctcccgctggatccttgacagttccaattaagctagtagattcatggcacacgaggctggaattttgttgggagtagaaaaggtcgaatttacataagcctgtccatcatcaatagaacggttcaaaatttgaaggtatctcatggcacatgtagcaaggtcaatgtcaatattgcaaggattgtggggatcaacagctttgggaggagggtcaggtgggttgggaggaaccagacgatggcctctctcaggagtgtactcatgctaggaaggaaaaaaaaaagagcaaaaagagagaaagagcaacaatggtgaaaagcatgcacaaggagagaaaaggcaacgataacacagaaggaacaaatcagaaggagactagaagtagccgctgtggctgctgcccctgcccttgatggaagcagaggcggaggcacgttgcgcgccaccaacggcagagcccccaagcacgcgaagattacaccgaatcagaggcaatggtggaggtggctgccgcatttgcaggtggttggggagggattcctacatatggaggagcacaggctagagttcacactgcagatggagaaggagcggatggagtcaaagatgaagcggacccaaaaaatgtcacacccttggccgccggtgaggtcgccatcgatgtgagcacgagaagatggcatgaatgaggatgccggaagggcaagccctctgcctttgtgacacactttagtgatatccgagttgttgccgaactcgacacaaggttagagacttatgtggcattacagaagctgacctcctaggtccatgttggtatttcttatgcacaattaaaatatgaaggattccgcaagcgcacagaagaccattgtagcattttaccgggagtattccaggtatcgttatttatattttaccactagaaaacaatggataaagatattgatagttcaccatcaggtatctactaactaatacaccaactagactaaagtaggggtaaataatagataataggaattatgcatatatgacacacaccgaagaattctatgataaaagagtaaatagctaaagtgagaggacaacgggagagtgcaaggttcctaaatacttgtctattactggggttctataataac

SEQ ID NO: 3919 - DNA, 4841 bp, Sorghum bicolor
tactagtagaagtagggtagggtagctgatgactcttgcccttttgacatgcatcacaaatgttattattattattggactctttgacaaaagaaagtttatgttggtggagaatctggtcgacgactttggaggatgcgtggccaagcctgtgatgccaaatggtcttagtaggtctaaaagtgccaagggcttctttatgcaggtaatgcttcaaggggtagagtcctttctcacatggaccctggaagattgttttcgccgttgcctgatccttaattgaaaaatgacttgggtgaaattctagaaaaacatgattatctcgtgcaagtttgttaacagataggaggtttttgtgggcatttggaacatgaagaatattatttagatgaatagaacgattttgggaatgcaatacactatgaccaacgtgatcaatagccatacctgacccatttgcggcatgaacctgatcgcctccttggtatttgtcccggacggtgagtttctcaagatcgccagtgatgtgatctgtagcgccggaatccacataccagtttgtgtcgattccgtaggaggtagtagtggcagccgatgcagattttggtggtgcagttccgtcgtagttggagtcgtaccgattgtagcatcgtgccgcggcgtgaccaatgaggccacacacctgacactggacgccggcgaagcgcccacgtccaccacctgcgcgaccaccgccgccttgaccaccgcgtggatggccacgcccgtagccaccgcggttgccacgaccgcggttgttgttggggttgtgttgcccgccgccacggcgagacatcatggccgacgagtgcgacccgccggaaccgccacgaatatcgcggcgctgttcaaaactcacgatctgcgcctgtagttctgcaagagagatcggatcagtgcgatttgcaactgaagtcgtaactggttcatactcttcccccacacccatgaggatgtaggagatcaactcgtcgtcctcgatcttcttgccggccgacgccatgtcgtcggccaggcccttcatcttggtgaagaactcggctgtggtggatgatcccttggtcgtcgtggcgagggccatgcgggtggccatgatccaggcccgggattgggacgcctggagcgtctgaatggcagcccacacttcggccgccatggtggacgtcgcaacttgggagaagatgtccttggagagcgacgagaagaggtaaccacgaacttggctgtccctggcaagccagcgcgtgtactcagggttggcggtaggctcagatttcttgccgtcggtagtggtagtcgccggcaataattctggcggtggtgtggaggtgggtttggtgaagtcccagagttgggcgccctggagatttgctgaaacctgggcaagccacatgctgtagttgcctcttgtgagcttctcggtaacaggaggaagaagacttagcgggagcatggtggcggcatcggaggaggtggccatgggaggaggatcgaaaaaaaaaatccgtgaggatatgttacggctctggtaccatgaaaacaattggaggaacaagagtaccccgtcgtgggactcttggttgcgtgttatagggcaggaaagcaagcctccatgcatggcaattacatcctatggtttacaatacaaggtgccactcttggtggatcttgataggactaagtacattctatggacatacaggtttctaggatgtatgaccaagactaacaactctaaacctctattttctaacaggagctacatggagctagtagccaagtttgacaagtcttgacaaagcatcgcgtcaatgattggtcaagcattatggacattgacccgtttctatctacatcaatatctagctagctgtctatcctcaatcctcatccatccatcccagcagtaagcaaagcagcagcaggaaacttcataaagatcaaccgacaatcccagcagtatgctcgctcgctcctttcgctagctatactacgcctataaattacaggagcgtgcacttgctgcctcaccgagctcgtcgatcacttgatatttttccacgacgggccggggcatatatataaagtataaacatacacatacagataatggcttcctctagccctcatcatcgtgcagccgtcgtcgccggcgtgctgctggtggtggcggccgccctgtgctcccgcggcgccatggcgcagctgaccgcggactactacgactgcacatgccctgacgcctacaacatcgtgaagaatgtgctcatcgaggcgcacaagtcggacgtgcgcatctacgccagcctcacccgcctccatttccacgactgcttcgtccaggtaactaccatcaacaaacgatagccgccatcatgcttgcaatgttcgttcggctgataaatcatggcaggaaatattgttggctaatttgttataagaaaaaaacacagctaataaattcaagcgaacaggctaactttttgccgtatctgtttgtcatctttagggctgcgacggctcggtgctgttggacgccttgccgggggtggccaactctacggagaaattggcgccggcgaacaacaactcggcgcgggggttcccggtggtggacaaagtgaaggcggcgctggagaacgcctgccccggcgtcgtctcctgcgccgacatcctcgccctcgccgcagagatctccgtcgagctggtacgtacgtaataggtgtcggtagtcttactaaactattcatgaagatggatggatgcatagcagtgatgtgcgtagaactggtaggttatccgtagttttcaacgggcaacgggcacatgcacatgcatgccggtttaaggtttgaaaataaagtatgctagctcataattaactccgtgttgttagcacctaatatctatcaggatacttcagttctactaattggatcttggacttcatcagttaattactactactagctagttcggtaatgagtatttgaatttttttcaatacgcaaaaaggtttgtgcaccattgtattaaggttgagaaagaaagtttttacaacgacatgccatgacacgtacgggtgccctactaggaggaccctatggttttacaataagcttctacacagtaggaacacgcatatcatgccgacacagatgccaaacaaaagggtttgtcgtgctgcaaacacaggccccatatgcgcctactttcttgaacatgcaatgcatgccgggatccattattgatctaatacgacaacatactactgatcagtgcccatgctctggctagacacctgtaactaattgatctcgtttcaatatgtacttacagtccggaggcccaaagtggagcgtgcttcttgggaggctagacagcaagacggccaacttcaaaagcgcagagaacctgccgtcgcccttcgacaacctcaccgtgctgcagcaaaagttcaccgccgtcggccttcacaccgtcgacctcgtcgccctctcaggtatatatggtgcccatcaatctcacatcgatcattcactgcatgctgtcgatcgaccgattcaccagccatcaaacttaactctgctgtctgcaatgcctgcacaacacaacaacaaatgcatgcaggggctcacacatttggccgggtgcagtgccagttcgtgacgagccggctgtacaacttcagcggcaccggccggccggaccctacgctcaacggcggctaccgggcgttcctgacccagaggtgccctctgaacggcaacgggtcagccctgaacgacttggatcccacgacgcccaacctcttcgacaaccactactacaccaacctcgaggtgaaccgaggcttcctcaactccgatcaggagctcaagtcctcgccgccggcgcagggcgtcacggcgcccatcgtcgaccagttcgccagcagccaggacgccttcttcgacaacttcgcgcagtccatgatcaacatgggcaacattcagccactcacggacccctccaagggagaagtccgctgcaactgccgagtggctaattaatattaattaacacgacgatagctggaaatgatgggtgaatcgatcacatcagcaagagtactgatgatatatatggactctatatatgatgcacatcgatcagcacctcatttcgtattgctgtcaacttcaattcatagttgtttataaatgtgcaataaagaggaactcaatttctcctgcaaaaaagaagcatatatcactgtatcgtcggttgctttgcaacatctatatatatgttttctttgttatatatttgcagcaatgttatttctccatccaccacatcagttagtgcatgcatcggcaacacagttccgatcttggcagggttcatggcgtgtctgctcgtgtttgttcatgtagtctagaagtgtgcaaccaaacaatgagcttcgtcgtatcctgggaattttagatccccaagcacgttaggttttacaagtcattctgcgtacgtgtcacttatatccccaaactattaatttgcaaatttaattagatccgtaatagtgggggtgtgggtgcttgttggtaccaaacactctctaatttccgtgacgttgctactgttcactccgtagcgggcgtttttttttgcccgttgcggtaaatcgtgtgatttaccgcagcgggcacttttaattaaccgcgacagacacttttgcccgatgcggtaaatcgatttatcgcagcgggcttcttaatacgtccgcccactgctgcatgatcgggcattagcaccggtcg

SEQ ID NO: 3920 - DNA, 2866 bp, Sorghum bicolor
ctcctagttcaccgtttgggtatatatgtcttcgaaaaaatattattcttaattcactatttcaactttattacgtgtaattgtgtgcgtgaaaataattgaatagggcataaggatgctgctgcatatgttaaacagctccaatttaattctcagatagctgtaattttaattttggcacaaggtatattttgcagatacctttgaggaaccaccacatgtgcttggtgggtgtttgtggtgttttcccatgcctataagtctgtatatttgaaaacaattgaatagggcataaggatgctgctccatatgttaaacagctccaaagtaattctcagatagctgtaattttaattttagtgctgttactttagcccaagatatactttgcggatagcaccaaatgcttgagtatggtttgatcttcaattactaaggataggaaatgttggaaccaatctagtctatcttagattctttgactagctcaagaacaagtaatttttgtaactccttgtatttcaacctttttttgttatgtgttcagctttggctctcaatatgctcctgtcttcttcataaaaatgtgaatctggatggatttgtacctaaaaatttcataaacttgactgaaatgtgatgatatgtaattatgtattttatctgttaatttaaacaaagttgcaatctcatacattatggtattgctcttctttttgcaggcgtttggtgaggctatctcttaattgcggcaatatgatcaaggtgctcacggtggctattttcgttagtgataaaagatttaggtgtccgagcaaatcatatgagttacgtgttgtacaagccaacgtcttagttttgtaggtacttgagtgtagcatggttattgtcttagtatttcgtgtgaaatattgtacaactacaaatgttgatagttttaatgaaaataatgagcaatatttgtcaattgtgagctttgttcgtttatgtgtgttgacatggcagcaaaaccatgatcgttcagttcatcaccatagtctctttctatagttgccctctggttcgtccaggacgatccaaaaaacaacccatgatgttctattttggttcaaaaaatgtatgacgaggaatagatgacgttcctcgtcacagatagttgccctctggttcgtccatgacgatgcaaaaaataacccatgacgttctattttggttcaaaaaatgtatgacgagaaatagatgacgtttctatggaccgtcacagatagttaactgtgacggattttcgcttatctataacagaatcaaaccgccatgtataagttaatttcctgtagtgagctggccgccggagtgtagtagccattgcgggggtggcaaaggaagcggtgagggcgagcagcttgtctttcgtcctgtcatttggattagaggatggtgggggtgaagcagcggggcgttctttttcttttttttttttcctcaggaagacacaaaggatacaagaccccgataaacaaaattgaattaacctggattttagttgaattgggcaattggcgcatctgactgcaaccattttgtgaacgtactgtactacactagaagaatcgcatgagttggcaacatatatagcgccacattatatcccgcgcagcagctttcaactaacgtgcacaccacctgacgtcccgtcgtccatgcgtcatccattcgtcatcctggcacactcgacgacctcacctgctgctggcctggtccggacggacctacctgaagctgcaggattatttatttgaccacctacacttttggtttgactcctcttgctgctgcggtgatgcgcagcaagcagtgatgtcagcagccgccgttgcttaactataaatagccgcgcgcgagcgccgcatacatcgcactatctcgaacagctcattaatatactcctgatcgagtaattaagttaagaaactactagctaggagcaaggaattatattaatggagagcagcaagaacaagcagcagcggcagtccgtggacgcagcttccggcagcaagcccgccgccgccggcgccaggccgcactggaggcgccgggaccccgcggacacggcggtctacgtcgtccagcccgaccagttccgcgccgtcgtccagcaactcacgggcgccgcttcgtcgccgccgccgccgccagcgcgtcagcatcaaggcggccatggcaccgcagctgctgctgctgctggtcgtggtggtaccagcaccaatgcggcggcggcgcagcgggagcatggcggcggcaggacgctggggcagattcagcaggaggtcatggcctgggcgaactctgacgacgatgattaatgcaggggaagatcgactgcagtgcatgggcatggcctcatcatcatatattatggacgctccgacccgacgacgattgagggcgggaagaagaataaatgacaccatatatgtatgtacatatccgaggttgctagtgtgcctagttccttcttccttattgcaaaggcagagtatctgtcacaattttatatatagcagttaactctcgtctagttttctggatgtgttatactagtattttggcaagcaatccattgtacacggttggtttatacgattaattctgtgataatcttcctcgtcttctggagagtttttgttttctctccaagccatcatatactctaatataaataatccaagaggcccaaccacgtccctctatccctactactgtatattgtatgacaactttacactatattatatatatatatatatatatactagcaggaatctcgcgcgttgccgcgggcacaatagagaaagctcagaaa

SEQ ID NO: 3921 - DNA, 5828 bp, Sorghum bicolor
caggacagaagaggaagcgggccatccatacctaagaccttaaaaatcttgtcaagttgatcaagctacaagacatgcgaaatcaactgtgagatttaaggtgcaaatgaatggcatacagagaggaaaaattgtataaaatgtaacacaacagatcatacaagacaacaatatataagtatctgcctacttgattttattaagatgaaggattggatcacacaagacagttattttgcttggcatgtaaatttggcagttttggtctaataatgtaatctggtagcaagataacaacaataattacttgagtgaaagtgcccatacctggaatgggttcggagtatttttcgcttccacaccttggaacaggggtttcagtgtgagcagttcagcaaaaatgcaaccaactgcccacatatctataaataatttaaggaaataactaaactgaatcgaacgagatgagatacaaggtaaaagagagatgtttttgctctcaaggcaaggataccaacagcactcgtgtagtgttttcccccaagtaacagctcaggagcacgataccagatagttacaacaacctgaaaatcattgataaaccatacatatacacagcagatattggtaacaaaccacatgctcccatgaataaaagagaaatcaatgactaccaaaaggttcagaaaatgtaaagaagggcagaggacagcagcatgcgtgctagctaaaaggaatgcatgtggaggtgctcaccccattgtcacataatggtttcagtggagcttgatatatcctagcaagtccaaaatcagctatctttataattccatgttcgtctccttctcccatgacctgtagtggcacatatggaagcaccataagcaagaggacgagtttgcacaaattgcagttatatttgtatatctgcaggtggcaccataccagtatgttggaaggctttagatctcgatgtataatccagttactgcaggagggaaagcgggggggaaagttgagatgagccactggattttcacgagggatttccatcaatcaaaagcagcacataatactccagttacctgtgaagatagttgaggccattgagcagttgccacagcaaggatttgacagtgtatgggttaatagaggagctcagcttctccctgtgatgcctgataatctcctgcagtttgtttgtttggtttggttaatcaattacgggaacgaagagaaaatgaattgaaaacaccatcacttacataaaggtcgtgctctgcgtaatcgaatgcgaggtatagggacatgtcagcgtggttgatgtgcacattgacgagcttgacgacattctcgtggttgatttcgcgcaggagctggcaagcaaccaagtaattaggctagggtttggtgctccagccgcagctaaggccgaggttcgatagtaggatggaaagcgtacaggagcaagaagcaaagcaaaggggggaaaacagaccatgatctctctaattgcggtgggtgatactccgtccccctccttggactgcttgaacttcttgatggcgataggggggccccggcggccgggcgccgggtgggacggcttgaggcgcgcaaggaagacgagtccataggtcccctcgccgatcttgccaatcagctcatactgctgcagccacgccggacggttggcgccgcccgcgcgcccgtcccccatccccgtcgcagcgccggccagtcgccgcagctgaaagtcctcgtcgtcctcttctccgacgccgtgatggcgctcggcccgctttccttggcttgttggaccaacggcaacgaacgccgctaacatatctgctcgcggttatgtggaccaagattatagttaggcccaaagagaatgacggcccaagtcgcaagaaaaagagaatgacggcccagaccacataggactaggcccacgcaacgcaaggtcgtcttctcctgcagtgctgctgtgccaagaggagagtgtgctgtgtgttatccatttcttctcctctgctctgctcgccgccgccgctcccgctgccgctgctgcagtccagttcggtagttatggcggccgggagtgccagtgccacggcgtctctctccgtggcggcggcagcggctgctgctctgcgcgtcaggcggccatgcgctcgcgctcgcgcttgggccccctcgcagcggccgcagcaaggggcactcctcagcctcaagccttgcgcctcactggcaccacacgcgcctctgtggcgggcggagtcggatgccgcgggcggtggtgccggcgccggcgacgtcatgggcctccttctccgggagcgcatagtcttcctcggcaacgagatcgaggacttcctcgcggacgccgtcgtcagccagctcctcctcctcgacgccatcgatccggactctgacatccgcctcttcgtcaactcaccaggggggtccctcaggtaaaggtcctatcttcattcccttattacagacttcatttcaatcctccttatctttaaaccattcattcgtcaccatggactactcttaatttgtgtgcctgcttcacttcgaaatctaactcaaggactgcacttgtgaccgctcttgctgcctttgagcgtactaatgttacctcaatcgtcaaatttatctttgcaatgcacaaactttaactgaattggtgaatcgtgaaatttattatctaacccaatccagtaatcctgaactttccattcctttaataacaactgaaaaagggataacatgtaggcatcctcaatcctatatgtgatagcacaaatcccagtcaaattcgtttccacgggctgactttgggtcttcggattctcatgtataggatataggcacaatggattgacaacttttgttagtcacgaactcaccattcatgttgtggactaattgatccaagcctatacaaacctataaccctatcagggttgacaattcttctgatgtctgcagtcacctctgtttttggtgcatccttgcagcaccgagtggctaattgatcctgttgctgagaattcttcaattcctacaaatactatttgttcactatatgtttctttccttcagatatatccaatcatagatgaaaatcttgtccgcaactgcatgtggattgctatgaatcagtttaattagtcttttccttaagttataaattcctgaagcagcaatcccttttactggaattccaagggagaagactacttgtttttatcattgaactattgtcggagtttgattttggccatcagcgaccagaaatctttgaccatccaactatcaaaaccattcacatgtggacatccagcggttttgagggtggttttctcttccgtcgacgacacgctcccctctccatgctctcgcttaaggccacagttgtccccttcttctctatctctccaccatgacattgaccctctctctcgacgctgctgcgtcgagttgacccatccaccacagcccaagcgcgcccaccgcatgctcgtccacgcgttcggacatggcgcacactagcaccttcaccacctccaatgccaacgaccacgctatagtggctgcccttggcttggtatagccgctccacggccaccattgcattctcaggctcccctgcaccaccctccactaggcactgggccagtgctgtccccaaaccacgattgggggcaggtccaacccgacatggctaggctcagaagaggggtcgaaaggatctttggggcacaagtaagctcatcctaggctcaaattcaacggagaagcagcagaggtggctggccatggtgatgcctagtggcagcgcagcaccgagtataggaacagcgaggtcagccatgcctaggcttaaagaagcggttgggaggaaccacggcctttcaccagacacagttcatcatggggtcagcgggggaagaagaacacccgagatggcagcggagagagaagaggagagaactgtggtgtggagagagaaacaacatgtagaggagggagagatggagaggggtctaacatgtgggccccactttggcatgtcatccatgtaagcgaaaacaaccttcaaaaatcctagatggctagacatgagtgcttttgatagttggatggttaagatttatggttttgtagtttcatggccaaactcaaactctgatgataattcgatggtgaaaatggacttccgaattccaaaacctatactactcgagaccttcactaccaaagtctagttataactgctgcagaactttttaaaggaactagtaatttaggctgcaacacctgtgttctgagttatctaactagtatcatgcctcattggtgactgcttattctgtcacattatttgcctaaatgggatcatgttctacttgtccatcatgaattataattttctgagcagatcatcaagccttatgctcatcatagaaatgttaatacaaaatctcatttgctgactgactgttttgttactctttcagtgcaacaatggccatctatgatgtaatgcagcttgtgagggcggatgtctccactattggaatgggcatagctggatcaacagcttctataatccttggtggtggcacgaagggcaagcgatttgccatgcccaacaccaggattatgatccatcagcctgtcggaggtgcaagtgggcaggccctagatgtagaggtccaagcgaaggagatattgacgaacaagaggaatgtcattcggatcgtgtcaggcttcacgggccgcactctggagcaggtagagaaagatattgacagagatcgttacatgggccctcttgaggctgttgattatggacttattgatggtgtgatcgatggagacagtatcatcccacttgagcctgtcccagagagggtgaagcctaagtataactatgaagagctgtacaaggacccacagaagtttcttacaccagatgtcccagatgatgagatatactagtctaaaagttgtattttctacgaatcttaagtctgttgttctgcaaacagttgcttttgatcgcttgtagctgtcaaacaaatttagcactagcagtagcttattgatctggtttactgcctattttactgactgaatgttgattcgagctggcaactagaaccagttggttgtgtttgtgtttgccatcgcatattgtgtctggtgttactgtggctgtggggttagaatgatctggctcaggccttgtttagttcaccctaaaatttaaaaactttttaagctgtcacattgaatcttgtggcatgtatggagtaataactaattgcacagtttgtttataatttaagagtcgaatcttttgagcctagttagtctatatttagacaataattactaaatacaaacgaaagtgctactgtatcaaaatccaaaaagatttcagatctaaacaaggcctcactggctgtttcgttttgagttctgaccatttcaggtgtggcacgttgagatcagtcaactgtttgattttttttttaccaccagcaaaagcttctacattccatttcaaaacattgtctctatgaagataagtcttatcaaatacaacgaatacgtaactctaaagttagtatggcatgcaatgatgacaaactcattggcttaggaaatatgtgttccaatagacagatttcaaaggagagtaaaaagttttcagctctgaaaatgttctcgaatttattcactgccatgtgcctccaaaacggaatgaaaagtttgacgtaacaagtatttctttcttaaac

SEQ ID NO: 3922 - DNA, 6170 bp, Sorghum bicolor
gctcttcctgtgagagctcgtggccactaatgttggcctcacctctaacctacgtacccccaccctggtggatgtgtttgtgaatctattgttccatgtgaaagaatgttaaggaagaaggtgaatgagagagatattcgagccccaccctaatgattgctaatgtaacaaaatagccgaccatcctctctctctattatccctccaatcaaacataaaatagggataaccctatcccttaaccaaacaataaaatgaaatcatcccattcctgacaatttgggagggactcgttctatcccaccttgtctacgaaccaaatgcaacagtagatccctctgtctcacgaagaaaaacattataggatttgtagctagggacgaagccagtggtggggctaggggggctctagcccccctatcgctgctgggccagtggagtacctagtgctccccttctagttttagacataaatttataagatagggtgggctgagatctttattttttaaatatattttgtgaatttcatcattggttgatgtttttaatataagactactttaagctaatatatttttctattgcgagaggttatagtcaatgtagctagcactttttgttcagccccctaaattttttcctagcttcatccctatttgtagcacaaagtaatgatcaagcaaaataacttaattattatatacctctcaaagctattagtggagataataattaagttatcataggatttgtagcacaaagtaatgatcaagtactgaatatagtattaaacagtggcataatgtttttgtttgtcagacaaattttggatcagatggagtaatcatgaaagaaggaacaagcattcaagttaagtatttgtatataaaagtgacaagacggatgcgtggttatggtttgacggaacaatgtatagatccgaatatgactggtagcagcaggtaggaagctagctaagtgcgcacgatcgacgacgaacgacgacgacggtgagacatgtaatgtgagtatgtgacgggtgagatgtaatgtaatgcgtgaaatgagtgagttgaagcaataaggatcaacaggtagggtagctagctaggatggaagagacaggtgatcatgcacatatttatgaaagtggtgatagatttgattagatggatcgagggaagaaaagattggatgatatcccccagcgctaggccggtagccgcatatatatcctctttcctgctttagctttaccactccactccactccacatcggatcatcgcaggatcggactgcatgcatgcgcatacttcattgcgccttgaaatctattgcgccggccggcttcgcctgatcagtctcgattcattcatcggcagatcgagtgcgcacactatgacactaatcaatcaattactcagaatctgatgatgcaactagctactagaaacatgcatgcagtagagtagatcgctagctagatacatagagactgatagacagccagcgatttgctgcgcaggtctacatcccatttcattcttcaatgagtagcatcgtcgtttcttcttctttttctttctttccgcatcgatgggatggtggacacgaccaaagagattcaattcacaacgagtgggctcctccatcgcaccactagctagctacctaaactgctttctgctttcgctgctggcgggctgcggttgcaccgcaccgatggaggaggacgatgcagaagaagaacgagacaggccagatgatgatgagctgctgaactgaacatttttttttttttggagaagacgttgctgggctgaactgatgggcggtgcgcgtcgattgatttctgctccaggctcgatgagccggcccacttcttcggagcccagcccagcccacgtatactaataggcaggccgcccgcgacgagccgagccggacggaccgaataggagaagcgaaggcaggcaggcaggacaggagccaccagtttccaccgcacccccctcttcgctccggtccggcgagtgagtcgtcgtgccgccggtatccatggcggcggtggtgcgcggcgtcttgaggggcatcaaggagaagggactcaccaacttcatccgcgatgcccgcgacgaaggatacttgtaacccctccacctcccgtcaatatcttctcgccgcgcaaatcagattgccccccatttcgattcatctcgatccagatctctcctctcttcccttgcttttatgttatagaatagattcctcgccgctagtatttcgcggatctgacgtactagtttccaacttttaatttgtttcgattcggctattcctgcggtgtgcgctctggcctctggggcggggaaaattacaagtagggttcctctccacagctatttggtaggataagtaaggctcacacaacactagaatcacttatgttgcataacaaccacaatcctttcgctgcaaatgcaagtgtggattcatttttatcaggtatacatcaactaaaatgcccgtttgatcgtgtgcagcatacaacatacattgcttgcttgccactgcttgttagatttgatccattccacgcgcacttatatatacctttcctgcattatactacatgtctcgaatttttatgtgatgaagtcagtccaagatattgtagaactaggcatgtagccttgtatattgtggagcaactttttgagactgtcggcaaacctagcgtcatggttcatagcaatcccttcctggtgttcatgcattcttttttctttttctgctgtatactaccttagtaccatatactatgtgtgcagtcagatcaaactgcttggccagacattgcaaattattatggtatgttaatagtgaaaacaacataatctgctactccatgtgccaacaattagtgtaatcaatcttgatgggctatactcacttcacaacaatgattacttacagatttccactgacctggactccttcaaaacgacacactatggccaccaatttgaatatttatttagacctggtttagttccaaaaaattttcaagattccctgtcacatcgaatcttgcggcatatgcatagagcattaaatatagataaaaaataactaactgcacaggttatctgtaatttgcgagacgaatcttttgaacctagttagtccatggttggacaacaattgtcaaatacaaacgagagtgctacagtacctgaaaccaaaaaattcggcaactaaacaaggccttaactgtttacagtagccatgaatgtttggctgtcttgtatctgtgatcctttatttttctgcaatggagtgtcaccatgtaaattgtctgtcacatgtttctatttccaggaatcgtctttgtgtcatgcctgatatgagttcctggtttggagacatagccaaattctataatgcatatataaatgtgttgttgacatattctaacatcttgttatttacagcaaatgccttctggatgggaaccttttgtaagtggccacctacctgtcctccattttcaaggaatgagtgtggttatgtgtctcagctgtcagcacagctaatctttttttttttcaggcaaacgaaaattcacaatattggcgcaacacttgtaggagttgacaagtttggaaacaaatactatgagaaactacatgacactcagtatggtgagtaaactttgttctgctagttgatgtgccatggttgtttttattgtgaaattattatgtgactcgaatgtagatcatgaaaccagtagactgttattggcagcaattatatttcgcctttttttttcttctcgattctcaaacctattagataaaaccttaactgttattactttgggcttcactttgctgatgtgcatctgtttgtaggagcaaaatatctctttcattgctggtcattcccccttgatagtacaatagaacactaagtttggtaaattttgcaggaaggcataggtgggtagaatatgcagagaaaggtcgttacaatgcatcccaagtgcctcctgaatggcatggatggctgcaccacgtcacagatagcactggggataaggcaagtttccctccatgttatttgctttaaatcctggattttcatgcttcagtcttctgacatgcttgcaactgtgcttgatgccttgtttctttgtcttgattatgtgttacaattgagcaccagtattgatgatttcggattttgtttaatatagattaataaagagtaaaatacactggcggccttttaacttgtcagcctgtgccactttggtccatgaacttgtaaacccgaaaaagtgacccctgaacttgtccgcccgtgccactttggtccatgaacttgcaaacgcaaaacagtggcccctgaacttgtcggcctgtgccactttggtccataaacgtgtaaaggatctttcaacgcgtcaacaaatatttatttatttcataactaattattaatgaaatgctaaattcatgaaatgttttgtgtagcctcttcatgtgtactctgcctaggaaaaatatgaaaactagaaaacgaataatttttgcttgttttaaaattatctcttttaattaataaatgcaacgaattgatatattatttgatatatttgacgctacgaataaaaatatatcaatttcgtaaattaaaaaagaagtgctgacatcattgctgacgtcagcaccataaacggtgccatgcatggcctaccagaggcggccacgtggcagaacagtgccatgcagccggtgttattttcgtatttgcatgttcatggaccaaagtggcacacgtcgacaagttcaggggacattttttcgcgtttgcaagttcatggaccaaagtggcacatgctgacaagtttaggggcctctttttctcgtttgcaagttcatggaccaaagtggcacagggcgacaacttaaagggccgccaatgtattttactcattaataaaatttggtttctctgaaacacttcatgttttttatgtcacccacatttttaggctatttgcctgaggggatgtgggtgtctatttcatttggtgcaaggagcttcaaggcgatatcttaattagtatctggaagtcaaaattggttaagctgagatctggtgtttttttatattccctgtgttgcagctgctgaaccagaagactgctaggtaccttgtagagcacaagcagaactactccggtgagggtgaagagctgatctaccactccaaggggcatgctttgaatccggggcaaagggactggacgaggtatcagccctgggagccaaagaaagagcaagcctagcttctgagtacattgtggggaagctgctgaaatgtttgtgttttcttacatttcgttgggtcaagtatcaccgagctggatagcctctgggttattgcttggactgggcccaaataatgatctgaataccaataatgtacaattggatcatcttttgacattgaagtgttgttgttactgctgtaaaagcagctttgaggaatatctcatgcagttgttactgccttcggttgtctctaaaattgtacgagagattatctgtcctgttgtctggttgggggagctgtctacccagctgttgggtggtgtttggagacctcacacttgaatttcatgaccatggatgaagatccagcgctctacggctttcttgtcatctctttacttattcgtaccacggaccatttctttttgggaggtatttgggtcgatattagttatttttccacagatattttaggacagtcttaatggcatttcatcaaagtttcatggatattaaatatattgatgtggcattgtattaatagagaggtgataaaatttttatgggagtagagtttcatgaggatacaactcttctacactgttttcaaaatatagatgcgttagaaagtgagtcataaaaccctcattgcccactaccaaggttccgtccacctattccgtctttgctgaggcatcactatgacactaaaacccttatccatcaaacaatcacttgatgctttcacccttgccatctaaccatctttctcctctttccaatgtcactaccaccttgtcttgccactcttatcaccgcc

SEQ ID NO: 3923 - DNA, 7178 bp, Sorghum bicolor
atgcataatataaatgaagagagatgtgataaaggttttatgagataaaatgagtttaatatgatgaaatttgtctacattgtttctaacatagtggaatactgaaaactaggatatgatatgagatctcaccgaggctggtcctaatattgacaacgccaattttaatttgtatgtctcgtttatgtataattatagtatcgttagacatggcacttatcttacttttggaattaatctgaacggtctatcttcatatctgcgttttttccaacaagacttgaagacttctagcaatcagccatatcaacgattgttaggtaaagtagtacctatgatacctgcaggctgcataaagatctcagctctgcagtcagtcatactgacttagaggtctgttccagaacgtcattgttcatgcaagtatttgtagctaggccttgtttagttcaccctaaaaaccaaaaaaatttcaagattttctgtcacatcgaatctttcagcacatacataaagtattaaatataaataaaaaacaaaaactaattacatagtttacctgtaaatcgcgagacaaatcttttgatcttagtctataattggataatatttaccacaaacaaacgaaagtgctacagcaacgaaatttaatgtatttttacatctaaacaaggccttagtagaagagaagctagcacttagaaagtttatttttattagatgtcgctttagaatgaaattgcaacatgatgtcgatggaaatgatgtttggttttctctagtgcggtagtgcctagccgtggagtaggaaatcatgtagaaaaaacgcaagtacaaactctgtgttgtttagatcagccaacaaatccccgatggtgcgtgggccaggtttctccatagattcgtgaaacacgacgtgtaagtgcgatttaggccttgtttagtttcccaaaaatttttttagtttggggtactgtagtgttttcgtttgtttgtggcaaatattgtccaattatagactaattagactcaaaagatttatctcgcgatttacagataaactatgtagttagtttttatttttaactatatttaatacttcatgtatgtggtgtaagatttaatgtgacatgaaattttgaaaaaaaattgactttttgtgtgaactaaacaaagcctcaccaaaattatacatacgggtacaccagccagcaacttttattgtaccatgaattatatagacttttgttaaaaaaaaaactgaaaccatcgatcggctgcctggggaaaaaattatgaatccggcatcatcacgtcgcctttgcactagtaacgcacgcaaactactacttactccctctgtaaagtcattccaagaatcttggtgagtcaaatttttttaagttttatcaaatttatattataaaataataattattatggtactagctaagtatcattagattctttctaaattatatttttatagtatactcactttacgttacaaatcttagtatttttctctataattttggtcaaacgtgaaaatgctttgactctctaaaattcttggaatgacttacaatttaggatggagggagcagtagaatttaatttaacaagaataaaaatctgcaacgtctggacggtggtgatgcggctgatgtgggcgcagagaccgttgaccgcatgtgtgaaccgttcgatccaggcacgtcggcgtcacggcatttggcattttgcttacgccgcaaggaaagaggcggggcaacttggcatccaagtttgcgccgcgcgtacccgcgccaggtggggtccgggcccacgcgtcggagagcgactgaggacgtcgggcggtgggtggggatagaccggaatataataatgacccaagtggggccacggcaaagccgtgccgcgtgcgtggacctcgccctcatctcttccgctccgtgtccaataattcttctatcgccgcataccctcctgcgttcctcccaccttcgccctccgccgccgccgtcgtcgtcggtcgattcgtgctgctcccacctctagcagcagcagaagaagaaactccggcgaggacccccccacctccggccatagcccggggataaagtggggtcggtaggcgagtcctagggggagcaaaggggatcggatatagagagatgaagcaattaaattcttgttcgtccgccgtcgcccctgctaacgctcccgctactaaccctaggtaagcatcgtcgatcggcggatctgctttttctgactgtctgattgctcggcgaagtattttcgatctggaaacattttttgggtatctgtagtcctctcatgttggatatgtgtcaattatatgtgctatatgaaggtgtgaattgttggggctaaagcagatttagatcacaagttgattcttctatgtattgttgacttttcaaaattacattttttttattcctgtggctgcagttttgtttaattacttgttaaattatctaaaatccttgcgtgtgatacgtgtggatcactttccatgaggacagtgagtggattttgtcgtaattccgctgaattttaccctgtgcaccttattctgatgtttacttttattactttgagtggtttactgccctgccatgtgctatgggatggatatggtcgaagatacaagttttcttgctccatgttcagttaaattcatgattaactactaataatttgtgcatgaaagagaatatttggtgctttaattcatcactcaatagattatttcataaccatgttatctgtaggtttgtacaagtatcatgttccctctccagccgcagaccgtcatgagtgatgactaataatgccatttaagaagtaaaagcttctctacctatctatatgtttgcagcacaacctaggcatagttggcaattggttgacttactttgcatggaaagacattattgcgccacgacaaaagaaatgtgcacttctataatctgtttggccatgcttaatatgacagctggtgacagcattaagattggtttctctaggttctcacggcaaaatcaataccatagttaatccttttctgagtgtcctccttttctgagtgtcctgctgtaatccatttttttttacaagagctgcaatccaatattattctgttgtatatattcaaagtgcagcaacaatatatcttactgatttctgttgattttccctttacaggatcattctgtcatttctcgtttcttatccgactctctttagttttttgcccatccgttatgaggttgagcatcttctgaagcttctctactagattagtgtaaatagtagacttgttcgggtttagcttggttggaagaattagtctctggttcgtgttcatttctgctagcaataatggctgcgatgaacggaaaggcattggataaatgtggaaggaacataaatagtctcaagagaaagcgggagagccccgctgcatatgatgctgacgtattcctcacctctgaattacatcagcatcctgtcaatgattctgctgttaggtttcatgttgatcaagaccgcaaggcaaagatcgtgtgccacttcaacaagcaggttttgcagagctataagaacttcatgagtagtgcaccacctaagcgcattttgcttcgcaaaggtgctgtctggaaagacgttccagaaaagattgtcaaattggcccaagccgacttcagggcaaaaaagacgatcacagaaacaggatatcagaaccatctatttttgctcgattttgcccatatgacattcatagacacaaagacaggtcttcagaggcctattgcttggattgatgaaaatggaaagcgctacttcccggaatcatttatgcaagatcagaaattatttatcaagaaagattttggcaacggaaatcctgagtacattagtgttgagccaaatgggacacgagaaatgaatgaccagcttggagcatcagaaagttctgcagaaagctcaaactttgattcaagtactgaagatatttccagtcctaagagatctagggctgaaaagaattccatcataaaaaaatactgtgatatgggagaagctattggagaaaatgagccatgtgctttgttgcctacagcctgtaacctactgccacaccaagctaatctgggtgaggtatcacgtgctcagcgcactattgaagccgtggagaagctgttgctgcaggggatgggttcagttattgaatccaaggacattattggaatcttcaggactccattattggatgaccacagacaagtccgttaccatattcaccaaaagcaagtacaggttaccggatgtcatcgtggaaatgcaaatgtccgttatgcatggcttccttgctccaaaagcactgtgcatgaaatgatgctgaatggtgttttacaagttcataagccgcccattaattttgcagcctatggagagggcatcctccttacaccagcaaatcgttctgatgcctggtatgttcttgatatatcaagtgttccatttatgtcaggattttccctcccccctttccaaattgttgctggcacctaactctcgtacctcatctatgtttcttagctgttcacattttctgagttcagttatgttttcatctatgtctcagatgtttgcacactcctgagttcattacttttttttagacatgctatattcagacgcttttagattgatgacagcaagtaattactttttcattttattattcttgttcctcaccaagttcattttcctttccctgacctttgccaaattcaatatttgtattactttctgcagtgtgaaatactctgatgttgatgaaaatggcattgtccatatgatgttgtgccgtgttataatggggaacgtagaaatagttcaccctggatctaatcagcaccgacctagtagtgaccatgttgatagtggagtagatgaccttaaaaacccacaacattacattgtgtgggatatgaatatgaataggcacatctattctgagtttgtagtcatcgtcaaattgccttctaaaaccaaaggtaactaattgcagctaccgtgtcttcagtttgacttatttgtttcttgatctgtggcaacccaaattgccttactgctaagcattttctgtgtcagattccttcgtgtctcaagaagagtgtcagaattcatctgatctgtcactggtgttgaattctagttcacctgactgtatttcagaggtaagatgctttacatggggtattaacaagatagtactgtaacactagagtcaactcctgttgctaacttgatatacagacgagttccactgttggagcagcaagagtgcagtaattcagattgtgtgatttgactcaataattgacttgtgattgcgtttttgagattataacttggagctgattatattcgttatctatgataaacctccaaatatgataagtttccctgtgaaaccatgctattttagtcatgttggagttggttaaagcaccacttaacaacttccttttatatgcataaaacaggagatgaacctggaggcacctccagcattgggaggtggatgtgcagcccccatgctaggagattcgatggaaaaggctccaagctcaccttggatgcctttctccatgttgtttgcagcgatctctactaaagtgtctcctgagaatatggacatggttattagttgctatgaagagtttaaggtctgatacacattttttctctctttgactgaagtcacctccccttctgtgggatccaaaatcactttttatttgtatgattgtgtatttgccagagtaagaaaataagccgaggtgaactagtaaagaagctgagacatgtagttggtgatagagtgctaatatcgacgataatgcgtctccaagataaggtgtgaattgttctacttgtaccttgctgatacagttctcttggattctttctgaaagcctgaaatccttttagctgtaaggtgtgtcagctggtggggttctgggatggaccgccagtccgccacgcaccgaacttctgaaggcctatatgttttgctgtgaacaagctacttttcaagagcatcagaacagcagtggtttgataacctgtttcttttcactgttttctgaggaaatctttttgtttccgtgtctttttggctgcagttacctccagtggagaggcgtgaggcaccggacgcatcagcggccaagatggtggcgaaaccgtgaggtgggtgtcatcgtgggcgaggaatgcagaagggaggaaccagcggacttgacataaaaccctgtgggaagcagcaactatgaaagcctcttgcagtcttgcggcatcagtctttatatatggcggctgctgtttgttctctctgtgtcataggagtttatgttggcgaggaaattgtatctggtgttttttcatttcaaagtaaactatgcacgcagctgccgtgctttttgaaccattggaatggttcatcagtcgaaaaggttccttttaccttccagtttgcctttctaagataacagagttgagcattgttgattaatgttggtcttacatatatatagaataatatgtgaatatactatgtttttgagtctgtctcttgctgcctgtcgtgtgtgtattctgcacccgtggtagccgctaagagttagtccgtcgagttcattttatgcatcaaccgacagcctctctcttatatttattattacacccaaaatggtgatgcagagaattcttgttacattattgtccttagaatacaactgcgcggaggcagaggaggatggttcagatgttggttggtggggcgtcggattcagggtcccagcctggaggctcgatgttgggccaatcgcctctgcaaccaagcctgatgtagaggctcttcttccctgtttgtcccccatcaaataacacaaaacaaaacaagcatgccatcagtactgcacaatgtgggtctgcatcttgaggtcattggcaagctcatgctcatggaaggtaatcatctggtgaatgcatgcatacctgccagcttcttgtctgctaaggttagctgcttgagggcgacgaggcagccctgcgcaacagctcgcgtgtac

SEQ ID NO: 3924 - DNA, 5032 bp, Sorghum bicolor
aagaaaaaggtggtatggctgctaacattttcaactactttctccactattttatactcataatggaaaatgcacgcacaaagtcaactccaagcacaagttgaagcatcattatttagtgttacaatgacaaagaacactatctctggagaaatgactggtgcaaagccaacttctttagtactaggtactagcaaaacgttatttctgaaggcactgcattactgcaaaacatggcctctattagaaagctaaaatgcagaccctactggctactgtaacaaactaaaaacatcattcacacgatctttagagctttaccaattttgttcatatgcattagtgtatggcagcattcatttacatttgacaaaaagaaatgaaaaatcatagaaaacacaaggattatcatacaggataatctaattgtcaagtgccttgctttcactgcagaacacataagcattgccaactaagcaaaacaatttttagaaccaatgtacagagccctaaaaaacccttaagacactgcacattcattgtcaagttcaacatgggtaacagaaattttaggtaacagaattcttgtatagatgaacatttgtcatcgttaaggtaggtataatgaaagaataagcaattaagatcaccaaatgatacacatctaatcaggcatccatcagttaatgaggcatgggacagagacatacaaaaagacagcccagacaaaagaacatatctatgtttttaacatttttatgccaggatatgaattttaatttgcaagcttttcaacttacaactgaactaaaggtattccaatgtcagtgatcgtgagagctaaagacaacataaatttgttcaatgcttattgatgtatttgctgtctcaccaactaaaatggcaattgtacctcttgagaaatcatgcatatctgtttcagaaagaaaaggatggatcatgaatgtaaaacacaaggcaggctgagtttgtaaaagataggaaaggcacatgtcatgaacaataccattacatagacatctcaatcacttgaaaatccatacatgtgcctgaaattgaattagcaggaagcaaccagattgatttgaaactggaccaaatcatccttgatgctacagcatagatggaatcccagccttcactaccatcatggagtcatggactaggcttcttgcaagcacaagcatctacaccctagaagttccttgttttcttggatgcctgccccagctccgagagttttccgtgttgcttgggcaggtaagcacctgataaacacatgcccccaatggggtacaaatacaaataaaatcggtagcaatcgtgtcaggaatgtacacagctcattcatcaggaacaggaacactaaactcaggccatatgtatatagattaaaaaaaactgaccagaaaaccaagttctgcaactattttgaggaagaatcccttgctgttgttgtgttctcttcttaccaggcctggagacgaggttgatgcgggaccgcggcgcggcgaacatccagctgtcgtcgtcgagcgacctcacctccctctgcagcgcctccatcacctcagacttgagttctgcaaggccaatccaatcggtcagtcactcttgactctctggggcactcacctgccaggggttgcacaagggagaaaggcgtatcaccagccatggcctcgtccttgcggtacagcgcgtcgatgaaatcggcgacgtcttcggcggctgaaacggctcccccactcgccgccgagacggtcgacctcgccggggagctcatcgcgccggctcttctcggatccgccctctccgcctgccgatttcgggggaacggggagtcggcgatagaagctttggtctcttggcccacctatgcttcattctgttgggccgactctagtcagtaacagcccacaggcctggttcgcataatggactcatcgacccatcagcttcgtcacccatccgaccaagcggagcacaccaatcccatcccccacccaatcgaaggagcggcggcggcggcggcggcgaccggagaagatggtgcgcaaggcgaaggttgagttcgacgagcagccgccggataacttcgacccgaagaacccgtatggggacccggtggcgatgctggagtaccgggagcacctggtgcgggagaagtggatccagatcgagaccgccaagatcatccgggagcgcctccgctggtgctaccgcatcgagggcatcaaccaccaccagaagtgccgccacctcgtcgaccagtacctagagtctacccgcggcgtgggttggggcaaggatgctcgcccgcccgagttccacggtccgaatcccttcatgtctcgtcttaccctttgatcgtcatgatcaattggtttatttggttgttgcttcttctctggttcgcagagcccaagaagaccgtcgaggcggagtagcggcgctgctgcacggcttctcgtgctgctgttcctggatcggagaggtgaggcctgctgaaactaagcgcagcttcaaatgcaatgttttcctttctattctatgaatgttgtgcgataatcaatctgtagtggaaaccgaaattcattccaaagctatttgtgatgctggaaatacattgcaatcactctgcattcctcaaattttgggaggcagtagtcacctggaaggaataaccggaaaatggagtataatagaatgagagctaaactggcaacgataaatacaagaagattttcagttgtctctgtatgtgaactgccttttccttttatgtatttgtaaggattttctcttgcttagcatgaatcctcatgtcctctagtaaattggttgtgctatcatcatattacatagacttgaattgtgaagatggcagcagtgttgttagcctgttaggtgttgcatgcctgggcccaggttatgtgtcaaacagctgagttaaaaatctaatttcttggttgtacccattaatagtggtagcaatcaactagtaattccatctgttgaatttccgatcttaagttactttctatacctgttttcagtagattcttatgagaggttgattaaagaaaaaaaatatccggcctccaacattcaacaggtgaatgtgtatagccacacgatacagaaacagcactgaggccaaaccaaaaacccgttacacaatccggaacagctgaaacaaagaatagcagaacagctcctctaagagcttatactaaaccacataccctcgttagatgtctccaccaacgctttccaaagacttgcaacatcaaaacttccagtaaatgacaatcttccttcatttgtcttccctctttctctttagacagctgcgaccaaagtcgatccaggatgtccctctgaaaatcacctctgttacctccccactaattaagcctagaacaatgatgacatgaaactatgaaagactgtgggccttcagaatggtgttgtatgaagagtatgtaaagatttggtaaaactaattctttagtaccagttttgaatgggtgattggagctaaggacaaattgaatagctgaacatattcactactacttgtgaatagctgaaaaaggctggaaaatatcatcatatgttcatagagctccaaagtctatgcatgctgcctagataacatggttttttttttttttgggggggggggagataatgaagagcattgtatcattttatgtagtgtttgcttgattcttgggttcgatatgaatggtataaaagattattaattttgatatggacatcattttccataactctatcttctgtaatgttctcacactgatgaaaagaaaagaaaagaagatattactattctcacaagtcacaacaattgcggaatattggatatatctcggttgtctattttgttcacatattagtttcttattagttccagattgcaatatttcattgaaacaggttatttttcttgtttgtttacttcattgcacatttcatgggtatgcataatcattcttctgtcttctcttatgttggttgatctgttccatgtatgatcccttgtgtatctttacaaattaattatggaatagacaacgttgtgtattgaactgcatgactaactataccagtcttttcttatcgttgtgcaggtgatctgatccttccattgaatcgaaagaagtaacttggaactgttgcaatttgtcttttacatctgaagctgctgatagacttcaaataaaatgttgtccaagaaaacattcttatgcccgtacctgttgttcttgtcgagctgtgtaattgagcgaattgtggcttgaaccttggtgcctaccttgttcttaaaatcctaatgttcgagtttatccagacggtgtttttttgtgtgttttttcactgtaaactgcatctttgatctgcaaggatacgaaaggcaccattgatagatgttgactgtttggtttagtggatctactagtacgtaataatcagaacttactacgtttttttttgtttggtttgggtggccacaaaccgattgagtgctgcctcgcacgcaatcgtttcggggccggttcgctgaggttcggccgatgcttcgctctgactgcagcctcattgctgcctgccaacacttgcatagttgtctctactatatgcagcacagcagcagtcaacaggccgcgaatttctatgactgatacagttacctgggtgtttggttgggtatgataaaatttaataaacaccgtagtatttttgttttatttaatcattaatgttcaattatagattaattaggcttaaaagattcatctcacaaattatcctctagttgttgtagttttgcaaatagtatatatttagtattttgtgcatatgtccaaacattcgatatgataggtgataaaaaaataacatggaaccaagaacgccgggtccggacttctctccaaataatgctccccttcattccaaatcaaacatatctgtagcacat

SEQ ID NO: 3925 - DNA, 3160 bp, Sorghum bicolor
cttgagcaaagagttagtaaataacaaagtaaagttttttgctctagatctacttgagagtttgcaagccatctatctcaataattatagttagttagatcattaggcacaaaagaactatgtcactacaagttaaacaagtgaactaagctgcacaaggcaaagctagcaactaaagctaattatactactttacaggaatataaatagaaaagatatgatctttataccgacgtgtagaggataaactaatcaccaagatatgaactaatcaattattgggagaaagccaattaattacaattgagacacacgattttttcctaaggttcacgtgtttgccgatatgctagtctccattgtgtcaaccaacatttggtggttcaatggctaagagatgttgcacgaacctcatcctcacgtaggacatcaagaagcggccccccaagcgaggtagttcattgacacgaataatccattagagtttcattggacgcttcgctagggaaggcacaacaccccacacaagttcaccggaggtggccaaaaacaatcaccaactcctgccacaacttcaccaccgctccaagccgtctagatggtggcaaccaccaaaagtaacaagaactctgcagccacaacaatcaccaagtgctactagatgcaagcactcatgcaaatgcacttggaatcacttctatctcactatgacgacgaatcaatgaaggagtggaagatgtttgcttaggctcacaaggatgtcaagtatgtcaaagtaccaagagaaacactcttgagtcggtcaccacgtatttataaatgctccaaataaatagagttgttggttctgtcactgcacagaaatcgagggcgtcggacactccgatggttagccatcagatgttgcgtccgatgcacaattgacggccacatgtcgctcttctgaatttcgcgtgtcgatttctaacagtcacaaagtcagtctgcgctgcagttaaagggggcgttggacgctccgatgaaaaccatcggacgccaacacctcatgtcggacataactcagagaggtaccaaaaccggtttctcgccaacggatgcgttcaatgggttccatcggacgcagccatcgttcgacgcacacaccgctcgaaaacctcgctcgcgactctgctgatgtcattgcttaccggacactaaacaatgttccatccgcgttcaaagtcagagtgttggacgcgccggtgcaacactatgtgttgcgtccaaacgccaacacgcttcagacgatgacccaacatccaaatgctaccgcggctagcgtctgctgagtctcgtgacttctccgaatagtgcctacggtgcaataaaaaatatgtattttattttcacaaaaacgctgaagggagcagcccactagggctttattttaagctagtcgaacacagtggtgagttttgggcatctcaacgatatagttgagggcctaaggtaccatccatactagtggtatttgtatgaggggtaggtttaaaggtactataagtaaaaatatgtttgtagtagcgttttttaaactaatgtctatgaaaagtggattaagtccagttataagaatctttctcagctacccttacttatatatgaacctgatcacttgtctgaagttatgactgaaaatattattcactgatttattgtgagagataaacactgctgaatatctattagattatgtagataagctcaaataaataggctctaagacaaaagtatgttcctcttgggctgaccgtgacaattcaacacaccgctaacgctaaaccagcaacaccacttcaaatttctatttttgggcattctcattccaccgatgagcacgtcccgcttttgtagccagctaactggtggaccgttaaattcatcagaccattccggccgataataaatcgacgtgtggtgggtcgacgacgtacttctttgcccccattcaagttagaacaatggcgtcagcagcagccgccttcctcctgatcatcgctggagccgcatggccttcgttaatcgacgccgctccgtctccgtcgtcgtcgtcgttcgtcccgccgccgccatgcgcaccaccgcgatcggcggtggagtttctccgcgcgcgctgtgccagcacgctgtacggcgtggcctgctacgagtccctcctcccgtacgcgtgcatattccgtaccagccacgtcaagctcgcccgcgccgccggcgacgtcaacgccgcctggatcagctcgatctccaagcgcgtcaaggagctcgtcgcccgcggcgctgctggtggcaccgccgtggccgagtcggctgcgctccgcgactgcgccagcacagtgtcatcggccgccggcttggccaagcaggcggcggccgagctggccaagctcgacgccgccggaggcgccgtcgggagcagcaatgtccggtgggcgatttccaacgcccaaacgtggctcagcgcgtccatgacgaacgaggcgacatgcgccgacggggtcgcggctacaggcgctgcagcgtcgtcgccggtggccagggaggtagtgatggcagttgtgagagccagggagctcacgagcatcgctctcgcactcgtttatgggataccagttcctccgtgatcgccagagaatccacaaactgcttgtagttccgttaatgtttcctctctagacgctcgaagatagatttccaattatatttgtggaatgtttattacatgcaaggttgcaataaaataggaacacttcgtagcgatgaggcaaagccatatgattaaatgtcaccgggtcagtctaaacatactaggactagctattttacaccctaggtgtagaagctacaccgaactgttatactgagcaaaattcagtatcgttcagtatttctattttagtattgttcagtattttgtgatctagggtgttagacaagatgatactgaacactctacgtactgctctctacagtactgctcagtattttttctacctagggtgtagaatagcttgtatatatgcgtcatcggtttaccacagtccacatgtacaaacattccaaggatattttatatctaggggagaatgagtattaatttactactccagctgttctaaattat

SEQ ID NO: 3926 - DNA, 4323 bp, Sorghum bicolor
atttatcttttgatgatacatcaatttcataatctaatgattggaacatgaatttgttttataaacaaggcactaattattgcttgccattgatttatattattattttcatttcatattactcaaatataaacccatctacaaacatacacttcaatcaattttagaacaagtcatgtagtcagggatactgaaagccctatgtttggttttagataattgagacaactaagtggactaaattttgctctagtattgttcatgagataggttgatccacatccaaggctgagcaaagatggcacatgcgatgttggtgatggcaaaatggtgacaagtgctcaattattagaaaagaagaaagagaaaaaacaaaatacaaaaaggctttaggaaaaggtataagctaggctattttgttttgtaggtcaagacataataaagtgcatgattgtgttttggatagatagttatactattaagagaagaattcaaagttcaatacggttatccatgtgccactaggtgaactaactccttacatgtgcattaggatctagtgagtgcgctaaaaaacctttaaaaaatgctaactcgtgaacacaagtgatgaaatactttagagttagcacatttaaaaaagggtgaaagaaatagagaagaggagctctctgtagagcactggacaaagagaacgcttgcatgtgttaaacttgtcccatggttaacctagcggggatacctttagtgtagcatcagacaagtgtgtggagacgtatcggacaaaatagacgcactattcatcacgcggaaccccacatgtcagaatgagcgcaggcacggtagagaacatcaaactttgttgctttatccagtgcagggctcagacttgtttgatggccaaaaagtgctctcttgaacctctttggactatatcagacaacgcgtggacatttgtcttatgagcgtcaaacaatacaacatcagacatcgcataaagagctcttgtgtgccaacggctagtgacacacggtgttcgcaggagcatcggagcggggctacatttgtttgatgttaggcactgcccttgtccgatgggcccgatttttgctcaatgggtgtagcgtttggatggctccatttgaggctataaatagatagtggtcagctctcttggctctccaatgtattgaaacaccttgtgagtataagatttcgcctcccactcatctcttttaagattgcatcatccaaagtgagattaggagtgatcctactgcatttgcattgagttgagacatctagtggcactaaaaatcatgtttggtgtatgattcttgttactctcggtggttaccgacatctaaatggttagagaatttagaagggtaacatatttgattttagagttaaggattaacatatttgattttaaaattcaagaaaaaaattagactcgaggaaggtacagtagacttttccgtgtctgaattgtctcatcaaagctattgagaagagacagctgggcctgcaggcccatcttcccaacaccctttcggaaaggcccaacgacaacatgggtctacatgtcagaaaccactgctgggcggtggtttgcgccgcatttcgaatcgaaaaactcaaacccctcccttttcctcgtcttcattcaccgccgaacccccaacccgatcgattgcaacattcccccgccgtctagggtttcggttcgaggctccgagccctccctcccaatggccaaggtcaagcggtcgactccagtgaccgcgcccgcgcccgcgcccttggagccgggggttacagccgccaaggccaagaagtcggtgtacgccgacgcaaagagccccgcggcggcggcgcctctgattgtgatcgaaatctcgtcgtcacctgaccgttccacgggctgcagccgctcgacgaagaaggcgcggaagaggcccgcgccgcggacgctcgacctcgacgacgagatcgagatgtggaccccgcggcagaagcagggccacgacgaggactgccagatcctcgccggaaaccccttctcctccaccaccgaggtggccccctcccccaccgccgccagcgacgaaatctcggtcgttgcagagcgaggaaaggtacgcttgcgattgcgacgagactccggaggatgggctttgttttttcggctcctgtgagggcgccgatgaagtgcctaaccgtcagtctgaaatgtgggatctttctgaagtggtgttcaaagagcgagccgtcaatctttaatttcgatctttgtaatgttgtattgcagattgcgtgcagagatttcccacatccgaggtctgcttgtgcaaagcacccatttagtagaacccctcatgaacgctattgtgacaaggtaatgtcgtgccaagcctcacactccttgctcgtgatattttacatggagttagtactgcattatcctcaaacttaacagtagctgtggttaactgaataagcttactgtgtgtattattcattgagtccggagaggatagaaatgaagctttttgtaaatattatattatcaacgatttctctgtatattatgacttgaaaatttgttgctaaagttgcaaagtataacagccatttgttgatcatcatgtcaataacagttggttgcaagaactgtataagtatctcccttgtgtggctaccaataatatacaaatatattccatatacaaccatattagcttaattaatctgtgcctaaattataattattaattcaattccaaggatccaaaaggggcctaaagtttatcagatttcgaccaaatagtttttaccttgtgtggcagtgtttctactttatatgcaacatctttgtcccatgtatgccttggtaggccttagtgggcactgctgtgcttcgaggagagatggaaatgtggaataacgacgaggtcatgaagggtctcattattattacagcattatgctcaaacttacagaaacttctgacagcatagcaactgtgcatgattgaattgttcattttaagttggaggataaaaacaaagccatttgcaaatccttgcttatcacaaggtaaatggatcatgttaacagtagcaagcaccgtgttctgaaatttcagcccagttctttcctagttgaattaatgagattcatttaagctgaaggaatggaatggaagcttttgtaaatatcatatcataaccagctattcagtaatatggtgagcagtaaattactttccgaagttgcaatgtgtaacactgtagctcatacctgttggttgccatgccaatattgtcttctagaattttggttcttagagtggcatgcttgaatgggctcgattaccatgttgccttagctcagtatgatcttgtttattttggttagctatatggatgaaaatataagtgaattagtgttttgttaacactcaacttgatgcacaattgtgtcaaagaaaattggctgtgtttccatgtctttaaaagaaacaaaaaaaaggaaagaacataatatactactttcagaactcaaaagcgcaataaggttgttggttactatttgaatctgtacaatgttagagttgcattgctgatatcacctatcagatttggctgctgaactttgttcatcttgtttgcagtgtttctgctatgtttgcgacgttgctgccccatgtgtgtcctggaaggggcatggagggcactgccacgcttcggacagggacaacaagtggaattctttgaggttcttgacgcgaaaggcaatgaatgcaaagcctagttgattttgccccctatgctagatcgggcaatcgacatttttgcaatctcagcctgttctgatgggaaggttattgtggagtagctcgtaaatatggttagtgctggtgatagatctcatcccaggatttggtgcatgcatctgtgtacttcctatcacaaactgaatgatgctcctatagtcctatataatataaccttctatggagcactagcatcagtcttgtactcttgcgttccataattctagcacatgtatgcaactcgtctcgtggtctctgaaatcttaatggtcctctccaattccaaattcgcttacccattgggacctgcaagttcatttaggttttgcaaggccactaaggctctgtttagatgcagccaaacaaccaaaacttttagagaaatgaacacttgttgaaagaatagatctaaatagaggcttgtaaaacttggctgtaaagatttggaatttgggactttggagccctaaaactgtgtaaac

SEQ ID NO: 3927 - DNA, 2599 bp, Sorghum bicolor
ctttggagccctaaaactgtgtaaacttgcttaaggactcgtgtcttgtgtgttgtagaccaaaaaattttaggaagcatctaaacaactatttgaatgtaaagtttacaatcagaagttttgtgatgtaaagatttgagatcttaataggtcctaataatcatattaaatggcttgcatttatgaaaatccgtgtgccccttcggttctcacctcacgtgagtctcctcgttaccttgtactatgctatttcgaattccgcaacaagtcttatagtggagaaatgaataggttttgtgcggccgtctgcttatataaacgggcatgctctgtggtgattttccatccaaatagtggagaggaagggtctgccagggaaaatggtcaagatcgcggaggttgaagaacagcgtgatgcaggctcagacgatgattgctgcgagataagtcttgaggaattcgctaagaaagtgagcctgaaggaagatggtgatgtgattctcatcgcagcgaaaggaaaggttagtcttgtctaatcctttgttcctttccatttctaataagaacttcacggtaggttaaatctgtacaactattttttttagataaagaaatctgtacaactctgttttacaaattgtgcaaatcgttgtcatctctttgtgatttttatagctttattatttcgttagctttcttgctgcatattatcaactaatggcacttgggggaaaattcagaacccgtacccaaggattttcgcactctgaaattcatctgtgatccaacaacccttaaacaaactaccacaatatctttcctgtcattatctgtagatcgttaaagtggaagcagatcaactggaggactcgacaaaagcatatggtgactatgacactaaggccgagagctccggttgtagagggcaacaaggtgctgctggtgattgcgtggacaacccatataagatcgatgaagatgagatgggtctccttaaggttaaggttgaggacatgtttgtgattgggaagccttctggtggcggcgacaagaatgggcgcagctgcaacgctgccaacgtaattcctggcgtgctggtgcctgtagtgaagtgcgaacctgttgtgttggtgacaatggcgttgaagctgccgaagacgcttcatttgaccactgccatgagaggcggatatttgacgaggacgatgacgaggacgtcgttgtagtctgaggtcgtcggcgcctgagatggtccctgatgtcttgcgaaacaataccagatcagcactactgtgtatttcagaactaagcatgatgctcccaatgtgaatttttttttatgttttattaaaaagtatcttactatgttcttcgaattaatatccgatgaaagagaccaatttagtttcttgtgaattgaatagtctcatcttcgatgatcgtggctgaatacatatatacatacggcatacatgaatctctaacatctggctggattaaataggtggcactgagagacttccctcacccaaggcacttgtgtggtaattttcccttcgacacgacacgtcacgagagccattgcagcaaggtaatttcaacagtcaatacctttgttcatgtctttggtcttggcgggcatctatgatattcatgcgaacaaacaattgccctgcatggatgtagtgctactgttccttgtgcgatgagcctgcttccaattgtatgaattgggaaggaacaggagggcattgccatgctacacaaaaataaatgaccatgtaagttgcaaacgtattttagtctcagttatattatatctctttggtatacatgcaatatatcagataaatttatgaattgagacaaatcactggaactaggaatgacatctcgaatcaattaattccaccacataatttgaacttcttgaagcacatgtgttttcaagatacataagcatcatacatcccaggaagacattattctaggtgcttgtcatgacgcccctatttggccttccttggaaagaaatgacgctagatcaatcaattgtgaggggtggttacacttgcacaccccaaattgctcccagatgaattataataatatgttctttgagcttttttcaatacggataaatcaatgacctggcttgaagccattaactgcaggcaccccactaattgacggggctgcacctctattcttcttgaggtatgcaacatattcaccatagtgcatggtgcacagggtgctctggtagcgggtgactttgattttcttcctcaaggactcagtgatggtaccttggtaacctgccttcctcatgagcgaatcaatggtttctgcatgtgtccatcctgccaaagatgaagcctaagttacaaattattcaatccagatgtggaatgtactgatcagttgactctctattttacagttattgctcatcccaaagaaaaaaatagcgggctatagcgccgctatagctgcggaagaagctcggcgctaagctattcgtattttttccgctatggcaattttcaccgctatttgccgctatagcgccgctaaattgcatagcttagcgttttaa

SEQ ID NO: 3928 - DNA, 11677 bp, Sorghum bicolor
tctaaatgtgagatgtagtggttagtttgatatcttggcgtagtgaaagaaccagattcaagaatttcctactctctcacaaataatgtgtgatctatatctcctataaagataaatctcactagctatttctcttggcatgcaaactattcacattagtatctactaaaacatcccactagcacataacacattcaactatcccacaatgcaaaatatacacatcagcatccactaacatataaaactaacatatgccattacatcttcattcaagctattcacattaacaaaccaatttacttactaacatatattgttgcattatcaataccatacacatacatcttcttcatacttgtggcaacgtatgggaatctttctagtttgctagatgttcaagtctcaactctgcatttagtgttggtggccgtgtaattgacccttttttatttgtcttgaccttgagatagttgaagcctttatctgctcgaggattaggtttatgcatcaagatgagctaataaagcatcctattttttgtttaacctccgcaaaactccttatttgctggtttatactccttcttttattagataagaaaagttggttccatagttgatgatcttgaagttattgataccattgcatcaaagttcatgcttgaggtgtagcttttcatggtgcatgttcaacacatttgccattatctatttctcccacaacttattctaatgtttaaccaatataaatgaaagacgagcttatttaaacctctattttctttgttgtgtactactacaacatttaccattgccatttgccttgttgtaggatgattaagtcgctgacaatgataaagaggtgaagagacgcaatgcaggagacctggactatggctttgactaagttgagttgtcttatgatgttgttttatagcttcagcgagggaagtgcatgctaagtacccctagggtgttagagttcgagtcataaaagacccactctttatctgtggcttcgacccacaacaactaggaggaaaaaaacttatttatctatccaacatccaaagtacaggcttgtgggcaacttatctcatgaagctacggtaccgctgtgtatgggtggggctgggtttagagatttgctcgatttgtatgagaagatcttcttcttaaggcgtctgtctaggcactgtgaatcgagttttctttataattcttttgcttattagcacttgctatctccaaattgaattggactttggttgtttacttgtttgcctgtgcggctggaactagaacttgttagttatttagactataatggacctttttttctattgttgtgatttattaaatttgttatgatttattaaatttattgtgttgagctaatttgaagtggttacatgtgtcggtgttcctcattcaatttatcattcctcactgttatcagtgtgaatctgactgcactaattttcgacgtcccgaatatttcgtttttgttttttcgatcgagtaatcctaattctaattttgtttccgtgtataaagatataaaataaaaagtagctagaggatttcttcaacagtttccatccctaaaactctccccataaaaggcgcaatcctccttttttaagtaatcaaacaattctagatttaactaaatctataaaaactaacttttataatactaaatatatattattagattaatcatataataatattctaatagtaataaaacatataaagatataaatattaatactattttatataaatttagttaaatttaaaagtattaattaggtttaaatatagaaatatattttaaataaattcagacggaggggacggaggtgcaaattcgacgcgggcccatcccactcggggttggccggttgggacgaggcgtgtccattcgcacgtgtgctcccctccatccgtgcctgtgcctccaccgtggaggcctcgacatagcaagcgtcggcgcaccggaggcgaccgtgaagccagcgctgcgccagcgactcttctctctcctccctccgctgtgcagtgcaggagcaccacacacgttccggcccgttcctgcagcaggcccggcagtgtagttgaactgccgtgacggaagggagagaagccggcgtcggccagcaaagtcgcccccgcgtcctcttctgtcgtcggctactgctcatacccaatcctcgtcatcgtcggcgtccagatctgggcgtcctttgccaaggtagaccctagcgcctagcaattctagtatttgatttcccattatccgatatgtatgctgttgtttgcatgagatgatattgcttgtcaattgggtcacaatagacaaatttttgtcaagttaggataccaacagactcaaattgttaatgttcgttcctataaaggtaggaatgggatatatttcacttgggatcggtcactgcaataatgccattctcactgacaataatgtttattttgaggtagcgtttaaatgttggaatttctaatgtttggatccatctaaatgatcagtaaatgaaatttaagcctcagtgcgaaactacagcgtgtcattatcttactgctgcacacttctggaactgagagaatttggttgggttgagacgcatggctggttgacaggagggggaggagagccgtggaagatgatactgctccagtccccgtcgaggttcctgctccagatcctgcaagaccgtgttctcaggtatgtcgctcgctgccaccttgctttcgcttagagagaacagaatcacatcttgcttctggtggcatggttgtttgcattaatctcatttaatttcatttcatgcgatgtcggtgcgatgcagcggcgagaagggcatagacatcgactgtcacactgtagagttcgatgatgtccggtatcatatccaggtgagctctatattgtcgcatagatttgtgtccaaagcagtggccactgtgccaagtctcggcaataaatagatgatatacttagggcctgtttagatcccaaatctttacatcccaaaacttttggggtgtttagatgcttcccaatttttttggtctgcaacacacaagacacgcaagacacgggcccctaagcaagtttacacagttttggggctctaaggtcccaaattccaaatctttacagcccaagttttacaggcccctgtttagattcattctcccaaaaagtgctcatttctccaaaagttttggctgtttggctgtatctaaatagggccttataccaccatggtggcaatggcttgacagattttggcatcaatcctaatcagtgtcaaattcttagggtagctaacttttggcgaggttggttttggtacaaattaaacagttaatcctaaggtggctgacttgactcctaagaaatatcctaaccgaatcaatctaacttatctctttcctaacaaaccaaaccaatctaatcccatgcggtactgttcacgcgctacagtaccgcatgggccctgggcaggctccacttgccataacaataacaacaattcagtagttaattggtctattcttcccagtttggtatgtgccatttgatagcatttcccttttaacctcgaattacctatttgctcacaacaacagtaacaacaagagcaatgaataaaatgctgtcaccttctcacttcttgagtttttccatatactgaatggttgccataacactgcataccaaccatataattagtcacaagcacttagtggtgcaagtaaaggttttgtctgtctttcgtaatataacatgtatggacttgctagtgtttgagcattactatttcagctgaaagtgtgttcaaatttataggttgatattgttctactttaagcaggtttttgtctatttttcaagttcttgggtgtggaagctgcattttcttattttctgaaatgaatatggacatcactcttcatgtacacactagacattaggactatcacctgtctgatgctcaatatcacaattctaatgaatctgagctttgatttcagttttctatgaggaatccaaaggtaatggtgttgtcagttgctttgcctctgccacctcctgaagcgattttgtatgatgggcttccacttggtgccattgaagctataaaagcagcttatgggccagttgtgcagattcttgatcctccaaaggatgggtttgatctcacaatgaagataaatttgacaaaacttccacttgatgaaggttctagagttcccttctcaaggttattaattgtcttgttgtgctgcatgatcaaattgattgatgctttcttgtatctttaagtttctctgatagtagatttcaatgtagtgtaacatttccaaggttatagctgtcttgccgaacagcatgttcaaacttgttgatggtttgtgtatctttagatgctactagaaagtgctgcgcgaccttgccgcgcaggcccagcatttgaccttgagcgcatctttgtcattcttggtgtctggtgtctctctgtccgtcgtcttgctaaagccctcctcaagtgtcaataactttatataatctaggcaaaagtggctttggattaggccaaagcttccatttgttgcaacgaaggagctgtgaatcaagaatacagtgataatcataatgaacgaaggagaaaaaattagaatgggagcttgtattatgaacttttcatagccaaatgggaggttgtgggctgtcttttttttttcatcgtattgcttaattagaagtactacgtagctattttacttaaaagtattcgtttgaagaaccatagcattctgaaagggtgcatggcgtgcgttgaacctgcaaacaggaagcagatatttaattaaaataatggacttcaaatctgatgtagtttggaggatgtgggaaaatagctgctctagactataattgacggaaatgttgcttatgaaacattcgtattgaaatgcaaaaataggaagatagaaaaagaacattccaagctcctagtacctgtagaaacatatgcaggtgaaactgtgaaagtcaatgaaaattttgtgatttacttttgtcgccgattctagcagggtagtgtaggaagtcaataactcttaattcattgtaaatactacctttgctttcaacttaatgaaacgacagaacacctgtcatattcgctaaaaaatggatagaagtaatgccgttctcagataagtagtgctgcatagaagtcaaaagagcatagtacaagtgttttgagcactatattttgtaagatataatctgctgtccctcttgcatttctgtcctgcagtcggcaggttcaagtggtcagctctcggctgccactgtagaagtatggcaataggccatttagtcttccatagttggtagaagtacaccagctagagtagtgggctggtttaggctggtacaagagtaggtattggctgagataagccatgtagagtagttgttggactggtgtagtcaccatccaagtagtgtaccagcaggtacatagtttgtgtatatataccctacctattgcaatggaaaactcagttcattgccactcattcagttctccagctttcagttcaagtctgaaagctgtgtgtgtgtgtgctgcgtgagtgagtgagggagctcagggctcttcctcttccttggtgcaggggagtgggagagggaaggtgagcagggtctgcttacctggtgcttgtgtgcaggtgccaacaattggtattagagccgtacaggccgtagctaggtccactgaccagcaatggcggaggatgcgggccggaatggtggccgggagggtggcgagcgacagctccagccggcgccaccgcaggtggaggtgcacgtggtgaaggagttcggtggcagcggctcctggcccatgctcacccgcaccaactacggtgagtgggcgacgcagatgaagtggaagcaattgagccccggccgcttgtgctcaaggtggacaatcagccagcaatagcgctggcgaagaaccctgttctccacgaccgaagcaaacacatcgatgtgaagttccacttcctgcgtgattgcgtcgaggagaagcagattgtcatcgagtttgttgagaccggtcgacaactcgctgacatcttcactaagccagtagggcgacttcggttcttggagctaaggagcaagattggcatggtggacgtcaagagtacacagcaggattaggggaagattgtaagatataatctgctgtccctcttgcatttctgtcctgcagtcggcaggttcaagtggtcagctctcggctgccactgtagaagtatggcaataggccatttagtcttccatagttggtagaagtacaccagctagagtagtgggctggtttaggctggtacaagagtaggtattggctgagataagccatgtagagtagttgttggactggtgtagtcaccatccaagtagtgtaccagcaggtacatagtttgtgtatatataccctacctattgcaatggaaaactcagttcattgccactcattcagttctccagctttcagttcaagtctgaaagctgtgtgtgtgtgtgtgctgcgtgagtgagtgagggagctcagggctcttcctcttccttggtgcaggggagtgggagagggaaggtgagcagggtctgcttacctggtgcttgtgtgcaggtgccaacatattttacccatacacaggtttgttcagtttggatagtacctgcgacaccttcttggagctaaccttttatcttatgtaaaccatggcctttgcaggtttctgaacctctatgagatctcctgagttcggatcactaaccaatctgattgttgggtctgcatgaaacatttatttatcaaagtttacttatccaagcaactaaaatgacaatggtagagaacgtttacatcaatatttggtctgtttctagaaatgaacaacccaatatgcagattaaaaaataacaaaaaaatggtagaagttgaaatgcaatcaaaatatatatttttttaaaaaaattataaatgagatacaacaggttagggggtaattatacatacaaagaactgatttgtttaatatacaacaagtaggtgcataatgaattgcctgatgcatacatttcagtttgaatagtagggtcctaagaacttactgcatatatgaaattatgaatagtatagtaaccaacaaagaatttttttttattttgcatatggaaactaatctgcacctggtttctagccatttgtacaacaaactgaactgatgaagggatatttagctcactgatataactaaatagctaagatgtttacttatctgttaatggaaatgcagaccaaggaactataaaaggtttgggaaatgctgtttcgtgtattgtttcaaagatcagtaagatgaaatcttattttataacattgatcagaccactaacagtaggaaccacaaaatgtaaacacatttgagtttgcaaaggcctaagggatgaatacagatctctgatgccatcctgctttactgtaccccaaattaccataatttttttatttagatttgcactaacctaataaatttgcaaaatgagtgagctgccaagttttggccaatgcacaatatgatagaagacaaacatctaaactcacagattgataacaaaaggagacagaagcatggcaatgactgaacctcgaaggctatatatgcaaaaaggatattaagaacaactcatgcttatgcccaatctgagtacctgaggctttgtcagtatcactaaacatgaatagttctatgcaagaggaaccttccacgggaaggcaagaatagaaatcatatatgtcctgaactatcgacaaaggattcattctttgtttaaatttttttgaagctttaactctggattatcaggaatcctagtttaattacagatatatggacttttcaatatttaacccattaccttgcgacgcaggaagctccacaggcggcgcagtgctccgttggcttgctgagctacgccagtggccatccgattttcctgtgccattctttcacagcggccctgctctgtttttttctatgggctgcagtggaggttcaggtcccattggatgggtgctgcggccacttctgtcgctggagccgcaaggccgacgcaccagcgcttgctgcaattgacggcgcgcacagcgaggccggacctgcgcagccaggcggcgagtggccagtgcggcaaacgggacgaggtggagctgaagcaacgcaggcctagcgtggtggtcagcatggacggggctctagctgcccctgctacccttgcgcggtcgccgccgaggctcgcgcaggcacgccgcgtcgcctaagggtggccaccgccggcgcggcaggcggcagctacggcggctccacccagggccactatcgggagctaggcgtgccggggagatgcgtccgcgcccacggcagaggctggccaccacgggggcccacgtcgggagagggagggggcatggccagtttggccacgccgccgcgcaagggccgggggcatccaccggtggggccctctcgtgccggcgcagccccgtgcgtaccgtggatgcgcgagagacgaagccggcggaggcgtcagtactgcgaaggccatgatttgcgagcgcccggttctctagcttaacgggcaatggacgggtcagcgcccgaaccgacctgcaattgaacggtccagatcgcctgattgctcgatccagcggctctcggcttaacgggcgacgtggcacgatggttagcccgcttttggtgcaggaatcgtatttagaagatttgttgggcaaaatttcaatagtagttaggccttgtttggatactctcgtattcatctcagtcgacatgtgttgaggtggattggggtgcaaattagtttaagttccaccccaatacagcccaacacatgtggatggaggtaaatacaagcatatccaaacaaggccttagttggaagcatcttcctctgtatatgagtagatgcttctgatgtcacacgaatgtacgatgcggttagttgtctaagatttgcattgatttaagtatcctttactagattattagtaactgttacctcaaagaaaaaaagggtaacaaagagctctaggtctattcagtttgttctttacattttttttacagatgcttgttttatttaatgttgattgcatctttcaatttgttgcacaatgccatcccaattatcttaacattttttgttcatcaattgttattcttaatttattagtgcagttaaactaaaatgtcttcctgtttattgggataaaactggctttgcactgctgaagtgttgtggtgtttttccaggccatcataatatgtttagcctgctcggtcgttgtttactcaaaaacaggtgcttaagccttagaaaacagggaaggtgtggaggggtgtgtgagtgtgtttgggtctatgtatgactcctttttcttctattaatacaatgagacacagctctcctgcgtgttcgagaaaaaaaaaatctatttttcatccatcacctttacatttaggcgcttgtatttctctttagaatgtagaattcggtcagtgagtacttgatctgtggtgtttcatttatgataagcctgccaaagccatagacatctcctgaaatgtggtcattttttctatttaagtcatgttctcctctgtatttgtagcctctaaccatttgtttatttactatattccagagcaaaggaatgctatcttgacacaaattgcatctattagagaggttgtgctgggtgcaccactgaagctcctgctgaaacatttagcctcgaaggcagttgcgcctaatgttgacaagcttgttgctcttgttcatcggcctaatgaatcttttttccttgctccccaggtataactttagtaacaacaataccacattatcacttaagtgtgctgtactaattttatcatgtgcaacaaatgggattcactgttgttttttcaggcagataaagttactattgtgtacccaatgagattccaggactccattgatattgttttagcaacttccttcctgcaggtattttggatgcttccttttgtttctttcatcagcttcctggcctagtgttcttcatggtcttttgtcgtttatggttatcgtatcaactacatttgacactaaaagaccaatttaacctatcatagtgctacaattcatactgcatgtatatatgcagcaacccatcaattaaggagttttccaagcccaaatataactcttactttctgttgggcacttctgtagttctgtatctgttggctgtagctccaaaagaccagtcctactcagcctcgggcaggactcaattgatgggagcattgcttactctttttcttcttcttgtttaaatttaggaatttgtggaggcaagacgaacagctgcacttaataatgttccttcttgtatgtggtctccagcaccacctcttgagttaaaaggagtatctgctgatgcactgaatgcaaatgctggctttgttactttcggtaatttacacttttcctagtatatataccttgttcctccataaaactattttgcctcacagacttttgacttgtgcagttgtttaccctcggcatgttgagggtaaaaagctagatagaacagtttggaatttgttgacatttcatgcttatgtaagctatcatgtaaaggtaagaccctttaatctggtgtcatttggttatatagaattactgagttactaccagcagcttcccttgaatatctgggaatttactagtcatggtgaatcgcaacatttcatatgaatgactggatttgactgactggaactgaaaattgatttgtttgcttcaaatgacattattgtggcctattccaagtaatatgtgacactcttctttccatgcctaaatttccccaaagaagcacacgacactgtctcttgataatgattgtgccatatatgaaaatacaatttttcaaaataagtcctgggatttgagcaaataatctggaaaaaagtttcagtttcagatgggggcagagaaacgattttttggggagcactgtattttcacagcgtacacttcagcttccaagtcagaacaatagaaccaaaggactcttctttgatcccgtattaccagcgggcttgagtggtaatacaacctacttctggataaatctgtaattgcagatggctatcttgggagaaattgggaatagtttccttaaccatacctagcagtctcaattttgaacaacactctatttgggaacatttgatatttgtgtagcctgtgcattgtgttggtacttggctgcttgccagtaagcattcaatactgtgcatctcgactaccattggctcatattaagtgttccatgtggaaacccaagtcccaacatacacaaccccatatatgtaaatcaagcagtcaatctttgttctagcaactccgtcttgcactactactgagatacagaggagcatacattatcatgtcaaactatagttatattattgatata

SEQ ID NO: 3929 - DNA, 5605 bp, Sorghum bicolor
ccttatttgttttggtaaaacatgaaaaattatggtccaacagtttggtaactggcttggcataatttggggagttggcattttttgggtgaatacgcgcatatttgcgcgcagaactacgcttgccatcgcgtgtagagccgctgccggctatctcccgcgcgcgccaggaatcttcacctgtccagcgaagtcagcaatcagatcaacacacgcatgccgtggtgagcagatgaaaagtgggcaatggcgctggcctccatcccatcccatcgatcagcactttatttgttcagaggacatgcatggactgtgtgtccagctatggccttgtttagtttcaaaaagatttcggattttggtactgtagtattttcgtttgtttgtgataaatattgtccaatcataaattaactaggctcaaaagattcttctcgtaaattatagataaactatgcaattagtttttgttttcttctatatttagtgcttcatacatgtgccacaagatttgatgtgacggagaatcttaaaaagtttttgaatttcaatgtgaactaaacaaggcctagggatagaagctagatgaaaaggggcgctggcctccatcccgtcccatcagatgagcactttatttgttcagaggacatgcatggactgtgtgtccagctagggatagaagctaggcatggactgtgtgtctagctagggatagaagctaggcatggactgtgtgtccagctagggatagaagctaggcttgtccttttcttttgcagtcatgaagctagtattgtaaaattttgtcttctttttccgcaacctagtatttttgttttgtttattgcagcaacctagtatttcttttcagttcttgtgaattgtccgcgcagcggcgcgcggccagatgagacgacaatgaaaattagttgatgtggtttagaagtgggcctagttttttaattttaccaaacctaaatgacaaactattggagatacaatctttttgcatttgccatatggtttaaacacttgccaaatcacaagatttgccaagtaagatttggcaaactcttggatatgctcttacagcccattataatacttgctctaaagtggcactttttctgacgtggatttaactgctcttaggccctgtttagttttccacctaaaatttttttatctatcccatcgaatatttggacacatgcataaaacattaaatgtagataaaaaataaactaattacacagtttagttaaaaatcacgagacaaatcttttaagcctagttagtctatgattaaccttaagtgctacagtaagccgcatgtgctaatgtcagattaattatacttaatatatttgtcttgtagtttctagactagctatataatttgctttttattaatttttaaaaacctctaccgacgttcttacgacacatccgatataactttaaaaaattttcatccagcccactaggcgctcgcccacccagcctgccgacgggctaggctagagccgtagagcaaccccacggcccacgccacgtgggtcccgtacaatagcgaatgcgatgccagtcatgccactccgactccgggcctacgcggccacgaccgcccttctgaggaacaccgctgtctcctccacgtgtcgcgcatcgcggccctcgccccgccgcgtcgcgccaagcaggtccttgctccggactcccgcagccacgtcacccctgtcatcgccggcctgacctcgcgtcgcttggcctccaagtccaagtccaacagaccaaaaccccccaccgccccgtgtgttcgtcacttcgtcgctttcccgtcgagccgcgaccgccgactgcgacggagagaattctctatccggttccggtcacgtctggtttggttggagttcgctcgcacttgtgattgggtatttgggttggtcgcctggctcttctctgctgggagagattccttttgttcggtgtcgccaacaactcgccattcttgggaggtctaaggtcgtcgggatcgggaccgctgctgatggaggagaggtacgaggcgctgaaggagcttggggccggcaacttcggggtggcgaggctggtcagggacaagcggaccaaggagctcgtcgccgtcaagtacatcgagaggggcaagaaggtacgtacgtagaggcttctgcctcccgttcgtgtggcttgagtttgggggttgctggtgctgcttctaaattcggattggtggggtgttggatggtcgagaaatgggaattttagtttagaaagtggctctgacttgagttctgtgtgtttcttggatactactttcgtgagttgtgtctttctgcgcagattgatgagaatgtgcagagggagatcatcaatcaccagtcgctccggcaccctaacattgtacggttcaaggaggtaattcgggaattttggactcaccaatggattgatatctttattgattgtttctgtcgaatttgattgtttcatagcactgcactggtggtgctctttttggaacattataaaggatagcgttctattttcggctgtttgcttgatgactaaatctgccagtttgtaacgctaagcagcactggaagtactgttagctgagttgcacaaactatgaccctagctgttttctggtgcagtcttccattgcaactcctgtgtcttgtcttgtttagtgtgtggttttttatgcgagttgtctagttgattcgtagtgtgcagttgtgctcaatgttacaggcttgagacttgagagccctaagaaaggtgttgcaagattgattgagcctgtttttagttgttcttgttgggtagtttttaccctttagtcgtaaggattttgggcatggctttccctaaaaactggaacgattcttttcttctaaagttctaagaaaattatggcaaagttcttgctgtatttttcaataaaaaaaagtatgacccttgctgaaccatttcataaaatgaacaatctatcatcttaataccaaactgcattgcaaatctcatactttgttctgcgaatatattggtaacaggtttgtttaacacccacacatcttgctattgtcatggaatatgctgctggtggagagctatttgagaaaatcaccacagcagggcgattcagtgaagatgaggtttgttttggctctatattcatcctatcgccaacctattttctcaccccgaaccatgtttaactaatgttatgtgctccctatcttttaaatgtcaacagtccaggtatttctttcagcagttgatatcaggggtcagctactgtcactctatggtatggctttgcttcgagaagttcacaagttcatgaatagtggagtgtaagttttaatgaactgcaactgcaaatgcaggaaatttgtcaccgtgatcttaaacttgagaataccctccttgatgggagtccaacacctcgcgtgaaaatttgtgactttggttactcaaaggtgctgtatatggatactactccagctctgttatgcatcctaactttaccagcaactgacttctctggtgtcgttcaatcagttacaaactttgctagtgtgcttttcagtctgctttgctgcattccaaaccaaaatcaacagttggaactccagcatacatagcgccggaggttctttccagaaaagagtatgacggaaaggtgagttactatttactaaactgtatgtttgacaattctcagttctttgctgtatgtgtttctgctttttttcttacatcaaccaacgaggtaaaaggttggcagcacttacaaaactggaacttgtagctccttcagtttttttttgtttttttttggtgagtttagtgtttctgctacaaaacgggggcataaatgcttaagcccccttttttgtatcattgtttttaagacttgaagttggcctccttcagacaggcatgttttgttttctaaatactgcagcagtactttctgcaactcatgaaaagagcactttaaggatacacagcttcctatcctgcttgtcttcagtgcaagcattttcagtgaaaacgagctgctttttatggcttctgaattttctgatacttcactcattctcgtcgtccaggtagcagacgtttggtcctgtggtgtcacactgtacgtgatgctcgtgggatcatatccatttgaagatcctgaggatccaaggaacttccggaaaacgatcagcgtaagcatctctcttccccttgtgccggttatcacaacttgcttcggttgcttgtttggtgaatctgaaagcaattcaaatgtgtcccctgtggctgtgcttggcagagaattcttggcgtgcaatactccatcccggattatgtgagagtgtcttcagagtgcaggcgccttctgtctcaaatattcgttgccgatccttcaaaggtacttcctctctcagttcagtaaatccaagttagcctaatcttcagagttcagattaccccccaaaaggcaaatatatttcatatgctgattagactgagctttgcatcctgcaaccctggacttataattttcaacgtgatgtctgaaaaagtgaattcttctgaaactttgtctgcctaaagaggatcacgatcccggagataaagcatcacccgtggttcctgaagaacctgccgagggagatctcggagagggagaaggccaactacaaggactcggatgccgccgagccggcgcaggccgtggacgagatcatgcggattgttcaggaggccaagacccccggtgacatgtccaaggtggtcgactcggcgctgctggccgagatggcagagctggagagcgacgacgaagaggcagacgccgatgacgcctactgatcgctcctgcatgcaactcagcagctgcagacgccgccgagccttacccgtgcgtgggataacggatgttggattcttactctgtatgttaagtctgtatagcgctgtacatttgaagattgccttgtatggatcaactagcgtgcagtgataacaaataaatataagtgagtaaataaagatgtaccatacgctgtttagctgctcttggttgtgtttcttataaaacgtgccagcggttgggaccttttcctcttcgtctctcatgatcaatatagtagatgaaagtagaaaaacgaatagacacaagatagggagactattaattaagcacacgtatatatagtcctgtcaaggtctaagagttttggtaagagcccacatacaaacggactaggattaggattcctccttctcctttccttctaggatcaagtccgtatgttttacaacactcccccttgggcaattaccacgatatgcacatgcctcattaaaaactccatccgaaaaccaaatggaaaaaaacggtttttggagaaaagagtacatcacattcgttaattgtattgcacatattgtctcgttaaaaaccttgtgtgagaaaccttcaagtaaaaactcacataggaaaaaagagtacaacatttatccttcgtggtcatgtattctttaggatattctattcttcatgaatagatattta

SEQ ID NO: 3930 - DNA, 6000 bp, Sorghum bicolor
aagagggccaggtgtcgggacttccgacgaacgtcatcacttccgacatacgtcatcagttccgacgtacgtcgggacttccgacaccccaagtcatacaaaactattctacgtgctcgtgaagtgctagagtgtctctcttttgatttagttttaatacttgagcactctatcttcctcagaccaactaaatttgcatccctctttatagtacgacatatcctaaactcaagatcaaaagtatataaccattttaaccacttgagtcttcaatgtcttcatatgccacttctcactatcacttcattagggatgcaattaactttgtctcctctctttgagtaaatatagcttgagcatgtgacttgaatcatttcaacacatgtgagttcaatccatggcttcaagtcacttccactaatgatttgatccttaacacaacatgactcctcatagctcaattagtacctcgactcaatgcaagcactctcttcttcaccttagccatggtaccttggtctacaagccattgcttgcccttcacctttgcttagtccctcgaagccctttccttgctatcttcaccctatcgagccatactcaagtcacatcatgttaagcatccattgaaaaattatttcttcaatattgtgatccttgcttaaatatcttcttgatatgagtgttgatatcaatcaagcttcagtttataacaatacacaactttggtcttcatttgaacattatgtgaaatactatcaagtttgctttcttgttgaacctttgatacacttagcaaacttgttagacctttaactgtgttgtcattcaattcaccaaaactcactaaagggctagatgcacttacaatatatcattatatctaaatgctttatagtttttatttatggttcctcaagtattttttacatgccattgaaatagttatgtccttatgaaatttcattttttatacaattattaataattttaaattatgtaataaacacaatattttttaatgattttctttatctacgtgtcctataaactttaatatctactttgttgcaaaaaaatctaattttacttgtataatgatagtattttataggattatcatcgaaaaaatagatgcttgattcgacccatatgttgaaataacaaatattttttcattctaaattcaagacactctgacatttctaattacatatatttttttgttatacgctattgtctagaaaaataagaatatataaggccttgtttacttccatccaaaaacacaaaaatttttaagattcttcgtaacatcgaatctttagacgtatgcatgaagtattaaatataaatataaataaaaactaattgcgtcgaaatttatgagacgaatcttttaagcctagttagtctataattagacaataattaccacaaacaaataaaaatgctatagtatcacgaaatttttcaattcatcaactgggcctgtttagatcccaaatctttacatcccaaaacttttggctgtaaactttacattcaaatagatgtttagatgctcactaaattttttggtctacaacacataagacacgggtcactaagcaactttacacagttttggagctccaagatcccaaattctaaatctttacagccaaatttgtttagatctattcttctaaaaagtgctcatttctccaaaagttttggccgtttgactacattggcctaaacacggcctaaacggaatgttttttttctttttttttttatctacccggtccgttgtgcactctgacttgtgcagttgtgctgttgtgcactccgccacgcgtcgccacatgcacaaacgactgaacgagaggggctgaacgcgttgcacgcgaagcgtttcgcggccctccgactcgctccccttggactcgatctcccactccgccgccgccctcgtcaccacaacggcgcctctcgccaccgccctcaccgccacaatggcgcctctcgccaccgcgccgcctcctactccccatgccccgcgctctctcgttccacgggtaaggccgcggcgagggctgacggcagtgcgcgcggcctcacagggaagaacaacggatgggtggacgccgggaagctggcgtgcgcgccctgcgcggcagatcccggagtaccccgacacggcggcgctggaggctacagagcgaactctggcggagtttccaccgctagtgttcacgggtgaggtgcggaagctggaggagcggctcggggaggcggccatgggtcgggcattcctcctgcagggcggcgactgcgccgagagctttagggagttcaatgcacagaaaatccgggacaccttccgactcatactgcagatggccgtcgttctcaccttcggcggacagatgcccaccatcaaggtcgttccttctccgcctccatcctgctcctctcccttaatacaaagcattgtttcttcgtcctaggtaatccgttcttccaatcgtaaatccgcgtctcaatgcattatttgcactccactaacaattagtccctgagttagtgatttgtgttgttggattttctggaggatgcatcatatagaatttggcacgttcaggtgacatttaaatggctagatttgagaaaataataggctttgtttagttcgcaaaaattttcaagattccccgtcacatcgaatctttggtcgtatgtatggagcattaaatatagataaaaataaaaagtaattgcacagtttacatgtaatttgtgagatgaatcttttgagcctagttactccgtgattggataatgtttgtcaaataaaaatgaaagtgctacagtggccaaaaacgaaaatttttacgaactaaacaaggccatagcaaaatgcagacttcaaaaagaaaaaaagcaaaaccatatgatgattggtgaattaaaactaggatcagatttgtctagcataaccggagtggacatttataaatgataaaataagaattcatgatgttatgaaagcaatattctgttttcattctcttaatctgctcattgattatgaccggaagaaatgaggataaaaaaatcatatcactgttagtgcatcggtactttgtcctttcgtgacttaccactcagcactagtaaaacactatcctgttgtttgactgagcaaattatcaagtggtttatataaaaggtggtatctagttgtttataagaggtgtcgacaatgtatttcaggtgggaaggatgggtggtcaatttgcgaagccaagatcgaacccaactgagactgttgatggggtaacccttccctcctatagaggggatatcatcaacgatcaggcttttgatgagaaatctcgtgtaccagatcctgaaaggttgattagagcctatacccagtctgcgagcaccctgaatcttctcagagcatttgcccatggaggttttgcggatcttcagagagtcacccagtggaatctcgactttttgaggcacagcacacaaggagacaggtccttagctattggcgtctgagtaactataccttctgcaattaattttatgaaaataatcattactataataatatagtgacagcatcagggtgcaaaaatttgtcattcaaaacttcacatgttttaccttttctacaagcagaaaattcagggtcaaaatcaacaaatgtaatataatgtattgtttatcctactgctatgacagcatcagactttttttttggacgaaacagcatcagaccattttagtacagtcatgttggcacactatatatcatcataggttcataatttgtgctaatgtggtatacagatcatatgtctgttaactccttgtgctagcaggtatctggagctttctcagagggttcatgaagccattgggtttatggttgccgctgggctgacccctcaacaccccatcatgaccacagctgagttatggacatcccatgagtcccttcacttaccatacgagcaagcactgactagggaggattccattagtggccggtactatgactgttccgcacacatgctttgggtcggtgagaggactcggcagctggatggtgctcatgttgaattccttcgtggtatttcaaatcctctgggtataaaggtaatagccacctacgagggactgtcatttacagttaacatcttttcatataatatgtatcgaaatcccaattcttactattattgattgatggagttgtcatttgtggtcttaaataacagctgaggtgctttaggttcaattcatatggcacctgttagtactcttagtgtgtttggtttgagaaattactatattctagatgaggtggtgtatcatgagtttgtactcaaatttggtggaatgactctattcctcatactagtactaactgttagcttgtgaggagtgagatgatgatggatcaaccccattacatttcacaaaccaaacaaaaaagtgaggagtgattagatgatggactaactcattcctcgaaaccaaacaccctattagttatcagggcatcctttttttagagaaaacgttcacaactcagtattgtagcctttaatatattactgtattgttgactacagtagtcagcacagtgccatttctcagcagttatgaagagaagcatattagttactgtttctgttattatcttaaaagaataattacataaccagcattaacttgtatatgttatataggtaagtgataagcttgacccatcagagcttgtgaagttgtgtgagactctgaatcctcacaacaagcctgggcgattgacgattatcacaagaatgggggctgagaacatgcgtgttaagcttccacaaatgatcagagcagtgcgccaagctgggatgattgttacttgggttagtgatcctatgcacggaaacactatcagtgcaccatgcggactgaagacaagatcatttgattcaatcatggtaagaacaatatttttgtcacgattcgctaagaaactgtattacacctgtatttgatactagttggtacaacggtacttgcatgtgcaggctgaactcagggctttcttcgatgttcatgggctagagggaagctaccctggaggagttcacctggagatgacggggcagaatgttacagagtgtatcgggggatctaaggcggtgacatttgatgatctcagtgcccgctaccacacacactgtgaccccagactgaacgcgtcgcagtccctcgagctggctttcgccattgctgacaggttaaggaacaagagagacaagacatggcataatttgacatccagagttgttgcttaattaagaggataagagatgaagcttgattttcatcaccaataaggattcacagccgctagagaagatatattcacatcctttagttctttttcctattattaaaagttgacatttgattttcggcagtacaaatgattaaatccctacctaccttttctcaaaataatatgataccattttgttcaacaatagcccggacctgaagatggttaagcgatcagtccaaccgtccaagtaacgcaattagttttttctctccatgttatcgatgaggtcagtttgaggatgttatcatctcatgctttgtttggagtttttttttatttttaacctattttcaataatattttaacgcgagctcctcgcggttggaggtcggggcacgcccacatggccgcccgccggggggccgcgctgtggcacgactgcatcacgcggcctcggcggacaccgtgtctggacgtttcgtctcaacctcaacttctggggggggggggggcctaggcatcggcgacgccgcgcggcctcggtggactctgtctccggggcaccgcaacctccaccagcacctccgtcgtcgcctccgccgccccagcgggcgctccaacagcgccgtttgggaggggcggttcgg

SEQ ID NO: 3931 - DNA, 5570 bp, Sorghum bicolor
acaaaatcttcaaatttcatcgataaatttatttgaacttaactgagaaaactattttttccgttatttttggggttacaggtaatcggcaaaataaatatttttatatgttcaaaacaacccacctaccaccttacgttgctattattccgtcagcggtcgactcgcaaggctccaacgacagtgggcacgggtgggctgccgccgtcaccgagcagcgggttctcctagcagcgatgttggatacctaaatttctctctatgattcaacatctctagcccttggtctgtcatgttagatacctaattttctctctacgattgtcgacaattaggtcaatggtgtggagttaccatgggagtgtccaggagcactcatctccttgcatataatgaccataaaaactcctgtcgatgaaattgacacccatatgtaatgacaacctcgttgtgtgcatcagtgaagagctatcatagataacatactcctagcaaaaaaaaatctttaaagggagaaaactaaatctaaagaactgtcataaatgagatgggtcctttgtccgttatttttggggttacaagtaatcccgtaaaataaatatttacatactcaaaacaacccacctacacacatgagtaactccaacagatatactatccatgttatctaggctatttttacattttaaaacaaaaattaaagtccaacaagtgtgctatctagtttgctaaaatagcaagtttgctattcctaagcttccgcttgtcatatatagcatgtcgtcctcactagatatcctatacaaagactattatggaactctatgctttgagtaagttttttattttacacaatggctaatttttatagtttagaatataatttcacctagtctcttggagatgctcttagagcaacttcaagagactttctaaataaagatgctgatgaaaaattatcctccaacagtttgtctaaacggttatgcaaatataaccatcttctattttggattttttgctagctaaaaatagaaaacgagatgactctctagagtgcgcatgagagatagaaaagctgttggagagtaaagaaatatagaaaacgatttttaggccttgtttagttttaaacaattttaggaaatcgacactgtagcactttcgtttgtatttgataaatattgtctaatcatagactaactaggcttaaaagattcgtctcgtcaatttcgacctaactgtgcaactagtttttattttcgtctatatttaatactccatgcacgcgtataaagattcgatgtgatgataaatctaaaaaaaattacaattttttttagaaactaaacaaggccttatagaaataatccgataatttagaaagtaagatttgtaaagactcttagagatgcgtcagcggtagactcacaagctccaacgacagtgggaacgggtgggctgccgccatctccgagcagcgggttcttgccctcgacagattgttttgtgattaaaattaagcatcttcccacggacgagtgagtgagtaatcacagctagccaagcatatttgtttctgctggtgcacgaggatcaggggtgggcatccccaccgagcgatgcgttaggagcacttgtttcagaagaaaagaaatatacccaccccaggtccaggtcctgaaacagatgggaaacgaacaagatcgatccacgggaagggaaaatgtggatgaaacgggcaggaaaatgtggatggaatggtcagaggaaacgaaaacgaaacgagaggagattagcggagaggctagcgcgcacgcggcccgcaaccgtgtccacgggaatagacggtggcgtgccccacaagccccgaggcccccacgcacggcacacgtatatccccgcaagaatatccgccacgtggacggcccacgctcgccgaccaccttaaccaatcaccactcaacagttgaagtgagttaacctcttctccccttcttcacctctcctcacacggcttcctcctcctccttccactcatccatccatccaccaccaccaccattcctctcacctcagacacgcgcgaaccgcacgaaccctagctggcggcgggaggaggaggcggcggcggcggcggcggcgggatgacgcggcggtgctcgcactgcagccacaacgggcacaactcgcggacgtgccccaaccgcggggtcaagatcttcggggtgcgcctcaccgatggctccgccatccgcaagagcgccagcatggggaacctctccctcctctccgcgggatccaccagcggcggcgcgtcccccgccgacgggcccgacctcgccgacggcggcgccgggggatacgcctccgacgacttcgtccagggctcctcctccgccagccgcgagcgcaagaaaggtcagctaccgcccgatctatctccgccccctcccctcttaatcgatcatccactcgccgctaccgcccgatgcagaaccctagacgatagatcctctcttcccgctctaaccagctccaagcttttccattcgtttgtctcctgcctactccgcttactttttgctttagatagatgcgtgcacctggtgctcactgattaggtgcctctaagtttgggaaaaaggcactagctactccagctgagagaaaatcattaatggtactactatcacactgcgagtacttctactgtcgtatgaatgttgtactagttgagttgatacatatggtattcgaattcaacccgtaactggtacaaggaccacctctggagggcggaggcactatactgtttgactgggtcatggggatgctttaagaagctcagctctacattttttttctagaacaagggttaaggattgttccgagcagtggcgtcagttcattttggtgaaagttctcgctgattggtgatgctgaatggctgcataatcagagttatagggctgtgtaatcactaatcaggaaggatatgccgagcaatagaaaccgctgcgctaactgctaacacatagtcttatgtatgccagttaccgctgcaatagaaaccgctgcattttggactttgtgtgtcatgttgctgattaagcttgctctcacaggtgttccttggactgaagaagaacaccggaggtttttgctgggattacaaaagcttgggaaaggtgattggcgaggaatttctcgtaatttcgtggtctcaagaacacctactcaagtagcaagtcatgctcaaaaatattttatacgtcaatcaaatatgagcagaaggaagagaaggtctagcctttttgacatggtgcctgatgaggtaacttgcttgatcttagccttgatttctacacaagtattgcttgctatggccttgttttgtactcatgcatgtgttgtaactacactattgactgtttttgtggtaatatatatcatattactagtgcaaccttttggatctagttctgtagcttgtatattttactgacagtcactgtttgctatttaaacagtgtgtacatgactaaatggtaaaaggccaactgtgtcatttaggccctaaacattccattaaatggtttaaaaccgtttaaaccataaaaaacggtctaaacggcttaaatagaatagagttaaacataattaaatgggctgaattgccatttaactcaccgtttagtcaataggaggattacaactgtcatactggcacaaaactaattaacattgtaactgtggagtgggatttaattatgttccaaaaaaaagaattgctaggatacatatgtttttacagacataaatgtgtatactttctagtatatttcacttttgcatacataaatatgaatattttagtggtactatacaaaaccgtttagatcatttaactcagattaaattctgtctaaacagcctaaatggtaaacaaaggatgactgtctgtttactgtttagcgtttaggataacactgctgacagatatgcacattgtcctatccttagtctcattaggtagttcttagggcctgtttgatagagcttgacttcttgattcttagctctagctccctgattctgatggagcgattttggtcggggagtaggtgagaagtgatttaaagtgattctggtggggattaaacgcagagtggtggggagggatttttttagctgtttggctgtccaggagcgattctcacagagaatctggagctgggagctcttacttgtgctttgcatataacttgaactgaacggtgctctgtttgttttacagtccatggaccttccaccccttcctggaagtcaagaaccagagacctcagtgttaaatcaagcaccactgccgcctcctgtggaggaggaggtggaatcaatggagtcagatacttctgctgttgcagagagttctacggcttctgctctcatgcccgagagtttacaacctaattatccgatgattgttccagcttatttctcaccgttcttgcaattctcagttcctttctggccaaatcaggaagatggaggcgatctgccccaagaaacacacgagattgtcaagcctgtggcagttcattccaagaatccaattaatgttgatgaacttgtgggcatgtcaaagctaagcataggggagcctggtcaggagacagtttctacttctctgtcgctaaatctgctagggggtcaaaataggcagtcggctttccatgcaaatcctcaaacgagagctcaagcctgatcccccatcagcacagaaactgcatttagatggaatcctgggcaaaaaaagctttgcctctctctctctctctctctctctctctctctctctcttttctatatttaagattaaccgtgctctgtagcttgtatcatgtgctgtaagttatgctacgtatgaatgtacctgttgtttgtctggcacgcatgatatgacactcttatgttaacaaagtcattgatgttagtgctgatctttatggttgtaatgctgtaaacttttcctaagaaaaaaagtattagccagttcttttcaagtgcactcagttctctacctgatgtttcattgctgaagatgatgctggttaattgctagccatgcaactctttttttttgtttctttttgatgaagcagcacggcgctggcgacgaagctagattgcgatacttgcggagttcgttgttgcatcatgtatttgaatctgttctatgctgcggtaattcttttgtgctgcaatttttactgtacatggtttcactttataatcactttgttttttgttgtaactgtgcccagcacaattgcacaaactgtttgattgctctcgtgcaacatgcttatggaatattctttcgaattctcttgagtaggaccgtatctttccattctgaccaagtatttatatgtggttggtgacagtactgacaagtgagaagtccctttcagcttatctttggttatccgactatccaaaaacaggacacaatgtcacttttgtatctttagcaaaagtctttcccttcgtgcgcactggtggct

SEQ ID NO: 3932 - DNA, 4106 bp, Sorghum bicolor
gctatactcgaagattgtgccaaccacgctcggggaattgtcgtccagtctctacgctgtgctcagggactgtgccgaccatcgagcacgtttacgttcccaaccacgcttgagaattcgttaactaatctctatgctgtgctcgaagacggtgccaaccacgcttggggacttgtcgtctagtctctacgctatatgctcggggacagtgccgaccaccgagcacgtttacgttcccaaccacgctcgaggacttgtcgacgagtctctacgctgtgctcggagactttgtcaatcactccctaccctgtgctcagggcttgcttcgatcaatcaccgaccacagctcgaggattgctcttctcagttacatatgaattagactcatacaactgagggacgattttaattttttagaccttgctacaaggctcatacttcgccttctagcaagctcggggactatatcggtacgatgcatctaacgatgcatctcagtatcaaaatttctacttggatttttctttttagaccttgacatcacgtgtctacgtcacctactactaggctcggggactaagtgggcacatttcaccttacgctgaatatgcttgttttttttgaagtattcacttttcgtaaaagtaaagtgggcacacttcatcaaaaaagaaatctttttttctcaagagcaccatgcattatgcggacaacctgcttcctcgtcgtcaacagtggtcgactgtcgtctatgctggtcgaagaagctcaagatgatatgtcgcatcacaatacatggagctcggggacttgttgtgggggtataaacccctataccctcataactcgacatgggtcacacaattagagatggcctggcccataagaagaagatgtgcagcgcacgacgatggtcgcacatgcatcgcaatactacaagaaaatattgtaactctgtcccagcaacttagggtagcttccgcattcactctgcagtgtgccagtgtgtgttagctagacaccacctttcgtcgaaattttagacggaccgcaagtcaaacaactcggcattctgccattcaccgtagcgtcgttggactggtataccaccgtttggttgggtacatgaaactgaaacggattaggtgccgcttccaacccagctctatagtatactatagctaactagaaacatgcatgatacatgggtttggtacacatgatccatgcaatgattacttgacaattatagtctcctcccatgcatgatttaactgtagacctgtcgttccttctgtatccggctgtacatgcacgaatctctaggccttgtttagttccaaaaaattttgcaaaacggataccgtagcactttcgtttataatttgataaatattgtccaattatagactaactaggctcaaaagattcgtctcgtaaattacaggtaaactgtgtaattagttatttttttatttatatttaatgttccatacatatgctgcaaaatttgatgtgatggggaatctaaaaaattttgcaatttttttagaactaaacaaggccctagtttgtattctcggttgtttttctcaaataaacaaataaataaataaaatctcccgtgttcttcaattccttacactgcatatatcagacaaaatgaaggcgcgctgtacatctcttatgcacaggattaacaagaatcataatcagtgtatgtatggtatgaaccggtcctagcaactctcgataatacacaccgtgtgcgataactgccaagaggccggttgcttttttaatggttcactcgtgatccgaaccctccgtctctcgcatgatttgctccacagccatgtgacccctacgcaccaaaggccaaagcaccacacgtcgacgcggccgcaactgccgttgatcgatgtcgatcgcgcgcggccttccttggagattctttttccggtctataaataccccggcgagctgctcccttccagatcatcgaaacgcaaaaactcctcctgtcagccaaatcaatcgtagctactacacctctcgcgtaactctagcagctatggcatcctccttctccaaggtggtcgcagcacttattggtgcgctcatcttctccctccttgtcacgtatggctcgtgcgctacaccggccaacttcaccgcctccgacttcaccgccgatcccaactgggaggctgccagagccacctggtacggtgcgcccaccggcgccggccctgacgacaatggtacggcactacggcggcaggatcgtcgtatactgcatcagcatgactgcatgtgtgcacgttgtgctgttggcttaacgcgcggtggtctccattgatgtgcatgctgcaggtggcgcctgcgggttcaagaacgtgaacctgccgccgttctccgcgatgacgtcgtgcggcaatcagcccctgttcaaagatggaaagggatgtggctcctgctaccaggtcagtcgacgaagatccttttaattaaaatttggtgtgtctgccttattggaaacggaaagctagctcgagcatatatactgttgacttttgactaatgaatgaaaccctccgttttaattattttctttcctactagatacggtgccagaaacaccctgcctgctccggcaaccccgagacggtgatcatcactgacatgaactactaccccgtgtccaagtatcacttcgacctcagcggcacggcgttcggcgccatggccaagcccggccgcaacaacgagctccgccacgccggcatcatcgacatccagttcaagaggtgggtatcggcgtcatgcgcgattgcacatgcactgcacgtcgcgcatagagccagaaaccaacaatttgcaggccctgcctgaacagaatataggggatgcatgtggagctcttgtagatccgcagaagtattactagttatatactgtactacctgctcctatctgtataattaatctagattttgaggactgttgtcggactagctagacacaagactaatggaagcaaacatgtcacatgcatgcagagtgccctgcaactacccggggcagaaggtgacgttccacgtggaggagggctcgaacccggtctacttcgcggtgctcgtcgagttcgaagacggcgacggcgacgtggtgcaggtggacatcatggaggccaactccggctactggacgccgatgcgcgagtcctggggatccatctggaggctggacgccaaccataggctgcaggcgcccttctcgctgcgcatcacaaacgagtccggcaggaagctggtggccaaccgggtcatcccagccaactgggcgcccaacaactattaccgctccatcattcagtattagctctgctactacatgcgctctgattcggtgtcattggcttcattggaactgtactgtatgtaattgcatcaatcttcggtgcataggatgttgacagagttaggagatgaggaagcaagtttggatgtgctttcccgctcactgtcaatacatgaaccagtctgatcaaggttataaattactcctatatatatataaagcaacttctcagtggcattcagtacgtcctgttcccatgtcgatttttatgtagcatcggttggttatatattcagcagcttaggggaatctgatcttacacgtccaaaccagcaaaactgagttggtcagtttttttttatagttctccctccgctcctaataaaaagatacaaatttcactcctcaggagtcaaacaatcctaattttaactagatttgctaagaaggtttccttatttccatcttttataaaaataaaaaattagtatatagtactttacatatacctcataggaaataataggtaactttatccatctggtctagtaattaaacgaacggtttacgtccatttattagtacaacataaaaaatagtatcaacacctatatcttcacatatgtttactataaaatatttaaaataactttgtatttttattaatttggtgatacttattaaacatcggaggcattagtaattatttttctgtatgtattaggttaaacgtgggatcgttt

SEQ ID NO: 3933 - DNA, 4802 bp, Sorghum bicolor
  misc_feature (2227)..(3639): n is a, c, g, or t
tttctagcattccaccagcactacaagacagtgggccactttcagtttcagctttgtttcttcttggagagtaaaaataaaatccatgacatcaagagtagatctttgattgttcaactgcatcctcagatcctccaggtcaagctttctccgaacctgtttgacagatttacattttatttgatgtggacacaaaacgaatgccaaaaagaagaagaagatgtttctcacgggctttcattttcgtgtcttcttaacccgtcacaattgggccctccatcactctaaagcccaaaactgccaacactagctcagcccagcccattagagagagacgtgaggggcagaggaaacgtgcggcacccggaacaaggaagcctcctccttctccttcccttccccaccgccgcctctatttatcgccggctactagggttttatggttggcgccgcgacctgagcagaatcgcctccatcctcgacgccccctcatcgcgtggccgatccttcgcatcgccgccgttcccgtcctcctcttccgttccctgcggtctccctgaacctcacgccgccgccttccaacgagccgacgcgcggaacggagggagatccgttggccccggtccttctctcggtaaggaatccccgatcagaccttcgtttgttccaatccatgttcgaggcgaggcttcgacttttgttgtggggaagggggttaactcgccgtcccataagtgatgatgcgtaatttatgacacgcgctccaccacggggatttgtgatacctgatgacaccccaccttgtgccttgttgggcttgcttcgtggtttttaggattaggttgtcatgctctcctaattcgttctacatagtatgcggagtactgtcctcgcaaaaaaaaaaaaaatactgtccatgttatgttgcatttgtttacctgcttgtaagttaagatcattggcgctggtttggctgcactttgttgaagaattatcagttacgtgaccttgcaaactgaacaaagggactgtgtttgttcaaatctctctctctctctctctctctctaaggattgaaaaacagtactgcatttgttcacatgtcttatgtttacacattccaaaaaggtactgcatttgtccacatgcctgatgttacacattccaaattgaagaaagtgactatttgttcaaatccccttccttcgttacatattcttagtgtttcagttggtctgtctgctttattgttgaacaattaagggttctgtagccataagatttggaaaaaaaaggtgctgtattcgtccaaatgttctatgttatgtattacaatgaggcacagcaggggttgtgcactcattgttgaacatttacaggttgtgtagccttgcaaactggaaaggtggcttcattttatgaagtgtcttaggtttcatattccaatggcagcaagtgggcttaatggccatgatggttaattattaatccttttatacagaatactagtagcatttatgctgttttagctaccaagttacttttgcatgtatttagtccttgcatgcaaattgttatcaacttagatagcagatggcatgctaaaggctaaactgagcatattttcaactgggtgatgggacttagcttctttttgtatgtttgttcattcattgtttggttgcactgattactaattacaattgttgtatattttgtacttcgaaatatgctgtttttcaatttggaactaatttgctaaatgctaagtatctggctaattgactcgttaatttctgcaggctgtatcattttatcttcactcaggagctttgttaacactttgaaatctttgacatatggagtcccagaagagttgtcttctgatcacttactcccatgagattgtagatggagtgcctttgtatgtttcatcaaactgcctgcctataaaagctttgaaatatgaacctgctggccattcattccatgctgcggcaatgaagcttcttggtcttgggcagcatgaagacatagaaactgatgatcgtagtgtctcatcggatgacaaaagccaagattttaatactgcttctgatacctttagcagcaaagggaagaagaagtcatctggcagtcaacagcaggatcactatgcattgcttgggttgcgacacttgaggttcttggccactgaagatcagattcggaaaagttaccgtgacannnnnnnnnnnnnnnnnnnnnnnnnnnnnnnnnnnnnnnnnnnnnnnnnnnnnnnnnnnnnnnnnnnnnnnnnnnnnnnnnnnnnnnnnnnnnnnnnnnnnnnnnnnnnnnnnnnnnnnnnnnnnnnnnnnnnnnnnnnnnnnnnnnnnnnnnnnnnnnnnnnnnnnnnnnnnnnnnnnnnnnnnnnnnnnnnnnnnnnnnnnnnnnnnnnnnnnnnnnnnnnnnnnnnnnnnnnnnnnnnnnnnnnnnnnnnnnnnnnnnnnnnnnnnnnnnnnnnnnnnnnnnnnnnnnnnnnnnnnnnnnnnnnnnnnnnnnnnnnnnnnnnnnnnnnnnnnnnnnnnnnnnnnnnnnnnnnnnnnnnnnnnnnnnnnnnnnnnnnnnnnnnnnnnnnnnnnnnnnnnnnnnnnnnnnnnnnnnnnnnnnnnnnnnnnnnnnnnnnnnnnnnnnnnnnnnnnnnnnnnnnnnnnnnnnnnnnnnnnnnnnnnnnnnnnnnnnnnnnnnnnnnnnnnnnnnnnnnnnnnnnnnnnnnnnnnnnnnnnnnnnnnnnnnnnnnnnnnnnnnnnnnnnnnnnnnnnnnnnnnnnnnnnnnnnnnnnnnnnnnnnnnnnnnnnnnnnnnnnnnnnnnnnnnnnnnnnnnnnnnnnnnnnnnnnnnnnnnnnnnnnnnnnnnnnnnnnnnnnnnnnnnnnnnnnnnnnnnnnnnnnnnnnnnnnnnnnnnnnnnnnnnnnnnnnnnnnnnnnnnnnnnnnnnnnnnnnnnnnnnnnnnnnnnnnnnnnnnnnnnnnnnnnnnnnnnnnnnnnnnnnnnnnnnnnnnnnnnnnnnnnnnnnnnnnnnnnnnnnnnnnnnnnnnnnnnnnnnnnnnnnnnnnnnnnnnnnnnnnnnnnnnnnnnnnnnnnnnnnnnnnnnnnnnnnnnnnnnnnnnnnnnnnnnnnnnnnnnnnnnnnnnnnnnnnnnnnnnnnnnnnnnnnnnnnnnnnnnnnnnnnnnnnnnnnnnnnnnnnnnnnnnnnnnnnnnnnnnnnnnnnnnnnnnnnnnnnnnnnnnnnnnnnnnnnnnnnnnnnnnnnnnnnnnnnnnnnnnnnnnnnnnnnnnnnnnnnnnnnnnnnnnnnnnnnnnnnnnnnnnnnnnnnnnnnnnnnnnnnnnnnnnnnnnnnnnnnnnnnnnnnnnnnnnnnnnnnnnnnnnnnnnnnnnnnnnnnnnnnnnnnnnnnnnnnnnnnnnnnnnnnnnnnnnnnnnnnnnnnnnnnnnnnnnnnnnnnnnnnnnnnnnnnnnnnnnnnnnnnnnnnnnnnnnnnnnnnnnnnnnnnnnnnnnnnnnnnnnnnnnnnnnnnnnnnnnnnnnnnnnnnnnnnnnnnnnnnnnnnnnnnnnnnnnnnnnnnnnnnnnnnnnnnnnnnnnnnnnnnnnnnnnnnnnnnnnccgtcccacatctgtggcagatccagatgcctggacagaggcacaggtcctggctctagtccaagctttgaaggcttttcccaaggatgcgagccaaagatgggagcgtgtggctgctgctgtcccaggtaaaactgtagtccagtgcaagaaaaaggttgcagcaatgagagagaatttccggagcaagaaaactggggagtagactgaggcattgcctcattggaagtccattttgcaaggaagagaatctcggatggcaatatctatagattggatttagcatcttggctggcaaggtattgcttggcgaatctctcatgccttcagtggtgaggataattttgttatggagctgtgataactcatttattgtgccaggccaccagggttgtttgactttggtcagccgtaggaggatgccattgaagctcatctactgttgatggactgatgattggcattttgtagcagtggttcctgttggactttgtttggtctggctcctggggttgtctacgcgttgctggaattggtgccctggttcggtaaaatgtagagaaccatatatgtttttattcattattaatgtattcattattaataactatgagataggaatatatgctacatcacgagacctattattgaagtaagcattatttttcctggccacacttagtgtggtagctatatctgcccttgaatcattttcaatgcttccgaacgcagttgctaattgtcacctattggctatagtcttcagggcccatttttgctttccagttactaatgatctggtctgttccctattcgttatagtcgtgagggcccgtttttcctttccagtgtgcatatgggtgtcaaagaggtcccatttttgttttctttgtttccagtgtgcttatggatgacaaagtgcgcccagttttcgttttcagtgtgcatatggatgccaaagagggaccctttttcgtttccagtgtgcatatgggtgcctttggcattcgatgaccccccaggcagccccgagtttagttacaatgatgttgtatgtcttgcactactctgttttcagtagtttgttttagtaccttttgagttaatcctcttccacctatgtcttagctactctgttttcagtagtttgttttagtgccttt

SEQ ID NO: 3934 - DNA, 4400 bp, Sorghum bicolor
tacccggtgtgtccggtgctagcgtccggtgcctaaccctaagcaccacactgttctaacggctagggacctcaccggacgcactcacagagcgtccggtgcagcgtccggtgcccctttgggcacccaaacttcgtcgaaacgcgatcgctccaaaccgaagtttgttcctctcgatctaaggactatctcagagctgcctagtgctaggtttaccaagtgtgcaccacacctaaacctaaagccttgcctaagtcaagctactagatcaaagcccctcttaatagtacggtcaaaggaaaacaaagtcctaaactactctaagtgcccttcttcaccatatggcacttagacctagtctagtcttgacgatgtctaaccatcctttgaaaaccgaaacgatttccactattaagtaggcatgtacgtccctgtccatcgagtacctatataccatgaccttacctatgattttgcctctgcaaaacacacgttagtcatagtaatcaataatgtcattaatcaccgaaatcactaggggcctagatgctctttcatacacacttgcaaaatttcttagaaattggaagcacaatccacatcaacggagttgacaaagacgtcatactgcttcgtctttttccattctcactagaaggaaaagcgaggaagtggttctacactcatcaagataacatcaacaactggacgaacttgtcagataaaagactcttcattcatgtataaggaacattgctaaagtaaatcagagcatcgcaagacttactccgcaatacaaattctgcctgtcctatcagcggagggtggactatataagaatcaacgaagctgtcactatcgcgaactaccacacgacccgaccaataggatacatttgcacataaataacatctaagcaccacgctcacatgtgatctatcacctaactccctcgcgtcaagagctaagcgctttgcaaacttatacataaactcattatcaatcataactaatcaaatatagaactagagcaaactaagagcataataaatagagacataatgcaattagaacaaagaattagagaaagatatgaataataccaatctttattaccgaagatccgaatccagagcgtagtgctctacttctctaattgctatctaatcaaacctctaaacttgaaggattagggagtagctaattctaattctctgtgggagagaagctataaaccctaactttgatggctacctctgataatgatttctcctcttctcctctctcccccagggatggagaggccttggttatatagtcctttcaagtgaatgtgggccgttggatcaaaccgacattgattgtatggtttagattcatcctttaggtcggtggagcgtagtcccgaaagagagtcctaattggactctaaccctaggcgggcgcccaaggggggtgggcgggcgccctgcccccgagcccgatcgtgttctcgttcgttcccgtggcttctggactcttctggattgaggaaaattgcgcggcacgtaattatctcgttgtaaacatgacatgtgggccttctctccatattctctgataaccccctgcagaaatagataaacaccaaagctcgtgaaattctgttagataaaaccctaattctagatgtttgatgcatattgatccttttccatgtttatttaattattaattttagtacttaaggaccgtcaacactccctatatttgcattctgtttacacacatatgtcatttttttaccgaattagtaggggaatccccaatctattttttaaaattaaatgaaagtatgatgtttacatttacatgttgaaagtaacacctttaatttaaagtaatttaatttgtatctaaaccattgacccattctgaaaaaaataaacaaacaaaaatctcccattgacatataagtacaaatataagatagtatataaataaattaatgtcgatcaaatatgccatatatttctttattacacatcctacaccactacattgaaagtaagcaaaatatatgccgcctctattaaaaaaaatactatatgccaccatgtagaccaagtacatatgcattgatgatgttaaatgatgtttattttaatcgctatcaagcgtgcaaaaatgttcccttgacaaaccacacatcaatgaggctgataatttattttaagttacattagtactccatgaacaattgcttaacatatggttgaaaacttgtgataactaataagatcaaaagttgaaagccactatataaattcatgatgacacataaagggatgtaacaactaggttccaactaaatacatatcgcactagaaataaaaataagacaccctagaaactctaactagaggtctttaattgagcctctacatcaatttagatgtttcatcaatcatgaaaattattccttaatgactcatatatgaatgatacaacaaactgtctaaagctatattcaagacacataatttatatatatattaattttagataaatttattttaaccaaaacatttgacaaatcatattgatagtacaattgtaaatcattatattttatagtaaagcaatattaaataaatatgattctttgataaggaaatgcaaacatcttgagatcttgagaaaaatcgaggaaggttattggagaccaaaggctgctatcatttcctggtttttaatatttctttggagtaggtagtgatcataaggcacaaattatgctcttaaggttagcaccgatatgcatcttagatctcacttgaagctttaccattgatctcgaacaatgtgatgtcagtttaaatggccatttatgttatcacgctatagttaagagtgcagtttgtaacctagttttagcaaactacaaaaggagagttaataaagatgcaataagcacaagagttccaacttaacccaaggattgaaaaaactatagcaactaataatatcaagatttgaaaatcaaaatctagattcataacgatataagactatgtcttttaaattcctagcctgtgtgggagcactttgttaatgaatagtgttgtgctaatttcgctgaatctgataatgtgcttcttgcatttatgtgttgcctagctacctctttgacttccctttccttggagatgacagcactatcactgtggatgacaaccatgtcaatccactatacaagcatgttttcccaccggaagtggcacctcaactgtccttcattggattgccattgaaggtcagtttttctgcaaaatgtcattccccaccggtttacacatgcatgcacgcacacaggcacatgcgctcgtgcacacacgcacacattttgtggtgctctctaagatctgaaaccttaatttgttccaaccaggctattccttttccactagttgaactccaaagtaagtgggttgctggagttctatctggatggatcaagcttccatctaaagaagaaatgatggaagatgtgaaagctttttattcaaaactggaagcacgtggatggcctaagagatacacacataacttatcacattgtcaggtagatgtctatgaatacttggttaaactctgtgacatgatcactatcctgagttctattgacatttcatagtgtacatttgaattttgggtcatacgcatgttttatatatgtagtttgagtatgatgattggcttgctgagcaatgtggccatccaccgatcgaagaatggaggaagcagatgttcactattaatttaaagaacaagatagctcgtcctgagagttttcgtgatgagtgggatgactatcatctagtggccgaagcaaatgaagatttcaagaaattcttgtaaaatcttttccactaatgtaaagaccctaagaaggcattgtctgggttcttgagctctccctgtcagagaaagacaaagagcacgcatcactagtaaaattgaagattgttggagtgtctagttgattcgaccatctcaagtctagtgctcacattggagcctaccttgaggattagtcctaagtttgtgggctttagagtaagagagagagaggagcgacacttctagcactcgcctcaacatggattaagtgatcgacaagtcaataaaccacagaaaaacattatatgtcattctctactttgtggtttacatatctcaacactagcttctcactagtactaatcttgtgcttgtgtagttgctcttctgctaatgtagttgcttactagtatagcttgtagttagcatttagcgtttgctcaccactatgagtatgtgtagaggagctccctgtgcttcccaccagctcaacaccctagttggttactagtttactc

SEQ ID NO: 3935 - DNA, 7796 bp, Sorghum bicolor
aaaacaactgagggcttttttttttgtctgaattagaattcatctcagttgttaacaactgtgtaccttatattacaaatgttctaccaggagaacaaaatataactaggcttatagagtgctatgacttttttttatgtaaactagcacaagtagaatctttcgcatgactgacttagagagccaaatatgtcagcttatgagcttcagtgaatttatgagttccttcgttcattaggtatttgtaggccacgatcatgggttgcataatgacaatcatgcccttgggccaatgatgtaattccttagggtccagcccagacctctcgaagcacatgtcttgagggtcttctgaaaagtgagttctcattcgcaagttttcagggttctttgtgatgctttatgagggtccccaaatatgaattttggatacatcatgtggcaaaccctccacacctttaggatgcagggttttagagccttctggatatggatccttgaagcacatagaggtgcatatggttattatggcctattctcccaggtcttcagtgaggctgagtttgagtctgcttggttggaggcctaggcattctgcctggcaaaaagagcttcctaggagtagcctgacaagttgatgttttgtgcatggtcaggcaagtgtgaagaatttctgtttggttggaagcctgtgtatgagaacactaataatgaaattggcacatcgtaagtacttgtttaattgcatgacttattaatagcactatcataatatgggctatccgactaagtggtttatatatttttttcagcgaattaagctattaacaatataaaagtttaaatgaaactcccatattatttaattaaatatgatagagaaaggatttcctaaaaacatgtagcactgaatatgttgcgcaagctatccaatataaattaatgaaggtaagggcaaaccaaattatttatagttacacgacctttttacaagccatccaaatgaacagaaaaataaataaaatgaaataccaccctagtggcgagtaacacgtttgaaagcatcatgattatgcctagacacccatgttttattagccaggcactggttagaggcaggttccaggctccctccaacccgggcaaattttcatcagggtctcaactctcaaccaaacaagcccttgctttttgtggagttttagtccctttcgttattggttggctttgcctgtagcagatacttctacaaataaattactacaagacaaaccatggatagctatgtatcctaaaaagtaaaatacaggtgctccctctgaccttattcattttttgttttaggtcaatacccgtgagacaagagagcatttgtcttctagtttttggcatagcttaaccctactggtaccagtaagtaatttatatgtggccatttaatggaaaagttccagtgaaaacccaaaacatgttttcaaactgaattagtctgcatattttctacactgggggaatggtatgataagaaaatattaaagacagtgatattaaagtcttgaccaaactatctatgagatgactctgttgtgctatatctgtatggtatcttgaaaatgcctttggcatttcctgcaacaatttcttaggaagaccttcatgcctcatttctgaatactgaattatctagcctgtggttttttatgttacttgttgacctgatgctagccttacttttcctccttttgtctgtttgttttgtggcagtagtttatttaggaagtgtataattgatcaaaaagacttggtccaatcctacttttcaaatcactatggtcaccctttcctacagttgtactagcatagaatgtcaggtgtgttagctttccccccttctgtttgaatattatctggtgcataatggatttttttatcctacttccattttttccttgcatgtattagtcatgataccaggctcaaagaaggaaaggaatctcagcatgcgctttcaatcaggccagaaatcttctggtaaattttgtttgttttcaaaagtccaatctgccagcccaccaccagggaatacgctggtttatctgaatgtgtatgatttgacaccagtaaacggctatgtttactgggctggtctaggggtatttcattctggcattgaaggtatgatgtcctacaagtttccttgattattttttatgttttcacaaggtcagcattatttttcttcctgtaaaagattcagctcgtattatacttcaagaatgatgatatttagtttgtctatttacatctgcatagcacttggcactaatttgctataaaattttatgttgtgttcagctttgtaaaaatcttttgtgcataggccttcccttgtttgaatacactgattccatgttttagggacgatcaacattggaatacaatctttggtcttgtcaattaaccaagccactgcttttaaaccatcaaatagtgtgattgttgctggcaaaacttatgatggaagccaacctataaaatggaaaaagaatcttgcaacgggttattcggtgaaataattttagtgctattttatattccttttcgtcattcatttcttctatctaatctttttgaaaactcaggagaactgtgtttcattgcattagagagaaaaaaaggagggtccccatacaaatccttcctcgcatacggggaccagatatgagagtcagggaaccaaactaaaaaaaaggccttaaagaaaacagaacacaccaagacttgaccacgcctaaggaattaggcgacccttccaaggtctagaccttgcagtttcttagctcctgctaaacaccaaagactctgttcatccttaagcaaactcaagattgagttaactgaaggagaggcaccctaaaaaacacaagcattcctatgtttgcagatcatccaagcccccaaaatgacaagggaattaaccccctttctgtcctctttcttcacttttttaatagtcctgcgccaccattcagcgaagctagattcatgctgacgcggaaccgacccagaaaggttcaatggagcaaacaggttgaaccaaacttgccttgctacaacacatgaagttagaaggtgtcgtatcgtctcttcttcttgatcgcaaaggggacacttatctggatggggcagcccccttttagccaatctatctgctgtcagtccaacacctattacggattgccaaccacagaaaaattttgcacttgtttggggcccaagatttccacagccgtctccaaggttcaaaagttacacaaccgaataaatatgctctgtaggctgatttggaggaataactgccacttgcatctagcttccatatgtgacgatcctcttggtcattcaaatcaaactccctgatacaatcccagagttgaagaaattcacagattccaaccccagagagtcccccctgaatatcagaaacccacctatcatcttcaagggcttcagccactgttcgctttttacgaatttggggaggcacacaatcaactaccaaaggtgcaaggctcacaatggtgcaaccgtgaagccatctatccgaccaaaaaggagtatttcgcccatttcccatttctgtgttgatagcaatagcaaacagggcaagagaattagggtgagaggggagttcgaggtctgtccatgggcgatcagctcgagttttcttgtgcgactgccatcttgtctgcaaagcccaagtcctaatctctagattggggatacccagaccaccaaggtccaagggccgcatgaccttctcccaggcaactaaacagcatcccccatttgcttgctctttccctttccaaagaaatcctttcctgattttgtcaattgccttaatgaaccacttgggacgttgatagcgatcagcaaataaatcggcatagctgataggacaaaacggaccagagtggcacgtccagccctattcattaacgctgctttccaacctggtagcatatccgcatttttttcaatccacggcatgaaatcagatttcctcagtttctcgtgagatagaggcagccccaaataagttcatggaaattcagaaatattacatgggagattatccatgattgctgccactgaagcctcctcgcagcggatagggatgatactgctcttgtggaggttagtctgcaaaccagatgcagaaccgaagatgttaagaatttccttagaaacctgcaactcctcttcaaccagcttgataaataaagcgacatcatcagcatacagggaaagtcgctgtccagaaacgcgatgggagagaggtaaagcccaagccatgacctctagttttcttgtgccactgccatctagccttagaatttcagcgaatcgtctgtcggagattgtacaaaacatttcattgaaagtaaagattcctagaatcaattttagttcttttatcacaaaaatgcatcttacaggatttcatgtggcctgaaatataaatttgtaatttccttatcagggaatattagctccataatattttttttgttgggaaaattgtgttcttgcccttgtctaacccaagttcttcactacagataattgtatgggttattcaactattcaagtattctgataaaggagaataagtgatatttaacaaatgcgatcccataacatgctagaaaagtaatctttcctcgcacaagcctaagttactttattagcagttacttgtgatgaatgctgattatttcatattagaatgaccatcttttggccagctatttctggcttgtacagtgtacaactttagatatacatcatgacttcatattggaggaaccaaaagtagcaaaggttaaatcgtgtttgaagccgtgaactttcagcattcatcttttgttgtgagtgttggtttgcattgattagatgatgtgctatatttgttcagattgtgtggtttgaaggagaataggatattaaaatggagcgacagacatacagtggaattagagatgtagagggattgagagattgaaaacataggagaaattatttgtttgctacattaacaacccttggcatcgaggactcattttgactgattgtgagatgtagagggattgagagattgaaaacataggagaaattatttgtttgctacattaacaacccttggcatcgaggactcattttgactgattgtattgcgcctctgaaatcagaaagctgattccatttcgttttgttttctcaatgaaatgcttcaaggttatcgaaacccattgtttttgttattcttcttcttgatatgatttgtacttattgtttaattagctgttgggcataagactgtaggttgtggcttatggtattctctaccttgtttctttacagttcatggtgtggagtatgcatttggagcacatgactattcgattagtggagtttttgaggtggaacctcggcagtgtcctggtttcaaatttaggagatcaatatgcatgggaactacctgcctggatcctctccaaatcagagagttcatggagattcagtcagtaaattacaatggggatacctaccatttgataagtaaaaactgcaaccatttctgtgaggatatctgcaaaaggttgacaggaaatttgattccaaaatgggttaatcgacttgctagaatgggtatgaattcttgacacatgtgctttctcagccgtttatattgctatctaagagttgctgcaaagttcgtatatgtatctattctttcctcaattattactataactatctgtttgctgtcagagttaaaggttcaaaggtagaatttcgtttttcaattgtttagttccaaaaagttttgggaaatcgacactgtagcactttcatttgtatttgaccaatattgtccattcatggactaactaggcttaaaagattcgtctcatcaattccgaccaaactgtctaattagtttttattttcgtctgtatttaatactccatgcatgcgtctaaagattcgatgtgacggggaatctgaaaaattttgcaaaattttttggtaactaaacaaggccttagtaaacaccagtgcttctcatgtgtcacgtggtccaactcactataattcccccagatatttatcttagttccctttttttttgcacgcctgaccttatggcacctgtgtgaaggtactgatattttacatccactaatgggacatatctgatggttgtaatgttaggcaaagttgttttgggaatgttcaatacaataaatacacctactagcacattaactgatttggctgctgtatggactacgtctattatggccactttgagtggatcatgtgttttctgcaaaaacgttctctggaagtggttttatgtgaaagtatgtggaaaatctgcaacgacgttcaatagaattgattttatgtgtaattacctagaaaacttagcaatttatccaaagtgagacagcttggctgttcaaaggaaactgcacgattcagtgtgcttggatcaactacgtttgagctcatataatgggtatctttttctaacttctgtaacagcttttgtcaatggcagtcactgagattcacaaccttttatgtgtaggtgctgtttgcaactgcattctaccagtgcccctgaagatcagtgcagcccgtcatgacccaggttgtcaagctgaagatagtgagagaaaaatgctgacaggttccttcagttgcttctcttcaatctctctatgccaaagacatttctcaacatcttcgctctccctacgttcccccacgaaaggcacttcttgggatgccaaacagtcaaattctacccgattgaagaagagctgacaattgaggtaccttgtattatcatatttagcaaatgaagcacaaggatcaatttttttttcatcaatctgttctacaacagtcttcagagaaggataaaaaggtattggtaaggtgttttgcatacttgggcgttggatccagctgtgcttgaacatctgtatagagaatgtgtagagattattcttacatttgactatttgagtttgaaatacagtgagctgggggcaaactccaccctaaacttctaggaaaaacaaactccaaaaaatatttcaatttatgggtgctgcctatgaggtgatatttcggctgtggtagtttgcaaactgggccatttttatattgttccctagaaagcagatgtttatccaagtggtggtattgttcgtccgttcgtgtgtactcatgggtgtgctcgtattggatttgcaccaaatgatgacaacacgagatggttatttgcctttgtacatgactgatgtcgtatacgttgggctattgcccatcattttggttttctaacgcaagcaatctttcatgcatattttttctacataaactcataaagtgtttgtagtgcatatgcaccaaaccacaggggaatgcagttcgtcaacagggtgatccaaccctctttattcttgtctacattcactagcacatgctctcaagtggtagaattctttctgatttccttgctgtgaagtttttttttgttttgatatttgctatctggtggagataaagaaaagcatgggtaatgcagttgtcacttcttgcgacctccattttataccacttaaaaagaactgatgccatcagagggagttaaattatatatgattttttttgtcacggtgacgagcttggttagattaccctcgcttgtc

SEQ ID NO: 3936 - DNA, 6841 bp, Sorghum bicolor
ttgctttttttataagaccgttggagctgcgctaactgaagagcggtcgattcacagtttgacacctagttattcggattggatcagaccaccggttcgatcgctaaaagaccgaaccagagcctacaacggtttaattcacttagaagaccgtctatgcaatcgaaccgctataaaccggttgaaccaacaggtttttcgtcaaaccggtggaccgggcagttttatgcggaccggtgaggttttgagttttttcaaaattacccctctatgcattcaggtcgaccttatctagttaggggtactattggaaattagctccaaatggctgtttagggttgctttcacactgccgccgccacggcccacggcccacggcgccactccctgttgcccgtctccccgccacctcgtcttcccaaaacacaaagctccaagaagcggggctggcggctgcagtttcccgcccgctcgcacaagggcgcgaaatttgcccagctacttcgcgcgctccgtccccgcatcccagcaattatactatccacagtaagccgaggttcctagtctccctcccctccgcttccttctctcctccactcctcacggacgccagagctccttccccattccggcgttgccaagaagccggcttgcgggtgccgtctccccctccgctcgccagccgcgtttatccgtcatacaaggtcagcatctccagcttttcacgcccgcccgccgctgcggccggcgacggccctctctggtctgcgggccgtagtagatctatgtttatcttttttgttggaaaaagatctttatttatcttggcatttccctaccgaaagttgcagatctgttagtcgatctgctcgaatgagccgtggctaggacagtttctgttgtttccgttggtattgattgatttgaggggtgtggttggtggcactggccactgggattaggcgaagaaatgctcctctcgggcaaaagtgttcgtttcagggattcagtattgccacacagtttctcgaggtgaatgccactgggggtttcttgacgagacgagcaaatgtgaaaatgcattctttagaatgaaatatgcgtgcaagattgtccatttctctgttccttttttttaatctctgtgctgggtaatggaagtctggtccttgatgtatagcagtgtctcgtgtcttatttctagtgtggtttatggatcattcctgttcaacacatacatacaattgcttattagttgaagatcacgtatgcacatttatgcattatttctatgctgtttcgataagatcacgtctttgtttttctgtatctcgaagaattcaagggcaaattaccataagctgctgtgtttagggttggactcttttctgcttaatgaaatacatgccctaggggacgggcgtgattgcaaaaaaaaaaaaaaaaaccatatgattcttcgtcaacatcgtttttgcttattacattaagttgattcccttcttttctttttactggaaagtttgatgctctcattggatatgcgcttacatttttgagaggtgatattcatctctgtttcaaaaagcagtgctaggcggcacctaggcgctgggcactaggcagagcatcattgcctcgcctagacttagttgttaagtctaggcatttttcacttacagtgggttaggacttatatgtgaaggaaaatgggacaaatggagatggaggaagataaataatggtcattgaactgtgataatgtcaaagtctttcttttaatatatatggcatatcttctgtgtttaacaaggcttactcttgcttgcaaaaaatacaactgcctaggtgctaggcagagcctgaccgtttgctcctatcgctttttaaaacatccatattcatgcatctatggagcatgcacctgatcataacacttgattttctgcatttctacaggaaatattttccaatctgtaccgttgctttcaaaagccacaatgcctgcttctgcttgcacaaatcttaattttggttgtcttagaagatctacaaggttcaagaatattcacacaatttatgatgaagattctgacagggatcctgctacctttaagaggatcaaaactgaagtcattgattctgaactaagtgttggttctgtcagtgacaaggatagtgaacaagattgtcatgatgtatctctcaaggatctcagaactcagtgtaaagctaagaatcggaagacttcaaaaatcacactggaaggatgtggcattaagaatcaggctaaaacagaagatgacattgatcttgataagcctcttattgcattgaaacagaagagaccaaaaacatctcctgctaaagcaaatataaagatggatgcactaagatcttctccatttgctgcgaaagaggaagatacaacatcacagagtgatgagattcttagttctgcacagagctccctgctcaaagcaacaatgcaagacccagtattagagaagcttggaaggagagttgcagaactggagcagtctaaagttgttattggtgagtcactagcctgttcatatgaagtccagttcttatatcactgtctattatcgtctagatgtgttagatgaatgtgtagagtttttttttcttgtttctgcagatactttttcttgaaataaacataccccttttcaattatgtggctaaatgttttttttctatactgcactttcagattgtactgaagaaatagttggggagcaaatgtgttgtgctgaagtgaacaatacagctggagctctagcgtgctgtgcaaaacctgatgtactttgtgaaataaaaactgaagatacaaattactctgaatttggaacttctatttgttccataaagaatcctgagcattcatcctttgagctgatggagggtgatgactctgtgcctcaatcttgtttcatgacccaaccagctcaattagctgatgtttctgatcattcctgcgaagaaacctgcaatttcaaagaaaacaattttgatgacattacagctgcaaaggcaactgaggttgtttcttcattggatctcattgatgaagtgagcaatcatcagaaaacatctgaaaatataactaatccagatatggataagtcttctactgcaaatggacttaaggcttgttctttcagtcagtcctgccatgatcttatagataatgatgaggactggaatttatttgttcatgggaatgaacctgtaaagattttggaagagttgtctcctatcgatgactctagcacaaatactcaatctgatttatgtggaagcacagaaatgaactgcacttcacttgagggggttgcgcggatgcaggctgagggccaattggattcaatagtctgctgtggtgtaagaccaaagcatatgttactagatatggaaattggagatgccactggtacattcacctttgacaagactattgacttggctcatcctgccaattttgttgcacaggatggaaggctagaaagtatagtatatgatgttttgaataataatgcacaaaggatggcctctaaaaataaatcttctgttggactcccagatacaactgtgattcagagctcacttatcgacttcactgacaactgtcctgaagacaaaaaggcttcagatgataaaatttcacctcccaataatgtggactggccttataagttaaattctacagtagactatgacatttgtagatctattaataatgatgagggatcagaagaattagtgcctcaagatcagttataccagtcgtgtagtgataagttcaaccttagcagtgtcatgccagagatctctaatgctgaagaatcaaaaaagttatctgctggagatcaaaattcttctgctatctctctggaaactgatgtgcaaatccaaaagccagaattttttgtggatgaagaatcaattgaagaacatgctccaaaagtattactgtccaagagaaaggtctgaaccatcccttcaacaatgtttcattgcatatgcattagcaagatatccatactaacatcttttgttttcctttttttttcttcagattatgtcaccgatgtctcaggagaagctttgtagtgctctgactggtattgatttgtgtgatggagtccaaagatcgagtaagcaatatatgctgtccgtttctaatatttttacaagatcattataatcatactctttcttgttgcagagagcaaaatcattattgaagatcgtggcaaaactccaatatcattgcctcagccagcacacatgcaagacagatcaatgttccgcacagacaggagacttaagggcaggacttctgtctctcctacaagcaaaggagttctgaagtcaacaggatccccaccccatcaacagataacttgttcttgcatgagaagttcaccagtggtcttagacactgagaaagctgttgagttttcacaaaggcagatgcatgatatggaaaatatagctgcaaagcttatcaggagcttgaagcacatgaaaagtatagtggacgaaagtttgtcaacagaagcatattctttacttcctaactttaacattgccgaggtgagacatgaaatggaatatgcacttctcattctaaattctagtaaagttgctgctctcacaataaatagataagcacttctgtttgttgaagttacaccatgttttgaaactgctactcaaaataatgtgattccagtaacacgataagagaggttaattattctcaagattgttacttatatgatatgactctaaccttaaagccatgtcctagtttttttttctctcaaacacgcaggagagctgcatgtcattttattaaagatagataaaagaacaatccgattacaatctgattactcctttaaccttgaagcctggttgtcttcatttctgtgttgtctttttagttagcattgtttaacaataccaggcaatgcttcttttgttagtgcttaattgattactactccatctgttccaaactataagacgttttggcttttatagattcatagcttttgctcactcagatatacactgtctaaatgcatagtaaaagcaatatatctagaaaagccaaaatgtcctataattctagagcagagggagtagatgctaagatcagtacatgctaatatccttgtatagaaaaaacacgttgactttgagcccagtgtcgttttccatgactaaaatatttgattaatctgtctgtttctcatgcaagtcaattgttggcagaaaaagtttttgctggtcgtgtttacatacttgcactcttttgtaccattagcatacctgttagtgcagtgttgaaagtgtttcctctaggagactaggaagtaatatctaccaattaggacaactgggagactaagaagtaatatccaccaattaggacaactgcaatgaattgcctctagtactgttggaactgtttgaggttaaataccagctgaccagtaaatgtgggtctaagcatggattccacatgctctgattgaaatctttatttcactgaaaaacaaagtacataacacaggatttgaacacttatatgttttttctttcaattttaaatttatttcagaaaacatccagtttatgtttacgtatgcaaagcaaagcaactcgaatgatgtttatatttgattaatgtggtgcaatgtttctatggacagatcagagcagcctctgaggatgcattagaagtggagaggactacgaggaaatggctgtcgataatgaacaaagactgcagtcgcttttgtaaaatattggtttgtatctatccattttgaagatcgtactaatttttgtagtgaagaaaatgaccctgaactgatatttttgtcatgtctgtattaaaatttcaattgcagagcctagcaaagaagaatgatgtttcacatcctgaagcaccaaggaaacaaagaaaaataacgtttgcagatgaagctggaggaatgctctgccatgttaaggtttttaaggatggacaagcctctcttctttccgaatgccagagtgatttatagacatactaagcaggttgtcatgaaatttgatcagaaaaacaaccttttgacaatagaatagaatcaaacaagccgctcagttgaaccaaaataatgagaatgcttccattcactgtagaaaacagataatgctgtgttgaactcacagtatgtattttactgtaaattgattgatgacattgttgtggcaactcaggtattatccttgtatgttgagctcaagagtccatgtaaagcgacaaattttacaatgtttgctgaggccacaagtaatttgtaattcagaatttttgagcgcaaatttgtaacctagaattagcctatgtaataaaattattggtatcctgttgccctaaagtgctttatctagggaactataggtagcacttaaattcatgggcagccgctgttaattctatgtatgtgtacctatcttttttcaaaacattatagattgcagatcaaaggatgaaaggaagcatagtttggctcaaccaaaaagctcgtggttacttggagcttgaattcatattttattgaaaccacctgccttaaaagccaagctatagtcacattttcgtggggtagtgatcggatgggataattgtgggaggtctccctcttatgtagtgtagatctggatctgagtgaaattagtggcaaactggcaacccttgagtagcttaccactaccgcccgtcctttcattcactatcccctctcccaccctccga

SEQ ID NO: 3937 - DNA, 23244 bp, Sorghum bicolor
ataacctaggctcaggcgtcgaaaaactttcaacacacatatttacatatttgctttgcacaactgaacagtcttttggtcccgtttctttttcttctatagcaactttcttattattttcttgatgaggaggagaaatttcaacaagaacaatagtacatctcttcttcagtctgctaggcaaaaaaagtgcagaaaaaagaatagactctaacttttgaatattaacctttcattcagcaagagcacaagcacatttcttcttcgatcatatgtgaaatcttatatccctacctatatccatcgggataatatctgcaaataggactgcaatcttttattgctaaggaatgcaattatatgggcatggagttcaattattctaatatatgtggcatcttacaaaaaaaatcatgtggttaacaaatttatcaaatttacattgatgcaaaattatagttccacaaaacattgctttatctacgttactaaaagcatacccttgtgttgctgtgagaattaggtgcgctcggctgcagcaaaagccgctattgctccagctggagctggaggcctcctcataggttcctgaggaggattgcaacaaggactgtttgcattgtaaatgatttagaatgaaactaactatatacaatacttatatgaagaaataaattattataaattaatgctaatgaattgtgtggtaagcgataataaaatatttatttgtcttgctgatgtggatatctcaatatcccaatgtttgtgatagtgaattttagttgcatataatagtgcgttgttgtgacggaaagcttatatgttgagatacatttctattgggatttaagattataagagatatttaggctctatttggcaaggcttctccaccgacttcaggagccgtttagagccattttgtgcaaaacgactttatcgtgaaagcctcttaaattgtgctctcaaaaaagtttaaggtggaaaggagccaaaaacagtggcttcacctggttttactttatcctgcatcacgttttatgagagcatattttatgattttttacatgtagagctgttttgttaaacgatttatcaaaatggctgcagctccactgatagagctgttcatggagctgaagccccaaaaaataacttcactggtgaagtagagttataacgggccttgtatgacagagcttctccaccagctttaggagctgtttggagccgttttgtgttaaatggtgtaaaataaaacaactttactcagaagggcccttaaattatgctctcataaagatttgaggtcggatgaagccaaaaatagtgccttcacccaacttcatgtcatcatgaacggtgttctgggagaacatatttttaataaactctatatgtggagtgattttgtcgaacgatctaccaaaatagaattctactatatgtaatgctgttttgctaaaccaatctactaaaacaagtggagatgtaataaacgagatatggatatgagagcgagtaagtaacattttcgtttgtatttgataattattgtctaatcatagactaattaggcttaaaaaattcatcacacaaattataaataaactatataattttttattttttatctatatttaatactttatttatgtgtttaaagatttgatttgacggaaatcttcaaaaattgtactcccttcgtctacgaaagaatcaattcctaggatccgtgccagtcaaactttttaaagtttgactaactttatagaaaagagtaacaacatctataatataaaatgcacattatatgaaaatatattctatgatgaatctaataatactaatttgatactataaatcttagcattttttctaaaaatttggtcaaagtttaaaaagtttgacttaggacaactctagaaattgactctttcgtggacggagggagtagaaactaaacaaggcctaaaggtagaggtgaaaattggaccgatgcaattttttttctccagttgcccccgcgttggtgctctccgtgtccctcgcatgctctctgtctctagtggcgacgactcgccgccgccaccgtacgcccaggtcgccatttccgggcccttgccgacgacgagcactcaccaggtacgtccaccccatctcttccgttcctgctgtgcgaaaccgagcatccaaaccctagcttaagctatttgtattccgatctgatctgatccaattacatgtgtagtatacatgtattatgtctacaaacttcgtttttttttacaaaaaatttatcggatgtacccgtcctttttttgttgataacatacacccgtgtcctttactgggtctctgcccctgcaagcagtgcctcgggtgggcatggacgaagctgcagattcctccgaactgcttcgtcgcgtcgaggagctccagcgcggtaatctccagccttcggtgttattatttgtctgttctagcttccctttgtgctatggtgttatctgttcttcgttcttacctcgtggtgggtgtttatcctaagactggacccctctgtctcatgagattaatctaaaattctttccatgtagatcacaggtcattatatgttatatatacgggaggtcattgtgggaatttgtggatagcttccaactaaattgatcccatcgaaaaggaattgcatttccatagcacagacagtaggcgtactgaagcagtagtgcaaatgggcacatgcggcctcgttcggttgcaaatcaatccatggggactgagggggttttaatccctagcaagtcaaaatcccctctaatccctcctaatctccttcaacccccatggaatggggaataaccgaacaaggccgaaaggttatcatgctaaatatcaaatttattgaggactttgtgtgccaccttgctgcatgtaggttaaggacatttactgtgtgtttgttgctattatggttggggagctctgtttttatgtgagaactgaaatcacaagttggagttggactacaaaataaatgatgaaaatatcgaggcttaccaaaatccatgtcaggatattatttaagatcttattcggcatgactcttgcatgcaactgtttataaatttgattcctgaatgagtgttaacatttgtggtttagactcaattcctccctcccacaatttaaatagtcattaactcattatagaaagattacaacaaatatattcccatgtcacatatcaccatgaggtacttcgttaggaccctgccttaaattctgcttctgctgtgccttttgtcagggaacaaattgttgagcgaattgaactagcaaattttctttgatttccaatgttccctactgtccaattgttagttgcctcttgcatcacctaacctaacatatctgatccattttacagaaaaaatatcacatagcatgtgattttgcttcaattttgagtacatttatttgattacttgcacaatgagacccatgtaattaaattatctttatgattctaaacagaaaaggatgaaaaacagaattctttggaagtattgttacgacgggttgaagggctacaatatggtaatcccaaattccacttcagattactgattttgatcaacattgtctgaaatactaaatcaattagatgttaatatatatttttctgaaaacttggtcaaagttagagaagtttgacttaagacaaagctaaagtgaactataatttagaatggagggagtaggatagaacatgttctatgactcatttttcttaaacctaatgtccttacttctgagtcttggtcattatgattgctcattgaagttgttcttggggcttagctattctgttttatttttcatttgcattgtctggccttttccctgctagaataacatatggtctgaagctcctctttcctagtcatatgcttttagtaccgtttctcgtcatgggatcatgccctcagaagccatttctcacaggaaccaaatatttttctaccataccttctcaggatatgctataaatctaagtgcccttgctagtctagtatgtttgtgctttgtgggctagtttgatttttttaaggaagactagttatgttgttgaatcaaataattgtgtaatgacctcaacatgcttctatttcccataaatttgctattaagtttttcaataattatgatatcaaaatgcttttggccattcaagaaaaattgccccccttttctctgttctgtagagatggatgaaaaagtagatcttgttgaagtgttaactcgtcaagttgaagacctccagcgaggtatgactcacatcacatctatgcactgtgccacacaacacaagattgtcatctgtacttatttcgctaatcaatatcatcatatatcatactgctttttgcgatgttcattagtgcagttctctgtggatcaactcttcatcctgtagattagtttcagtaccgtcggtttttttgaagcagttcgtttcagctgcctcatttaatatataagaagacatagtataactatgcaacctattaaatatgaaaaaatgcagacagtccactagaattcctttgctttataaaacgagaaattatgtcttaggagcgcacactgagactaatcacttaacttattttactactgagaaattcaagagttacttggttatgtatgccagtatgatgtaatttctgagaaagcctgaaggagctgccgaattccttggttcattccgttatatttgtttccaaattccaacacatataagtatgacgttttgagaaaactgctgatcttttggatagcatgttctctcatttttcctggatgtacttacatttatttctggaggcagtagttgtttaagagtttttttgtttaatgattttatcatcgtatatgtatatgttcttgtggcacagggtgtgctgatagatactttgtttgtagagcgtgatgccctcagaaaagatattgagcaattatgtatgcaacaagccgggcctggttatgtttctgttgcaactcgaatgcttactcagaggtgcttccatatctaatttaatctttcatttttattcactgtgcaaaaccaagcaatatttttgttgtaattcaggacaacagctttggaacaggatattgagaacctccagaaaaaattaggcggttgcttaagagagaatcaaaatttgcaagaggagcttgctgaagcttatcgaattaaggtgtgctgcttatttctccctacggttatttatagcagctttattttttctgttttctcattctttcatttatttaaatttcagagccaacttgctgagttacatggtgctgcactatctaaggtttcttactttgacttaaaatatgtggctattttatttaataaactgtagcttttagcagcaatgaacattgctaagggatgtgtgctgattttgttcttctcctctatctttatatatataggaaagagtaataggcatgaacatgtggttattagatgaaatttggtttagtgagtaagtcatcccagcagactagcagagtgccattttccatcttgatcttgggcagtactccttactggacatttcttgctgagcgcagactcaatttcttcatcgctgatgaggcaaatgatgggcagttccctattagcttgagaaaataatttctccaaacatctagagtgcaaaaatcttggaaaatgttttgatagaagacggtaattatcattatcaaatcattaatttgaggtcattggtaaaatataaatgggaaggttttgaatatcactatatcagtggtgcctaatgcagtcactactcactaagagtaaatactgttatataaagaatttgagtaggggagatatttgttagagcagaaggtgatgtggaaatacaaagaatgtacatgaaatgcttgtccttgtccaaaatctactgattggaaattgaaatcaaatttcaaatttcagcagtgtagtcatgctcactggtcttattttgtgaaggaaacctttgaggcatgtcttgtctacaagtcggcacaagtgtgacatgaactgtagtgaaagatagcaaaatcattgttttcttgggtagaaattgatactttgttgtggagtaggcgagtagcaaaccagcaactaaaaagggttgtgcatttgcttgagatgtatattctagcttgttattgatatggcctttcctgtaataacaatgcagaataaggatctagaaaagcaagtaagatttttccagagcagtgttgctcaagcgtttgctgaacgggacagttcattaatggaggttctttttagtttacttaataagttaattctgtacctaaatacaaatgctgtgagcatgactttgtttttcatctggaatttgggaatcacatattattctgtttaattttctagtgtgagaaagcaaaagagcgggaggaagcagtgtcaagaaaatttgctgattttgaggaaaggtatgttgcataactgttaattattacttatatatatgtgatttgtttctataactgtgacatggtctaaaggacattacatactgtattagtgaacttataaggtgacaatgtttctgttaagtagatggatatttgggagataactaggccttatgctttgccaagagcttgagagattgagggagactagaattggttcttcataattcattgcttgcttatatcaatagagtctacagatatttatgtcccttctacttcacctctttagctaaataacctatctggtactaatataaattgcaaatacaaagataattaaacttataaagataactgggccgaactatcagcccgtcggccctggcagcctgttggctgcccatgacagtttctatatgtgattttatttcaatgagttctctggtggatgaatgtatcagtgaggttttagtggctatatatgagtacatatatcttgattttatggtcttaattgttgctacgcacaatccactcgaaactctattgaaaaaaacatataacgtggtgttttgatttttttttaaaccaaaacatgatgttttatctcgtctctcttttatgaccatttagcattcagaaaatgatgatggaattgtaacatgaatacatgatgtttttaaattccattcgtgtttatcttgtacttgccacttacagttcttttatataagagcacaaaatattatgatgcttagtgattggcaggatgagagagtatcaatcagcgattgatgaacagaaatacataaatgatgacttgcagagggaactgacagaactgaaggcgcatacagaattgtccttgaaagtaagtaacttttgttgattgccaatatgaaaagttggaatttgtgtaataagaggatgcccgcacccccaggacaatttggtatctttatgaaaactgctacatttctgtatccacacgggctgtttagttggtgaaaatttttggttttggctactgtagcactttcatttgtatttgataattattgtccaatcatgggctaactaggctcaaaagattcatctcgcaatacaggcgaactatgcacttagttatttttttatctatatttaatgctccatgcatgtgccgcaagattcgatgtgacggggaatcttgaaaactttgcaaaatttttggggaactaaacagcccttgtatgtgtttgacacgtcttggttgaacctaggattcaagtagttttttttctccccagcactctaggttgtgaacgggctggacctagaaggactaccctactatgtgcctatgcaatagtgatcttaatgaactcccaagtatataagaatgtcctttatctatgtatttcatctacatacagtagttgtttattgtctgttatattccttacagcctgttgtaataattttctgacttgtacctattttcgacctttttccaatcagaagctgatatttgattctctttcaggttattctaaaattctatgaccttcgttgcagagactctgaatgttcttcaagtgttacttttgaagagaagtgttcaatccttctagatgattctgctgacaattggagtttttgctctgatggcggaaccgcaactttgaagtacattgtaaaccttaagcccttatccattataaagaataattcatatttaattatgttatttagtttctttcatttgtcttgcaagatacaaattatttgttgcactaaacatcatttgggacagagccagaaaattatagatatggggaacaaatgctaaaagataaattattagaaggcaaaatcaacatttttcattgaattttatgtgcataagaggaattcatctatcataaggaggtgcttgcccctccctccttctgcccctgaacatcgtaatgcattgtcggcttgtttctcagttttattctgggaactaaaggaatgcggaagataggaaatgatgaaactttgctggcatctgtttcagggcttatgcagttatgctttgattcccaatttctcacaacatacttctccatacatggataaaaaacatccgtgttattgatggaactcataaatttagtgctaatctctcctcatttgtcctattcagctaagttatagttcattgtgactgtcatgtcctatttgacctaattgtgccatgtacttgagtaatacaacatgacttgcggaccctaatttgttctcaagaactgctttaatggtgcatttaaagtgtccacgagttactgtttattgaaattttttccagttgatctggacctaaaccaaaatgctttgaataatggcatcttgctactgattgttttgcatcagagatttttcctaaaacgtatttgacatttttgtaggcgtctttagaagaggagaaagagtcacttaaagctaaaatatcaaagctgcaaaacaacttaaggatggtaagataagcttggaaatgccaagtgaagtttgggtataacaaatctttttggttcgttgagaactactgcttttggttgtgtagggacttgagattgaacagcatttgcaaagaaatgcacgaatattagagaaaagacaggtacaattctgaagtattatattgttctttctcttgatctctttaatttgtatactttgaagtgcaggcactgtatgatggatttctgagaaacggattgtcagaacttcaaaagttctacacatatcaaaaggctgaaattatgaaaatattggaagaagaatcgttgcagttgagcaaagttgttgcggagattcaggataagctaactgaaatgtgcatcaacactgaagttaatgaacaccctgccgatgagactcaatgttgcgacagcagttgtaaagatgtgcatgttactacagatatcagtcctagcacatgcccaaaggtttgtacaagttgacagcaaacttcttttccctctacatttatgctgagcctttttctcgaactatttatgctgagcctctttctatgtttactgactacagaaacatatgctttgaggatattgacaaattactctataaaacataattgaatgctcttactcctgaacttcagcctttaggttactaagttaaaaatctgaatgtgacacttcaaatgtgctcgacatttgcagccgctagaacatagcataaactggagcaaatatatggcaatagcatgtcttaggatcataagatgctagctctgtaagaaactgacaagtgatgacattttcttttagggcaagctttcctgtcaaatcaaattaactaaaaactgtgttgacattaaacacctctttagcagtgggatctatatgtcaagccgataattgatggatggattaatgtgtgaagaatattcaaatttgatggacctaacacatgttttatggcttatgttaaatattttaatgttttggacctaatcgtgaaagtagcataatctgaatgtccttcactgcaattagtgttgaatcaaccaaggcatgtttaagtgctgggcggaggggcaccacctcgcctagggggtgggtgggtggggggataggcaacgtgcccccagatccagagacacactgctgagggagggagccgcaccgtctcctcttgtccacatttggtcatgcatcgatgatgcacatctgtttgaagaggaggggaagggagcagaactgcagcaggggaaggctttagggtcatggcggcgtggggagcatgcgtgactgcgctgtggctcgtggtggtgtggggagtgttgcgactggcctgcagctccttacttttctaaaacttctttattatgattccctttactgattccttacattctgctccttagaagttctattttcccacaagatactattaaatatacttttatttgttatttctcttctcataacctcctctttggtactgtagcaacaacaattacacaggcatgttgctgtttaatgattcatagttaaatacatagtaccacatatacatagtacaaactgttagagtaaataggaatagtaccacattgtctacccacgtggggtgttagtcctatgtaccctatataattagcccatgaggcccaatgcaatacatccaattccaccaattctattctccttcatcatggtatcattcgccttcagactgatataaacgcctaggctctaggcgagggtcagcgtctagagagcgccgccgctcgtggtggtgtggggagcacaccaggcagcattgagggagagagggagggcaattttgtgatttggccccttctctaagaattcctggaaacttccttattatgattccctttagggtctgttcggttgtaatggaatggacaatggagcaaggaataccagcttatcaacattgtagaaattagtgaaacattccaactgggaattgttctaggcattcattcctgaataaccaaacaagcccgtactggttccttatattctgctccctagaagttctattttctgacaagatactattatatatacttttatttgttattgctcttctcataacctcctctttggtactgtagcaacaacaattacactcatgttggtgtttaattcatagtgagtcaattacattatacatagtacagactgatataaatgcctaggcacgccaaagctctaggcggagggtcagcgcctagcatgttttgtaaccctggcacaaagtcacatgttgtgcatctttggaagcatgtttgttggagtataaggattaggcccatgaggcccatgtatgtgaccatattgctacccttctagggtcagcccaattaatgaaatcatagttaacagcatggtatcaagctagggtttgtcttctccctcccttcccagccagccgccaggcagcagccgccgtcggccggcgcgccgccgcagccgcggccatggctgcccctcctccaccaccagccggcgcgggcgcgccgcccctgggcgcgcccccccgaggcgcgggcgcgccgcccctgagcgcagctgcgggcacgccgcccctgggcgcgggtgcggctctcctggatgccagcgcatgcgcgcacactgtcggggccctggccgcgggagcgctggccaagcaggcggcgcggaacgccgaggcgctggccagggtgacggacgccggcgccgccaatcctccagccggtgccgtcgctgctgctcgccttctcatggcagcggcgggcccggctcctcctacagatgacgtccgggccgccgagaacgccatggcagctgctgcccttcccccaccacctccaccacactccgccctcgccactaccctcaccgctgcccgcgctgctgctgcggacggccatgcgcgcatgcgggctgctgccctcgcttgggagcgcgagcgccatgcagccgatgccctggctcgcaagatcgccgaggcggagcaactgctcatcctccctgcctcgcacaatgtcggggtgacctcctccggctctggggatgcggccgtcgccgccatgcctgctgcagtgccagcccgggctgacgcagccggactgggcttgccgcgtgctgacgcagccgcggcggtcgccaccctcgccgctgaccgggccgctgcggcggcggacagggcctcgtctcttcttgctcctcctccctccgagccaagcaggggttgggggggccgtggcagccaccgtcgccgccgcggtggaggtggtgggagtctctcagcgcctctgtggcctccacctccgagtgccttgcccgggcctgtcggatgggacccggcggcctgggcatctttccgccacccgtggtcgaccatgtggggcgacggcaggccggcccccttcaccgcgacgtcatcggcgtatctgttgtcggacacagcggctctacgtgcgcgggccatggccgctgtgcctagaggagctgcgtctccttccacaccggcttcctcattcctctccaccgccaaacctctgcccgcggctcctgccgcagggctgcgaccagtcagtcctgactggatcgctgacttgggcgccaccttccataccacgcccgatgcgagtctcctctcttctatcagtcctccccacccttgtccttccatcatggtcgctaatggcacctgcattcctgtctcctccgtaggcactgtcaattcccatggctcttttcatatccccgatgttcttgtggctcccggtatggttcacaatctcctctctattcgccgcttcacgactgacaactcttgttcggttgagttcgacccctctggcctcaccgtgcgggagttggcttcccggcgtcctcttctccgttgtgacaacactgggcctctctacacccttcgtttcctggtttccgctgcacctcctttgccttcttattcacccccttcggcatctgccttcaccaccacctccactacgtggcaccgtcgccttggccatcctggcagcactgctttgacccagttccgctgtgccttgcccccgcactcctaatgagcatttgtgtcatgcatgccagttgggccgtcatgttagacttcctttccctacctcctcacatgcggctcacatctttgatcttatccattgcgacctgtggacatctcctgttcttagtatgtctggctaccagtactacttggtggtggttgatagcttctcccattactcctggacttttcccttgcgtgccaagtccgatacattcaccactcttcgccacttctttgcatgggtgtccacccagttcggcctcaccatcaaggccgtgcagtgtgacaacgggcgtgagtttgataacaccaccgctcgctccttcttcctctcctgtggtgtctagttgcgcatgtcttgcccctacacctcccctcagaacggcaaggctgagcgcatgattcgcaccacaaacgatgtcatgtgcacccttctgttacaggcctcgcttcccgctcgcttctgggctgagagcctccacaccgccacctatctccttaaccgcttgccctccacggcttcccctgcccccactccacaccacgctcttttcggtacccctccccgctacgatcaccttcgtgtgtttgggtgcgcttgctaccccaacacagctgccacttctcctcataagcttgccccctgttctactctctgtatcttcctgggttactcccctgagcataaggggtaccgttgcttggacctctcttctcgccgtgtcctcatctctcgccacgtcgtgtttgacgagtcggcattccctttctccaccaccccacctccacacctcctgctgaccctgcggaggcttctttttttcccaccgacccggtggttccaccaccgtttccactataccctgcaggtcttgctccgacacgctctcctggtggtccttcgagccaggaccctcctcctgtacccggcacggcagaggcagccccagagcttcctccaccgctaccagtggttgcgctgcctcccgttgtgcacgaagtcgtcgtcccgatcgcgggaccgcacgccccgacctcacctcctcggcgcttcggcctcgtctaccagcggcggcgagagccggctccgcatctgcagccggtgtcgctggctccgtcgccaccctcgccaccagtgttgtcgtcgccggtacgggctccgccgtcgaccccgccacctccggcggagcacccgtccatgccgcctccggccccgaggcgctctcgcgccgagccgccggtgtaccacccgcctctacttcaccgggatcctcgtcacgctcacccaatggtgacgaggcaggcatcccagccacgggccctcaccgctgctacctgcgagacagggatctctccggtaccctcttccatccgcgaggccttgtcagatcctcactggcgccgcgcgatggaagaggagtacgcggccctcctcgctaaccagacgtgggatctggtgccccgtccgccggcctccaacgtcgtcaccggcaagctaagttgcacggatacggatacgcgtatcggtatcggaaggatacagatacgcggatacgccgatttcccaaaaaaccagatacgcagatacgtttaatattaaaactaaaataaaataataaaattatggaagtctatatttaaatctgataacaataaaaacatcacaaataactacttaagtgtacttaactacttattacataacaacaggtccaaaggtctcagattcaaataaagtaatctcaagacactctcaaatttaggaaagtactaaaaggcattcaggcgcaattcatgcagcagcaacttgctattcctcatctggctcattgtcatccgcaacatcaacctcttgagcatcctacgaactgaactactgaagaaggagagatcgatgggatttactcacgggatctggatcgggctgaagaagaggagcaggctgagcagggcggcttcgcggctgaccagagtggttccacggctgagcagggccgtgctcgtcgccggcgagcagggacagtgccagcggccggcgggcgttgggcaggcgtcgagcgggcggccgggcgtctagcctcgcggcttcagccgtcgcggaagagcaggcgtgcccgcacaggctccacaggtggcttcgcggctgagcaggggccgtgctcgtcgccggcgagcaggaacggcgccagcggccggcaggcgtcgagcgggcgtcgagcagcgtcgcggctgcgcttcaccggtcgggcgactgcggagtcggggtcggggcgtccgcgcgtccgtgccagttagggcgacagaaacggcttcgtaatgggctgggccgtatcccaattggctgatacgtgtgtccggtgctggatacgtatcagccaaccgtatccaattatgtaaaaaaaaacaaaaacccgatactcctccagtacgtactggccatgtatccgcgacgtatccgatacgggatatgcgcctaccctgaagtatccgtgcagcttagccggcaagtggatctggacgcacaagcggcgtgctgatggttccttggagcgctacaaggctcgctgggtcctccggggtttcagtcagcggcccggcattgactatgatgagaccttcagtccagtggtgaagccagctaccgtccgcaccgtactatccgtggctctcgagcgctcgtggcctgtgcatcagctggatgtgtcaagaatgccttcctccatggcattctgactgagacagtctactgcagtcagccggccggtttcgtggattcttctcgccctgacttggtctgccggctcaacaagtctctctacggtctcaagcaggcgcctcgggcgtggtattctcggttctctaccttcctgcagactcttgggttcacggaggccaagtccgacacctcactgttcatataccaccatgggggtgagactgcttacctgctcctctatgtggatgacattgttctcactgcctgcagcgagtcactgctccagcgcatcattaccactctccagaaggaatttgctatgaaggatcttggtctgctccatcacttcctcggtgtcactgttgagccccgaccttcaggcttgttcctccaccagcggcagttcacttgtgacattctagagcgagcagggatgactggctgcaagtcctgttctactccggtcgatacccagggcaagctgtcagaggcagagggtccgatgcttgggccagaggactctaccgcctaccggagtcttgctggcgcgctccagtacctcaccttcacacggcctgacatcacctacgccgtgcagcagctctgcctctacatgcatgcttcgcgggagccccaccttgctgctatgaagcggctcctccggtacctccgtggcactctcggctatgggctgctcctcagccggtcctcctctgccgagctggttgtctacaccgacactgattgggcgggctgcccggacacccgcaggtccacctccggctacgctgtcttcccgggcggcaaccttgtctcgtggtcgtccaagcgacagccggtggtctcacgctccagtgccgaggcggagtaccgcgccgttgccaatggtgtggccgaggctgcttggctccgccagctcctggctgagcttcaccgccccctcgccaggagctcacttgtctactgtgacaacgtcagcgccgtctatctctccaccaaccctgtgcagcaccagcggaccaagcatgtggagatcgacctgcactttgtccgcgaccatgtggccatcggcgacgtctgggtcctccacgtcccgaccacctcacagtttgcggacatcttcaccaatggcctcccttcctcgacttttgccgagtttcgctccagcctcaacgtcaccggtggctagttgtggctgcggggggtattgtgtgttatgtgttttccttcttgtccagtcttgaactccgctgtgccggtagtccagactgcgggggctgttggagtataaggattaggcccatgtatgtgaccatattgctacacttctagggtcagcccaattaatgaaatcatagtttacagcaatgttataagctaacttaacatgatgggcacatgaatgaagaaagtgatagtggatgatgtgaacttcttagctctttgctggggaatttcagtagtttttcgagtgctgaattgaaaatggattttcttttcctattcagggatcagggtctgatatgtaccttacaaatctatttaccttcttttttttcctgaagaaacacttctgatagataatcacagctcattgtggttgcatatgctgcagagtgattctcctgctgatcctaactccatgtcgtttgatgaatctaaagcacttgcacaagccttacaggagaaggtaccatttcactccagtgattctttttgtttttgatcctcatgaatcaattttagatagccctacttaactttgtttttcccaattttgttcaaaagttatattgagatttctctttcggggtgtaaaaagttcaaattattacctccaagtttggccagtgtccagataaccccataaactaacgtttggttcgatttactccccccaactatttaagttggtctagtttactccttaacaagatttttcctttttgtttctccatgtacaagttgagttttaatttcaaaatttgtgagatgatattgatgaatttttttcactggaattgaataatctcacattacaatggtgtccgttacagatggaagcacttatgctcttctcacaggaacaagaaagatacctattagaaaaacagagagacctgattgttattgaagaactccagaagaacttatctcaagtattacctctacactttctacttgtcattacttttcaatcacaacgtacatatttctcaagtattacctctacactttctacttgtcattacttttcaatcacaacgtacatatttgaatgatatgatgagtgttctaaatagtgcaagtatggtgaaatctcatttttcattgtcatgaagttgatactttgtaccattactatcttgtgcattttgctcctagctgttagaaaaggagtgttctacatcatatgattcttttcgaaagtatgcactaaatgactacacttagttttgaacttggatttttcttgggaaatttgtcaatatattgtgaacttgactatctacactgctaacactggtggtctgccagtagtatcatccttgattgacagtaattagtcgtgtcctactcctttggtatatcacctatttttaggtgtgagtttctgttgcacatcagcactggatgggtgtgtcgcttgactagcttcatcttttttgtacaggttaaagatgaaaaggtgaaggtcctgatggaattagcaaaactgaaagaacaatatttgctattgaaggggtaagtattttcttcagtaagtaatcatgataaaccaaatttatttgttaatggagtaatatttttaagggaataaagggataggttttaaattttttaaaaatgggtttttgtaacattggtcacagcattatcttatcactataacaaagcttggtttttgtgaagggcttcatagaaagccacatgctaaacagaaatgtaataaaccttaatcatattgaattaaatttggttgatctgtagatttgttcctttgagtttgatcattgagcatgtcaggaccattccggtgtccaacttggtgtcttgtacaggcataacacctccaattgtttgcattagaagcaaacatgcaaatatttagcatatttttttgtggggtccaaaatacacatgttattattgtaactgtattatcttttttgctcagcagttctgctgtgaaggaaggtcatgatactggtgattcatctaaagtcattcctgggcatgaccaacaagggatgctgaagactatgctgaagaggacatctttaagacactggatgagaaaagaaagtagtactattggacatgggagctctgatggaaatgatcatacagtttgcaaagagcattcagtggatgttgcaaggtttgtgacatagatatattgttctacttgcacattgttccctacattttgtttttggtctatcattcactaataatgatttcaaaatgctacattggagacaattgtaagtcacacagaactgtcacttatttggacaccataacagatctccaaagaattttttgtaatatgttttgcaaaatctgatgaagaattcagacagctggcattgtgttagtcaaagtttttttttaaaaaaatgattgcatgatgttgcttcgtattcagacaaggattctagacttctttttttgccctaaatacctgtttggaagagggggattgctgattgcctgaaacttcgaggaatcaattcattattgatcccagtgtcccctaactaaaggtgtttagctttattttcctgttgccttttctctccatgttaaaagcatctgactgaaattattgaacatgtacatgcatagaaaaatgttacgagaaacttgctggaataaacattggcaaatataactctttttggttttttcctgactattaagatgtgatggcatattaaactagtaacacaaacttcttttttcaagcgcatgcatttccacattaattttcctgtttcatgctactgcgttgcaggttaagagttgaaaattctacgcttcttgaaggtgttggtactgttgagcgtctcacttcttcagtgcatagactgcatattgtgcttttgaaggtatgctatttgaactaacagatgcagcttcttatcatgggaagatttttttttgaaagcaatgcatgaatgatgcataatatttgctacattaaagcttagctacctcactgcacaatgggcctatctgcttcttatttttggaatggtgagtgtcgtgttggaatattctatccttctattaactgtggttaagacttaagaggtgttgactggaattgagaaattgcatttagctgagaacaatctaaactggttgtttccacatgctaggtgatttttaagatacactcactccacccaccttcacaccctcgcaccaccctcattgcactttatccctcattagtgaaacttggggtcaccatgcagtttagtagtttgctgtcaaatccagttggtatgtcgtaaagttccccaaagtgtctgctctgctttcaagtaccgaaaaaacagacggggtccttactcccaaatcttagaagagagaggtcattgttcctttctgcctcccctatgccagccaacactattttactgtcagctgaacttaggttgtgtttggtttgcggaatgtgactgcaaaattcactcctcacttttgtgtttggtttatggaatagaatgggttgatctcaatccaccatctcatctctcacaagctaacaattagtataagaatgaggatggaattattccatcgaaattcatgggatgaattatgaccccacctcatataggatggggtgttttctcaaaccaaacaccctcttaacctaccttgcttagagcccaattgttcctctacagagaccatttgctcacttttgaagtcattgtgcccaagcttcatgctgagcagtatttgtcatgatgtgcacactggctggcaaaaggaaatcgatcatgtctcactaaaccactgtaactgctgcgtcaccaaagctgcttcatcatctgtcattggcagtttggcactatctaggagagtgagacagccacatgtgttcacgtcaaactgaagggtacattggtcgagtgtactattgtatgcagagataaactgaagggtacattggtctagcgttctcaatgggtttctgtgattaattttcccctctagatgaaaggtgtgttaagctcagatgattgtattcagagataaactgatgcacaggaataatgcatgcatatatatctatatatatatatatatatagatatatatatatatatatatatatatatatatatatatatatagattattgagatagttgcaatatggagatgcaagttagctgcagatgatgtgcccaatattttagcaattactacttccattctcttttataaggcacagtttgatatgacacggtctcccaaattgcactttgaccatgtatttattttattttatattatttatacttataaacttatgataattagatagtagattttattacaaatctaatcatatcaagtttatgctataactgtagaagggaatagaatggagggaatccgaatcaccacacacccattgtgggtggggagcctttcatatatatagccaataggcatgcatggaagttacatacatgggaagctattccctgtacaaggaaacaaaaacaatcctaggctatacatggcagctagcctatctaggggattgccaatcaatctctaattgatcctgatatatacatatcctaataataacaatttaaaattgttagtcaaattattggtcaaagattttgaagtttgagttttcatatgcgtgtgcgccttatgaaagagaatggaggtagtatgatcaagctacacctacactcgtctgatgtgtgttgccatactgttactaaatattcttctgaaggcagtacagaaacttcgatctattttaaaatactctaagcactttacagggcagcatcacaccttcccatacatttatcgggtggcaacctcaatccatattttattcaaacaattaactttattaacttttggatggtatggcaccgaggcagccatttggcaggatttctgtgggggttgcatttctagcttattaagtaatttgtgatacataactaactttcatactaacaaacttatcaggcttatgatgatatcaagtcagctgattctttggagagtaccttcgaagcgctcaacagtcttataactgaagcaaacgttatgaagacagctcttaatgtggttcttccagtaagctggtctggggattcatcagatgcaattacatatgaagctctgtgcgaaccatctgattcacctaaatcaaagtctggtaaagtagacccgctctcttctgcaggcatggagatggtggagctactaatattggctgctgagattctcaaggagagctttctggtgaagaaataaggcctccatgtaagaacgagtctgtcagcatgcaatttaatccttgaagttaatttttgggtgtatatacttaaactgattgctaaaagttagctactagactattttgaatgtagagaaaaaggcaaatgtgtactgtaatttagggttcgctgctattgctgtgtcttgtgttggtagacttttttttttaaagcctttcaattaagttgggaaaaaaagtttttgtacaaggaaagaaggtcagaggcaatcaggtcactgaagcaaacacacagaggattgtgttggtagactaataaagggttaataaccaagtgtacaaaattcagtttacaagcaaagattaagtagatggatgtttgatattatggtatgcatccaaaatcttcgttgtacagacatcaatatgggtatcgtcatcatttgaaataacaaacataggtaggttgtgaattgggcgtaattcaatgggttggtttcttgtggaatttgcatactgtttagcctcaatcacaggcacgggtgattgtatttttctagatttattttaggattgaacgacaggtgatatgtctgttgatggagatgcctatgataattttatggccttgagatttcttagtttttcgacggtgtttatatagggatacgtgtatttgtgtactttatatagacaagtgtacatgtgtgtttatgagtgcttacgttttatagtgtaattaaaaaaatggagctgtttttttaagtcattttgatcgaggtaataatcacgtggttagacgaacatatcatgtgagcaactgccaccaagaaatccaatcatatacacgtcatggctgataaggtaccttctag

SEQ ID NO: 3938 - DNA, 3290 bp, Sorghum bicolor
aacgccggccggcgtcgaacacacagcgccctggggctggactgctacgtcgtccggatcacgtgcagctcgtgctcgtccggggcggcccaaaggagcagaccggcgctggctggctaggccgtgccatccttggctccttgcaagttgcaagccagcagctcaaagatgctatagccgtcagaccttcttgtacacgcagatctgatctttgccgctgtagcagtcaaacgccggcatacatggcagcactggaatattccttagccgcgccgggcttccttatggaactcgttgcaggaataaaattttttttctcttaagggcacatgaccttataatatggaccacgtaattcatattgagatcgtgcccaacagattatgttgtatcttttccgcttagacacgaatctcaatgcgaatcctatgatccatattgtgaggtcatgtgctcttaaaggcaaaatttactttaccctcgttgcagtcatagccatcgacgcccatggcctgccacctcccatgtctttgcacggcctaggtcttgacgtagcgtcacgagcaagtacggtgttatcttgtcatcgccattgaggccgacaccgttcacaaagaggtggtggctggtgggactacggcagcacacccacaccttcaaccgtcatcgccattgttctgcgcatggggaaaattggatggcgagcgaaccctcaccatctataccgaccaagatagctagaatagcggacttggaattttggaaattgaagtagcgataatgctggatgcactttttttcatctaaaatctcaaaactgaactgtatgcaacatgttttaccgagtctcttggagatgctgtaatttagatgtaaatttacagagttaattaattttttatatgagttacatgtgtaatttagatgcaaatttatgaggcccctttatgttctctttcatagtgctatctgtggaaaatttagatacaaatttttggggttgcattaatacatttcttctcgtgatgaaaaattttagaatttttaagaaaaataatatatcctgtagctatatatgattattgatgataatagtctgatggattaatgatcagatgctcctttttttagaattgtttaggatttatctctctttttagtaccctgtgtgttaaataggtttaacatgaataatattcccgaagaattgaaacatccaatagtaatagtaagatatttatattatgctataagataaaatggtattagttgatttgctatgaaacatagtatataaattttgtggcttgtacttcaactacatacaagaattattagcaatcagaccgagtcaccagaaagagcaatttatcatatatatatcccgcttcttgttcttggctgccaaaaaaggaggagcattgtggaagacgaagcgcattctgagtaaaaggatgaggatggccatccaaatggatatctatggtttttttagtataactaaataaactaaataaaaaaataagagaagaaattttctatttagtttatttagttgcactagaaaagaaccgtgggtatttatttagagcaccgtccatatccttaatttctttgtgctgtggaagtgtgtgagagaaactaacgcgcaatttcatcctatcgtgatgtgatataacaaagtccgtacgtgccaatagcatatgaaaaatgcatgcatggccaacatataagctcaatatgaagtaagtatatatccataatgcatgaatgcacgtgtggcaattgcaccctaaatccctattatattcactgtagtacggatgcatgcatcatatccatatcgattaagtccgccctcgtgctaatttgacccacccattcctcgatccatcatatatatcatataaaaacaccacttgccccctagcttggccagtcggcccagcattcatacatatatatacagacgcttcctatgtgattagctcatcgaactggctaaacctgcatcagaaacctaaccaccagcattagctttttcagtcaacaagagcgtcgccgtgatcgatcgatggccatcacccacgacgactacgtctccctttgcctcatggcgctcgcggccgcgggaggcggaggccaagctgcaggtttaacgacgcagtacgctctgacgaacacggctgcctgctggacggcgacggcgcaagagtccgagctccgcttccggtgctccgtctgtggcaaggccttcgcgtcgcaccaggcgctgggcgggcacaaggccagccaccggaaaccgacgcctgtactacaggcacaagcgtcgtcgtcgtcagccggaggtgcggcggcgtcgtcgtcggggataacgacctcggccggcggcagcagcgggcaggggaggcacaggtgcacggtgtgccatcggagcttcgcgacggggcaggcgctcggcgggcacaagaggtgccattactgggacgggctctcggtgtcgctcaccgcgtcgtctgcgccatcgggttccgggtcgaccgtgaagggatttgatctgaatttggtgccggcgccggcggcgacggcggccaacgcggcgacaaggtggagagaggaggaagaggtgcagagccccttgccggtcaagaagaggcggctgtccggtccgtccctggaccttagtttaacgatctagagttccgtttgatgaggcatgtgtagagtttttcctaccttcattcgttcttttagttggattttggtttggtgttttgcctggtgaataattaaacttgtgcttttaattccgttgctgcttcttcattttttatcatggtctgtgtttggggctgggtttcaaaaaaaaaaagtgagatatacctcatacctacctatctagctagctagacagagcagcttgtcctccacaaataaacctaacatttcaagacaaaacaaggatgaagaaaaataactgtgatacccctcaatcaatctaccaagattatagagttaatagaatcaactgttgtctttctaccgatgacacataaattgcacacactatttaaaatatttaaataccaagataacatttatgcaaaacatatatgcttgccaaaataaagcttcaaccaaattaattggcagaggaaaagggtggattatgctagaaatgtttacacaaatgtgcctagattatttaaatgctaaaagtgctcacaattcatgaataaggatattatcatctgtctacaagcttgaatttctactttcttgatcgagca

SEQ ID NO: 3939 - DNA, 2944 bp, Sorghum bicolor
catgtttcttatctcgaattttgcattccaacaaagccttatcaatatctagtaatgtgcgtcgtgatttgtgctacatgggtagctagcaccaagatgaatcatggatagctaagaagaatcaaggggcggatgaatatattaggtggaaactggaaaggaatgggcaactacgattagtgttgcaatgtgttcataagtaacatgtgctcctgcatttctcaaggtttttatttggcaacaaagggtttaatggactacaggttctaggcttctagctgactttgtaatgatgcttgttatatgagatagttaggtgagtttgcaagggaacaagagaggttgacgatttgattatattcaaaagaaattgtactgccacataaatgggttttagagacatctctatcaataaacgcctctcaaaatagtttcaaagatggcaatgtctctagaaaccgatctcggtaatgtgacgtacctctaaaaataagtatagcataaataaaactcattcaaatcaagtcagatgaagatgaactttatataaaattgtagagatcaaattaagtgatctattgacgactttcacatttgaaattatttatactccaagtttcaacctctgttattactgttggtatcaagacaaagaccaaaaaagttacatgtgctaaataagagtaactccaagagactccctaaattgtttgagattttggtgaaaaactaccagccaacagcttctctaaatggtaattcaaatatataaatattatattttagatttctcgctagccaaaaatagaagataagaatgactctatagaatgcgcatgatatatatttagaaaaattattggagagtgaaaagatttagaaagtgaatttcatgcaacgatttagaaagtgaaattgagaaaagctcttgaaaatactctaacggtagcaaattgtttaatggtggcagtgcactgcatgcagtttgtaatcccttctacgagtacttgatttgtctaagttccattccttctcgctttcccaatactgtattctgtcagcgagcttaattacatactacagaggtatcgtttcctgtttcatatatttgatttggttcatcatatctttggaactttaatttgtagtgcgttattacttagtatatcttgcaaggatttgtgtggggctggataggagtgggttaaaagtagataacaaaggatgactatatatatatatatatatatatatactcacttgtttctaaattatagttgttttattttttttctagatgcataaactaaattttacgctatgtctaaatacagatagcaaaattctatacctagaaaagctaaaatgacataatttggaaacagagggagtaagtataaccactagcagtacgacgcatcttcctgcatcttctactataattcacccaccagaattatgtttagtccaccaaaaaaattaccctcgctgagggtctcaactatttgtgtacccagaaaaacatacacaagactttgtctctattaaaatcaagggctaataaaccatccaaactcaatccgatggctgctgatcaaagtttgatgcaggcttcaaactcaccgcgccccttgtgcgcttccgccctcgcggcagaccaagttcgatacctgcttccgcaaaaaacgaaaaataaattgaaatattctctccacctggttgatccgcccgccgaccgcttgggcagggcagccacacgcaagccgtgacagcgacagtgacagggtccccagcagacagaggaaggcgaggtggacgtgttggtgccgtactatcggaaaggattggacagccggtgcgtgatgcggtaggagctcagctccgcccatggcgaccatgcacgggcgagcagacagaaagaggcgagagagctgaggccgacatgggtgggcgtgcgagcagggtaggcaagggtggtgccgctggcacctagggccgacatgggccctctaggcgtcaggaggccactcctatgtgtgcgcctttacatctgggcgtcacggttcggccaacacttttgcgcaggaccagtgtgtatgctgtgtgcgttaagggacgagctatggtgccatgggcccgtggtgctctccgcggtagtggtcgccgacgtacacgggtgcgcctgcgagatctcgcagaagccgttgtgattttcttggaggagctgttgtgcgtgctggtagagagctggggcagcggctcgggctggtgccctacgcccatgaggtgttcttgcaaatggtggcttgggttgcggtggcccagcaaggcggtttacaatgctttgatcgccgcatcaaggtggccaggcgcggtggacttcaaccaacctcaggttcaaggagatgcctgcggttgggtgccaggcgaactgcttcacatagaacacgctacatacaggactctggttcatggtgcatttcgttgtgcctaggaaaagaaagggcatgcagaggatgttgagtgagtgcattgacagtgattatactctctgcattcaagtggatatcatatcatacttttgttgtattgcctgtcgaagaatgacatgggccaaagaagcagttgagcttgtgcataacattagtaaagggggctgggggctatctacttgacaacagggcgttctgcattgtgatctcttacgctgtgaaattcctgcagtcaagtgatctatgtgagtttgtagatgatatcatcagaaaatctggtatttgatatgtgtagttcccctctgaatgatgaaaccacttaccttttggagaaagggaaggggaatgaaactggcatgagatgaattttatgctcagattattataagcatctgccctcttgataggctatgaaacgcatgcaatttctacttctaaatatcaaattttga

SEQ ID NO: 3940 - DNA, 8430 bp, Sorghum bicolor
atgaattaatctccacatcaaaactgtgccaccctatctccaatgtactctatcaaatgtaactgaggaacaagcttttgttgtcccaatgcaatcaagtaggtggggggagtgctgctcccctccgattaactctaaaaaaaaaagaattgaacgtagaatgatacccaaattttccttttcagtggcacataattttagctctaacaatagagcacactgcccacggtcagttttgaggctcatctcccatcatgatcattcatcgcataagataaaagtggctttgctcggttgtgattgctgcggccggcagtgggcagtatggctaccttcccttttccgcagccagtttgttcagttgaggaggttaaaattttttgggtactgtagcactttgtggtaattattgtgtaacaatgaactaaccagacttagaagatttattttataaattatagataaactatacaattaattattttttatctatatttaatattttatgtatgtgtcctaaaatttgatgtgattggaaatcttgaaaagtttagaggttttgaagtgaaaagacctgaatccttcgtgagcgtgctatgccgtacgtgtcctattagcatgcgaaagtcgaaaccgagttggtgcgctagttctgtgatgggtgtaaatgtgattgatggaagtggcaacaggtacaggtttgaatgcacaagatcttgattggttcacgttggaactcatccgggcacatactaccagcctgtcctctcgacggccaggctcgtaacatgcaatcgcagtttagggcctcgcacccaaaactttacaagaacccaaaaacttatcctgagcccgacgtgtcttctccaccttggcgcgtcgttccccaccttctcccacctcaatggcggccatggtggtcttcccgtggtggatccatagagcactagttttcctatggtggattcatagagcacaacgcagatccagcaacgtggtgatctcctccacctagcaggcgacgacagcccatccctcatcctatccatggagggcggctcgatctgcaccctgacggcgcctccaacccatgtccctctcctctttcctttatcttgcgtctgtagtagattttgctgtgttgcaacagtctatttgagatgtttcagttgttgttttttattgttacaataatatatttctttgtgtttcaacttcttcatcttaatattgcagtagtactgctttttttgagatgttgaagtatgtttcagttacttcaatctcatgttgtagtagttgtttcatgttgttgcaataatttgttcggtgttgttgcaataacatattcacaatgttttaatggtttaacttatttgttgcaacagtttatttggtgttgttacaataagatgttcatggtgtttcaactggtttaacttatttgttgtagcagttttgttcggtgttgttgatgtttgagtcgtttcatcctattgttgtagccgtaagcgggaaaaggggctaggggctatggcggcaagctaaggatagtcagaggtgttggggccgatgaggttgagagtggtggatcccgtacgctgggggacgggagcaggttccttgcatggggagccgaagcggttcctttcttctccgtgcaggggcaggtggagtcgtgttccatctctactttctttctttcttttttctcgatacgggtcgggtggatatacgatatgtaatacgcggtgttcggacgctagcgctcggattgaacgtccggacgctagcagttccgattgtataaggggaaaaagaaacaaggcctttccggcccagttatagcacccaggcctagcaggcccgattacagaaccaaaccagcggccgaccaagcacgctttcttcttcctctcttcgcggccgccgcgtctcaacttctcaacgctgcgccaaaaccctaacctaaaccccaaccccgccgcgcctctcctctcctcccctcctttcacgtactgcaactcgggacgagccgccgccagtctcgatggggaagaggagcggcagcaagaggaaggacaagaacaaggtcattctcccgccggagctgccgccggaaatcgacgacgatgaggtggatctcagcgacgaggacatcgcgttctatggtaccgacagcagcaacgtagctcacttccgccacttcgacaagaagtccatcgacaggttggtgtcgctgggctccggggcgctgcactgtgtctttccaattcctcacttccctcccatcggcgccgcatcgctcttgattgattgagcgtggaatttctctctttggttcgtgaaggtatgtcgggagggtcgcaggacgcgacgagggcgaggtcgagcgcctctacgaggagcgccagaagaggaaggccacagagtcctcggggagaccccgcgaggatgatgacgagttggaggtcgaccccgtcgacgcactccccaccaagacgctgcaaggggagctcgtctacaatagaggtaaaccgtttgcgactcactccagtagatacacaatgcccatgactaatcataaccatcaagtccgagtttccagtgacatgattattgtaacaacatttaatctgtgcaaaacagaaatgtcctgtaaattgcaatgcgcttgaagttaataaaaacatgttaccacttgcaaatggcatttttacacattggtgtctgaattttgaacaatgatgttttgtttttcttcaaatttgttctgtttgtggtgtactggtgtgaaactgtgaatgctcacataactttgtaacatgtatgccacatgcagcaaagaaagcaaggtctgaagacaataccggcagtgttaagactaaagctcaagagaatggtgcagatgccaagaaaattattaagaaagatgaaccaaagggaaaatctaaaaacaaaaagggagatgataataaagtgaaaaatattcaatctcaaactgaagttccaaagggacaactacactcaaatgtcctggtactacttctgttccttttttttaaaaaaaaaatgcatcagtcaacattccatttttgaattctcctttctagttgctcacttgctctagttcattttagtgctcacggtgatatatatccgatcataaaagtgtcatgcagcatgactgtaaatgaatttgctatgtttggtagtaaatatgtaagtatattaagcatatttaacctcaagtaagatatcgaaagtggtttgtatatatcccagtttcaaggtttgagaactcacttgatgttgacataaaaatcatttgtaaaaaaatggtaacataaaaatactaggctgaataaagcacaagttttttgagccaaattaactatcttgctgtgtttatcaaagattgggtcagtctaacatacgacataagtgttgggctgggagtgttatactgatttaccataatttatacattttctgataaaaaaaatcccctcacattcctttttactatgcatgacccatgacaggaggaagtgaaggaggaactttcagctgaggaattattcgaaaaaaagaaggctcaacttgctgagttggggatggctatgcttgaagatcctgagtcaaacattagatctctgaatgatatgctaagtataagcaatgacaaagaccaaaaggttgttaaacttggtctgatgtccttgcttgctgtgtttaaggacattattccaaggtacgttgcaattaatttttattatatacctttcctggtttctttccccaagttacctacacatgttttttatgcacactgcagttatcggattaggcagctgacagaaaaggagctagcagtagaagtttcaaaagaagtgaagaagacaagatattatgagtacacacttattcgctgctacaaggtcatactctgggtctccttcatgcatagtgaagtttgcctggccatgaactatgctaaatagatattattttcctactgatttgagctgttcatcttcgatattgttgtatggataacttcccaaattctgatggctgaagttggttttcttttatgaattttcaggcatacctacagaaactggtatcgttggagaagcagccccagttttatactgtggctgttcgttgcatgtgtgctttattagatactgccccacattttaacttccgtgaaaacctattggctagtgtggtaaaaaatttaagctcctcagacgatgtagcaaggtaaaaaatcttttgtgtgttaagtccttggctagtctgaaattgcttaaaataatgtagctgattactttataaaaaaaaatattgctgtgtcaaaccaccatccttacgtttttgattgattagatataccatggagctaggtagcagaataactttataattcatcttacagtggtctaaattgtttgagtttccttctttttccttgaactgaaaaggataggtggtacaaaacatttatttgagcaaatataccatacccaatagcactaattgtggtatttgttgttactccttgacagcattctcttagtaattaataaaacaaggagtatttcatgtgataatttacgctatttttactttggcacagttttgtagtccattgggtcactgaagtagtccacatgtgcctaattttcctttgtaggaaaatgtgttgtgaagcaataagatcattatttataaatgaaggaaaacatcgtggtgaggcaacaatagaagcagttaggttgattgcagatcatgtgaagctcaatgattgccagctccatcctgatagcattgatgtatggtgattatcgcctgtcttatttgtcatattatgtatttaatgttcattttgtacctttttcatgcagttttatgtttaaaagaaactgagcatggatcaatattctatcgttgctgactatgtactgggatgtttatcttaggtcttcctgtctttgagatttgatgaagatattggaaaagatgagactgaggaggaaaaggtgaaaccaaagaagaataaacgttggcaaaaaagtcaggaggttccgaagcaattgccagttaatgataagaagaaaaccagacaggaattgatctcaaaagctagagaggaggtaacatcagataagagtataagaaattatttattggaaggctctgtgaattcgtgtaatcatttccattgtatttttttcaggttgatgcagatcttagagcagtttccttcagtcttgatccgaaagagagaaaaaggatacaaaaagaaacactttctgctctgtttgaaacttattttcgcattctgaaacatagtgtgaccacttcaaattcaaggtctgtgtttgatttctttaactgtatcataacaaataatcccttctttgtggaattatatgatctgccttttgttttggatttgacatgttgatttaatagtatgaaatttcacttcattttggaatgaagttacaatctgacagtcattgtatcgttaaaaattccaggaccaaggtgaataatgtctcccctagtggcttgcacccactgctcactccatgcttggcgggcttaggaaaattttcacatttaattgatgtagatttcatgggtgaacttatatcttgcctcaagaagctttctgggtatagcgaccgacaagatgaaattcccaatgataatgcactgtctgtctcagaacgtctgcagtgctgcatagttgcgtttaaagtctggaggagcaaccttgaggcattgaatgtggatctacaggatttcttcgtgcagctttataacctcatactggagtatcggcctgacaggttttgactccttgctcttgatgatagtcacaacgaacaactctctgcctttttttttaatctatagttaccatttgttgaacaatccaaggtaacctgctactatattattcttttcaaacaaaggtactcttggcagatagcaaagttttatcactaaccatcattaatgcttttaatcttgttgagatccttggttaattattgcttcaatgctatggacatgctgacaatgcctatgatgcacttatacatttttttttattttcttcccagaaaaattattgtaattgaagaatgatagtattatgtccatgcctatttctgttttttttttcaataatgtagagacaatgctatacactaaatatttacatggtgatagttgtcgtctttactttttttcgtctattttggataattttagggctcatttttcttgaattagcctatgtagttattaagctgtcttgttccattgaaatacttctttcttttacatccagggatcacggcgaggtattggctgatgctctgaagacacttctttgggaaggcaaacagcaggatatgctaagagctgctgctttcattaaacgtttggccacgtttgccctctcatttggctctgcagaagcgatagcaggtttgttctgcagttctcaacttctcgtttttgtttgtcacatcctttttgagctgatgcctgcggaacttctataatatcccaagatgattaaatagtaataaggatgcaatgattgcactgagcacttgtctctatttagaagtattggttatacaataagtattagtatttgtattaaacctgcttgaatacatttcattactgactgctccctctgtcaatacagcgtattttcatttgactaagtcaacccacttcgtgtttgactaaaactatagggaacatgttaaattctaccacatcaaaatgttaagttataaaaatacattccataatgtttctaatggatcttatatgatgtataaagatatattcttttctataaatttggtcaaacttaagatgggttgacttaggacaaatgaaaatacactatatttcaggatggaagaagtaatgttatgggtattagttatcaagcataatctttcctcttttgtttaatgtcataattgtgtttggtgattatttcagcattggtcacactgaagcatctcctccaaaaaaatagcaagtgtcgcaatatgctggaaaatgattctggtggcggttctctgtcttgcttagttgcggtatacgtattctcatgttcttttttctataatttgatattgacattttgtatttatttgatcatgttattcctcttcttttatccagaaatacaaccccgaagctacagatccatatctgagtggtgcactcgcttcagtcctttgggagctcagcctcttagagaagcattatgatatctctgtatcctcaatggcttcgaatatcttgagtatggcaaatttgaatcccacgcagaaccccgttccaatcttgaatgtgaaccctcttgaagcatacagagacctgtcaatggaaagggaactattaaaaccagctagcaaatcattgccactaaatctcaaaaagaaacgacgtggcaaggagtttgttgcgctaagcccagatgtacttaagaaggcagattgctcagtggataaacatgagctcgaagagaagttgcagagccatttcgctgtgctaagaagcatctcggagaatgagaggttgaggggcgagctgaaccacacattgtcatccataaacatgtacaaggagtacaagaagcagcagaaaaagaaaaacatgaaatttaagaccgggaggaaaaaggtagcaaaggtttagggctttagccgtcttatgttccggggatctttgcgctccactggtgaatgggtgtaattatcccaaaattttggcttatttctcatggctactatagcacagttttctgctaccctttttgccgtttctgcacacgatacatattgaaagatttgtgtccattcgtgataattagaaatagttcaggccctatttggggagctgtagttttttcaaaagcatctgaaaaaactttaatggcaaactgaaaaaagctgcactgcagtttaccgtcaaagattcttctctggctcacaagccctccaaacaggtccgcacggtgcaacagtttttcgggctttcgagttaggcctttgtttagttcacccaaaatctaattttttttaagattttctctcacatcaaatcttgcttaaatatatcttttgagtttagttagtctgtaattggacaataattatcaaataaaaacgaaagtgctacagtacctaaaaaattttggaaaaccgaacaggcctcagacggaaccagagcaaatatatagggggggcgagtatagaagatatgcatgaagattacacttggcttaagctccatcacttaaaaataactaactttgcattgcatgtactcttaaagaaagtttcaggagttagggggggccatgccccc

SEQ ID NO: 3941 - DNA, 3947 bp, Sorghum bicolor
atgtgggtgcatatacgttgcttcactggttggtgcttgaagtgcaagggattccatctattttgaaggtaatccaaattaactgcaaattcctgcgggtgtgagtacgggtgttacccattaacaatttggcaagggcaggtatttactccacccgcaccctactcaacccgctaccatccctaactagatgatttctagctcttgcttgcccttaatcactagaatgtaggcttggcttgggcgtacgtggggtagtttcatggtaaagataatcaatttgtcaaaatatccaatagatattttggtgttttagtgattgatgatctactgtaacttggtggcagatggattgttagatgattattagaatctcatgtccccgaattgttaaaagttgcttgcttggtcgagcttgtggtgttgtcgttcaccttttcagttaagagagtgtataggcagttgaagggacatggagacatacacccagcacataaattgttatggaaatcctcttgtcagagcaaacacaaggtgttttttctgggtgttgatcaaagacaggctaagcacaagggaactcatgagaagaaagcgtatggtgcttcaggattacaactgcgtcttatgcacaagatcagtggatgaatcctcccttgcatctttttttggaatgtccctttgctgctcaatgttggggctggctcagtcctcagatcgaccatgagttagatccttttcaaatcatacattccctaagatcccaactgcgtttacctttctcaatggagatcgttgttataatgtgttggacgatatggaaggccagaaatgattggatttttcgtcaaatacctccaaacctgcagtaatcaaaggatagtttcaggggtgaaatgggttgcctctctctgagagtcaagagaaggttccaaacagttttagagcaatggataagcaatctctcctagcttggttctgctcgatgttgagctgtattttctttcttaactttttttatcctagatgacttttttagctagtttaccttcttttcttttctttatctgtaaacctcgctttcattaaataaattttcctatagggatgcaaacccctccagtttcactcaaaaaaatataatatcatcaagaacaagagaaagagccaatatcccattgaaatacccttttatgggtggtttgtgaataaacattgtttttttgtgcttattttaacaatccacaatacaaaaacataaaacgagttcaagaattgatgattttggataactagatacaaaaactctagaagaagaatatcaaacccaggaggaagaatattggaccaagagcaagattatagtatagatagatgacgagtgtgtaagcccccttttttctagagaaacgagtgtatactatgtacaccaaagtgatggaacaaactcataaatgggccgagatgtcaaagcccatgcatccttcaacctaaggatggcccttaacgagaagttctatctcacaagccaactaaacaaaagcagagtgtctgcccgtctccagtgcagcctcccctacgatcgaccgacgtccttcgctgcttgacggtaagaagactgttgatgcgttattcaatctcacatctggatcggatcttgatggcaagccatgaatgctctcttaacattcgtctcaacgcggcatgttatatatcctttacttgtacggcatgttatatgtctcatgcgtcgtagtcgtgggcaagaaatttgggtcactttccggtttcttttagtagttactgatcttttaaatttcctacatactccgtatatgattacacgatacaacatattctaattacacggtacgtacaacttattttcaaaacagcctacttgctttatacatgtgcaatgatggtcgacctcgttgtggtgttgaatttggtcacttactcttaggtatttttcttctccacacctgatacaacgcaagatggcggtagttttgtcaaatgtcaactccaaggccggcctccaaaagcttaatgaccaccttctcacccgcagttacatgactgcgtatgtgatttataacgcgtgttgatcaatcgttgctggatttgtcatatttgcctcaattgggctttgggcttgcattctattatatctcacgtgatttaggtaccaagcttcaaaggatgacatggctgtcttccctgcactttcatcttctcccccatcaagctatgtcaatgttacgaggtggtatgatcatatcagtgctctcctaaggtcctggtgtgtacttgagctaccgttgatatccagacctgcagtttcatttcttctatcatgtgcctaagggtacacttatttgataatgcagtggaatcacagcagagggtaatggtgtcagggttgaggcaacttgttctgtgtcttcagctcctggagttgctgaacaaaaggttacagagcggctatatagctattgttttggtggtcaaattaactgtttgttttcaggctctatactgaattgacagacaattttgtgatacgtacggacaatgagcaatttcatatggttactatgtaacaatttatttccatctcccctgtctgaggcaggctgtaatttcaggcaccggcggttgatgaagatgatgatgttgacctatttggtaaggagaccgaagaagagcatgcagcaacggatgcacgtgcagcagctgttaaggcttccggcaagaagaaagagtgtatgtctgtccttatttatcgggttccttacattgaaaagaactagaataaggaagcctgtggccttgtgatctctaactataattagtatctctaaaacttcatgcagttgggtgcaaaaatcagctaaccttttagccaaatttgcaccctcatatcatttaatgaatgcttttattgcattcagttgcatatacgctcatttagccattaagcaaattgttgaagttaggttatatgatctgagaaattttattgctaactgtgaccttctcttattttagctgggaagtcgtcaattcttctggatgtcaagccatgggacgatgaaactgaaatgcaaaagctagaggaagctgttagaagtgtgaagatggagggactgctctggggtgcatgtatgccactcttttcttccataatattctacttctcaaataagtgctaacaaaacttctcatgtcttgttaaatttggtttctttcttttctaaacttgagatcccatcttttgcagcaaaacttgttccagttggatatggcatcaagaagatgcaaattatgatgaccattgtggatgaccttgtttctgtcgacagtctgatagaggatcatctctgcactgaacctgccaatgagtacatccaaagctgtgacattgtagccttcaacaaaatctgtaagttgtcttggacattgtttgtgtctagaatgaggcaccctgtttaattacttattttatccttttatggcagtcattattattattcagatacagaccagtagttgactagtcattattattattcagatacaggccagtagtttcctgacaatttatatggctgtgaactgaataagctcacacaaccaatagtttaggagcatatttgtcctagctttagattcagtttgggcttgtttgtctgttctctcaaatttgaacccctctccacttagccaataacacatttgccagaggcttctttgtacgttagcttctgtttccaagggccaggagccccatatctttgggttgaatctttgttttctctgctctggtttgaatgggccttaaacattcagtgacagttccacataatctcccacatgtctttctaagctttaagaagtccataagtcgaagctgattcaagcagcattaatgccattggtat

SEQ ID NO: 3942 - DNA, 8938 bp, Sorghum bicolor
cggaatggctattccgtgatggcaggattgctatcctgtggtaataattggggttgatccctggattactataataattaggatagtcttttaaaagatgctaattactacttacactaattaagggttgggtttatgctactcatatttagtaataggttgctctagtaattgttataattaaaagtgatcaactaaaatgctaccgcagtcaaaccaagtcagctttaccttgttttaagccttgcatgtcattactttccgtctgtgcttgctgagttcgacatgagctcacccttgctataatcattaaaggttgctcggacgatcaggagtacaattgtgatttccctgaggactaccctgagtctcccggttgttaggctcgtgtggttctaccgtcgaccttcctgtggcaaggtggtcctgctacgtcggcgtttagttttccctttatttatggaacagtttagtttatgtttcccctccgcactttgataaacatttggcttgtaataatggtacttttactctcatttatgtaattcgtttgaacactgtgttttgtaccattgatgatgtcggtccatgtgtgtgaatttgagatcctggcgcacatgtgatttggcacccgaatgctcttttacatccgggtgtgacatcaggccaagatattgaacctcatgcctgcaaccacagctatcatcgttgtctttgctagggcttgtttgacacagctcaacttcactagtaaagctgtttttttagaaaatagcttcatgagtgactttctagatgaagctgagctgttttggaaaaagtgtttagcaaaatagcttcactaactacttcatgcatggttgagagagagaaatgaggtagaagctgcaataagctacttttttccagcttcatccaacttatgtctttgtgagaggaagagaaaaacagcttcacccatgaagctatttcgaaaataagtgtttggcaaaaaaaaacagctcacaacagctcatgaagctgttgtgagctgtaacaaacacacatcgatcgctggcctgcacgctagcagcgggacaactgtgtcagtcgccaccccctctgaccaggctttgcacaaaatcggtcctcactttgccgtggacgtaacaccgcacacgctgaggttgtcactgaccaccctcagtgggacgggtacccgccgcaatcactaccgacctttgctaccagccgccatggcgccccaccaccacaggcacctctccttgtactagggcaccaaatccgactgctagggcatagatgcccaacgcccttggttgacacctttgccatggatgacagtgccggcatcgtccccagcttgggcacgctggatccgcccgcccatgcccaccatcgcccacaccaccgtcctcacatagccatccgcgccgccatcacgcacgccgccgctcgcggcattgagccttcgagtctataagaacttatgtaacttttggcgatatatatcttaagtggatatagagactggaatttatatccttttatctaaaaatgttttcataactactatatcatccgtgtttatcaaaaaatatctatggaaaataccccatccaatatcctgtttatttttgggacctctaataaattttaccattcatcggtgtctctctcaaatctcaagtatcatatgctcttcaatcctattaatttaataatattttatctcataatatatcagcgaatagtagtcctgcaccccagacttctgcgccggccgctgcttccctggcccagggtcacttctaagcgatgccagcccatgaacgctggtgggcctacccaagtacccagcctttcctccacagcctacccgggaacgaagaagcccacgcctaacggccgtgccaccgccctcacagttccaggcttccagttccagctcacccctgcttcctcgggcggcggcgccgccgccgtttggcgcacgcgcgatgccggcgacggcggaggactccccggcgatacggaagctggggcagctcttccggctgaccgaagtatacctctggtaagtctcctgtctcccctacccgcttctcagcgtagggtttgccatttcgcgaggagtgtcccgtctcctcaaactgcgctctctccctgcagggacgattcgtatggcgctggacctcacgatggacggaagaactggcgctcggcggaggctgctctcgtggtacggtatttgatccgctctggtgtagctctctcagttgcagggcgcttgtgcttcccctagtgtctggctaatttcgtcgggctagttgtagtttctttgtaaccgtatgcatattgagcttgagcaagaaggccccacgcataatatcaggcttacccaaagagtctagttaacacaaggaattagttttgtggtgtggtttgtgcattgtgcctaaacagtaacctgtacaaaatgttaatggtctcatgcactttaaacgaagggaggtaggtttgagcctggtcaggttagagaaccatactaaacatttcgagtgactgttcttcgagtatcattttcttgaaagcacattgttgagatggaagcttgctacataacacttccgatgatctttttggaaaattaagttgtcttaaacaattgtggcttcagtgatgatgggtgaactaagcatcaatccgctgcagttctcttcttcattctgatatggcagttatttgttgatcaaactgatgatggtttgctttacacttcgatctcctttgagaggaaaacatatgaaggtgtggactagatcatgtatagaccaaacactttttaaataatttaatgatttcagaatcatttttactcttctgaggaattcattttgttgtgaagaaataaagaatcaataaacttggctgtttagagactagagagactatgtcaagtttgttacttctatgctgtgtcctacaaattcctatgaggtattgaggtttataatgtatatagcaatttgacaaccttcaacttttcaggactctcatacagataaaacatgcaatgaagcatccaatggcactgacaaaggttagatgcattttccttgtattctagtaccttcttcggtcaattttctatagagaggatgttacactgtgccctactttcttgtggaaacaacccattggagaaaaaaaatcatttcatttgaaaaatcttaagaatctgaatcttggcatgcttccacaccaccagttttcaggccactgtcacttcgttggattaaatgacgcttcttttcaaggggtgtcctgtttataattgaatcaagagattttattggtcacctgttttctgttgcctgacgtgggacctggatagacttcagttcaggtctgccttagttgataagttcactggctctagtgaaagaagtagatgtactcttatgaacaggcaaccactcagcatctaatagagaaggaccaaaaatctttaactaaaaccacaatatacatttggtactattacaggggctgacccctccctgtctagtgattgtgagatcataggagatggggcgtggtggctaagattgtggatcatattcaccaggctcccattgtcaatgtgatctagggacgtggtatgctacttgtgaaagggtccgaaaaggccaaaatgacattgtttctgcattcctggaatggggatgacacccccaggacaaggaacgtggcacagttccacgttcctggtgacatgttgtggatcaaatgggaggccacatcaccactggattactgtaggaagggaaagctggtgttgacaatttaagtcattgttgcaacatctgttcatggcttcatgcctcattttatgtcatattgcccacacataacgttgtaaaagtaaaatcagtagcagttatttttccttttcccttatgtttcaaccgatttcttactgtgtatatgaactgtctaccaataggccatttgtttgttgaagatttggaattggccaacctcatgggttctttggggcttcctgtttcattcagcacaagtaaagtggtcagtgctcacataatgcgacgccatgttactgttcccctactggttccattgcttaattcctttatgcattgcagaacaagaacacaggcaacaagggaaagaaaaaaggaagacaagcactgctcaaagcagcaaagactcaaatcaatgatgctgtgaggatatgtgccaatactgaagatagagaaagtgctgttgaatcattggatgttatggcgcacatgcactcatgcaatttatctgggactccgctgggtcacaatgaaccctgccatgatgacactgacaagatgcttagggaagacagtccttgtgttgaagaacaagaagagtctggctgtagcaccatctattcttctgacaaagcccctagctgtgatgctaaaaatctgctcactgaacttgggacttttgagctttctgataacttgggcaacccagcaaaagaagattattcaattcaagaaaatcaagcctctgacagcgtgttgctagattctgaagagatgccaaggcatgactgtgttgatggtgaatctacacattcatgtgtcgacatttatcaggaagaaagagtgtccacaagggaagatcaaacatctgaagaaactctgtcagtatcccatgatcataatgatgttggccaagaagctagtctaagtttggcagagccatcttctattgatgagcatgcacaaagttctgccaacaacttttactatgactatggtgaatggagggttgtctgggatccgttctatagtcggtattatttttacaacatccagacacaagagtccacatggtgtcctcctgaaggattggaggattttgcatcatattgtagcccagataccactaaagagctagttgaactgggatctcagtgtacaagcatagcaccgcaagagaacagtaagaaccttagaatttttggattatcactttgagtcttgttctttgcagttaaccttacgaatagctatatgcactgtgatataactttctacaatatgtaacacttgagcatgtagcaatggattgtaaacatttaataataaggtagtgaaatccattacacactgtattgagttttgcactacaaatgctgaaggagaaagacatatcttattacatacctgcggtatggggctatttggttgtgccccacacagctttgcctggcgccgcccttgctcccgtgcatccaatttggggtgcctggcacccacgctgcctccaaggccgtgatccaaacaggccatatatattttgggaatttggtgtgctcagaatcacagtaaccataattgtcaatgcctttattgtgtattgccattgatttcctgcctgtaggtgcaaacaaatatatagacctgaacgtgaatgtacttcttgggatcattttgtagggtttttgtcatttacctctgtctccaatttactcatatgctagcttcttgtttgggactaaaggctttgttgttgttggtttagtatgtcacacatttctttaatctcatcatcacagatctggctactgatgacaatcatttagaagcacaggaacaagatcactgcattcatgatttatctgacattcctgtcgaaaaagcaatatatcaaaggtagggaagatcaaactatacaatgtttaccaagttattgtttttttttttttcctttttttggttaattctgttcatctatgcagtatgataactacctctgacaaagcacagcacactgaaaataagtacagcgattcaacaactattgtgttagagatgaaccaggaagttactaccaccaaaaagaaaaagagagtaaggagatctcaatcgtgtaagacgataatatatggcatctgctttctaggagtttgttcctgtttcaattttaggttgcacttttacataatagtttcttggtttctttgagcaaatgcaactttgcatggctgctacgtattgcctacttatgtctaggtaacttttttttttgtgaggtcttctagaaaactaccttgttagctatgtcttagtgagacttgcctaatatttattttcttgtgttctgttcttgtgctctttctacatatttggcaacaactattttaattgttctacagatcattcatgccaagacatggcagggaacatctccaatgacatcatcaagtactggactcagcggtactcacttttctcactttttgatagaggtataaagatggatgaagaagggtggttttcagttacgccagagcctattgcaaagcatcatgcatctcgtgttggtgcgggagtaatcattgattgtttcacaggagttggtggaaatgccatccagtttgccacaaagtacgttgctgttctcttgtatatcatttgcttgaacgcttcctattgcatagcaactgttattttgcttatgttacaagaatgcagtggctatatcaccttaagcagtatgctatgtccactgtccagtttaactaaggcatctgcttcgagtaatatggcaaggctcttcctagttttgctgtttttaatatatggaggtgtccttttaggagaaggaatagactattacttaatatggaggtgttattatggacatatttgagcatgctcatcacgtcacttgagttagtagagctagccttagttgtttgcagtgtagctaaaggtggatttattttatgttatcaatgtttcttctacagtactaaaactttattgttcggttgttccacattaactatgccaattccttttccaggtgcaagcatgtaattgcagttgatattgatccacaaaagattgattgtgcacatcataatgcatccatttatggagtaaatgatcacatagatttcattgtaggtgattttatacatatagctcctcatctgaaggtaattcttttttcttggaattatttcttttaagtttgtcaacatttcgcttctatcagctacatgtctttgtagctgtttgagagagtgaatttttattgttgaccttggtttaatttgctcacccattttaggataggggcttggtactacaaatatcttgatacatcaagtcctacaaaaagaaatttacgttataagttaatcatatttttccatttgaacatcgagattttatatggtcccatggagttctgcctatttttctacgatgcccatcttttggtagtaccttctttgtgtacataatgaatgggaaggaggttgaggaaggtctcctggtgtcatttatttgtggggctaattggttatgcttacttaagcaaactattttctgtagggagaaactgctttcatgtcgcctccttggggtggacctgactatgccaaagttgatgtttatgatatgaaaagcatgcttttgccttgtgatgggttagttccttgtttctagtttcaatagagtaatttctttcagtttgcattgtgctcactgatgcttacttttttttttgttgatcgacttactcattgttgaactctttaggtactctcttttcaaacttggtactatgatagcttcaagagtagtgatgtttcttcctcgcaacattgatctaaaccaattggctgacatgtccttgtctgtggaccccccatggtcggttgaggtaagcccatctttgctgattttgtgccaagctgacttttcttatagatgtcacaatggtctctctctacaggtcgagaagaacttcctcaacggaaagctgaaagccataacagcatactttgaagaacaggattgttgagtcgcgcatcggcactggtgatacaaatcatcttgtgaacttaggactcacgaccaattttggagggaccttgagtataggacttaggacatgtccctctccaatggatacaatgaaggggtcttggatgttttcaccaaaggacatgccccttcgcctttggtgaagacagtatttgctaattgatcaataactgttgtctaattctaacaatttgccctgagcccatgatgaaacagaaatttgttggcagaggcgagtcaagagaatgcctaaccttcattggtatcatacaaaagtagctcagcttatctcaattctcagcaagtgaaactgtgaaacgaaagctacaggcagacagtcgaaagcgtgggagttagtttaattttgccctatgataaacaagcaaagcttcctggtttggatgtgattgtaattgtgaaatatctggtcctgcgggtacgtgagcggtgcaaatgtatgtatgtgtcgtccatgtaaatgtaataattggggagagaaacgagacggcatcatggttccaacttgaaaagtttctgtacggattttctgccttgtttggatgttattggattcaccttaatctacatgtgttagggtggattgaggtagacatgtggattgatgctaatttgacatccaaacaaggtctaactctaagaacatatccctgtaataattatactaacatatttgaagacagtgtggtacttgttagacatctctaggtgaatgcaaaaaaaaaaaacacttcaaaatagccaaactgtgaaaatatatggaaaacatactatatgtatctatctatcgttaacgttgatttgtataaagaagggtgtttcgattcccatacaaatgcttgtatgatgtacataatctcttgcatttgatagggatctaactcatagaaatgtaatctagattctctcaagaaacattttcgatgaaaacattttaatgataaatcagaataacttcgctaggaggctagattccaattcaataaaaaatatttttgcataaagaaatt

SEQ ID NO: 3943 - DNA, 4696 bp, Sorghum bicolor
agatttgatgtgatggggaatgtgaaaaattttgcaaaattttctgggaagtaaacaaggcctatattgctgaggccttgtttagatacacccaaaaatccaaaactttacaagattccccgtcacatcaaatcttgcggcacatgcatgaagtattaaatatagataaaaagaataactaattgtacagtttacctgtaaatcacgagacgaatcttttaagcctagttactccataattagacaatgtttgtcaaataaaaacgaaaatgctacagtgtcaaaattccaaaactttttgcatctaaacaagccctgagagtggcaaattttatgtcgtctgtgctcaaaattgctgacatcctctgtcgttgctagtgatgttgctcaaagtgtcaactgtgcaggttcaggcatagttggatttggatgcattgttgttatcttggttttgcatggcatgattgaaaaaaaaaccaaacagtcttactgtgcatgtttttttttggtaaaaaaaagtctgttgggacattcgcgtgcacagctcttctgctgtagtggttcgtagcaacttgggattgtttgactcggagatttcgggcgggagtgagtagacgcttatgttcggagtacatgttcatcgcagacctgtagttgttgcatggaaaaaactaaattctcaactttcaaactagacatttttaccctgaacattcaaaacaccttcttgtcctggtttggaatggttttgaagatggttttatcttcttccagttaaaaaaagatgggtaaatacttgataaagtttttaaacaacataaaatatttttgtgtttctaaagttctaaaaaaattctagagatagatggagatacaacaaatttaaatcgcatatttagagcccataaaaatatctctagatgctttggaagagtagatttagctctaagaaaatagaaacatattcataaaaatctagaaagttctcaaatcattctaatgggtatgccaacatgttttgactttttttgcaacaaaatattaatagaaccaacactaattttgttgcattcatgccttttgcatctcatattatttacatgtaagcaaaattaaaacatagttatacatcaattagaaattagaatattatgggaatttctttgttttttctggatattttcccattttctagagataaacatattttctaaattttctaaagttgctttcataggctctaaagtttcaattgaatttgtagtgtcccaatatatttatagaattttttttgaaattttaaaatcttagagacattttttgtgttttagaaaaaaatcttatcaagtatttagcgaatttttctttttgactaaggccttgtttagatacacctaaaaacccaaaactttacaagattccccgtcacatcgaatcttgcggcacatacatgaagtattaaatatagataaaaagaataactaattgcacagtttacctgtaaatcacgagacgaatcttttaagcatagttactccataattagacaatgtttgtcaaataaaaacgaaaatgctacagtgtcaaaatccaaaaactttttgcatctaaacaaggcctaaaaagataaaaccacctttaaaaccactccaagtcaagatagtgaggtcattttaatgattttgagagtttagatgataagatatttaattttgaagcttttaaggaataaaatcagaatacttaggtttagatagaatggacatttttcgtgcatgcatgccgctgcctccatgcgcccatgggccatgttcctgccagatatgacaggcttcaacaaagcctgctccttgctggtgggtcccagggaccgatgggctggtcctatgtaagaagggtagggcaaagacacccgctcggcccatttacggaccaaaaagcccagtgaccagtgccgcgtgcgtccgccgctataaagcgctagggttttcccacgccgccactacccccaacccgaccacgccgcgcctccgcctcgaaccctagccgctcggagcaaggaaggaatggtacgtgcgcgccgccgccgccgccgccgattctccgtccgcctccgtccgcccgcccgctaacgtgcagttgttttggctcgcaggggaagggtacgggcagcttcggcaagcgccggaacaagacgcacacgctctgcatccgctgcggccgccgtagcttccacctccagaagagcacctgctcctcctgcggctaccccgccgctcgcatccgcaagtgtaagatccgcctccccgcttcctctctctcttcgtccgaattccccgctgctagatctagccagttttagtgttaccctgtgctgttttgccctgtttgtaatatgttgctccgtggaatatatctagatggctgaacagtgtgatatggtatgttttgttatgaacttaaaactggatgggcttttgaacgttgtcacatatgtagtaggtttcgtgcttttagttttgtatgcatatctgtttatcattatgctaccggcttatgtgcttcctgctttatgtgctgctgaatttgttcctgcgggaaatgatgaagaaaacattggtccgtgtttctgaatatacttgactgacagcaatgttttacaagcttgatcccagtgtgctaattgctgaatttgcggtactttagaacagttgattcgtatgaaccatattatattgtgctactgttcacgccttgtgtgtttgggcattgccctcatctagaaacctcattgtatgcactcttctgtaatatgttgaaccctgagtttgtttactacctactgaatggaagctatgatgaaccatgaaaattctattcgcatgtcagacttcagagatgccttggcattaatgagaagatgtttcatgttctgagcagcgagcatctgtctactaatttccgttttttatgggttatactggttgcttgtatttcaacacaaatattttggcttacctcctttgttggagtttttcgtcacattttcttgcgtgagtttgcaccacatttaagcacttctgttgcctgcttccactgtcgactcgtgattggagttattcacctatgattcctaagtttaagtctgatgattctgtcttaatatccttgtactctgtattatgaacagcattatactaaacaaaaaaatgattgtcactgttctctttgaaaaaattcaagcatttagtaattgagcctcatagcactctttttcttgccaagttttttttcttgcctgtttccctggtcagatgatgagtatttaactgcaacaatatgatgggactattctcctgtgattccttcgttttaagtctctgatgacccaccacatttttttttgattttctttgcattctgtctctctgtcttgtgattttgccttctcagtgccttgcatatttctgcttcatttgtttgtctcatgggtttaggttttcaatggtagtttggtttctaagcaattgaactgcattgactggaaatcctgtaaattgtagaccgagttttaggatcgtaagctgtgttcgattcaacttcctatgccttgcttctaacctgacttaactcaatgttaacatagtggtccatgatttcagataactggagtattaaggccatcaggcgcaagacaactggtactggaaggatgaggtacatgcgacacgtgcctcgccgtttcaagagcaacttcagagaaggtacctttcttttgttgctaatgatccttacattttgactggggaattctcatctttatttgtcaaacctgattggcttaatttgattggttttgttaacctcaatccagggactgaggctgccccaaagaagagtgctgctgctgccaactaagtctggattttgccatcaagaacctgaaaagcattgtacttctgaactatttagccctaatgctatggaagtatggtttatagtgctttgaattaaagtcagacgcccctggtggtttgtatctttttttggtgatgagtatggtttatttgttatcccagttcgatgctcattcaattgtctttgtctacgtttaccgagttgataaatacagtgggcgatgatttctctggtggcatctattatcctggcaatccgaaagcacacgcaaatttgctaaaagcattatccaaatctttttaaatgatttgtgtgaggaaatgatgaaaggccatgataagcactggcagtaagggtcctttaaagtaataagttgttaagaatattgtgtctgcaacaggccgcacctcgtcaggtggtcgctcttcttcgaggaggttagcggtgacccctctggccctctgtgcctccataacggccgcattgtgtgcagatattcgagtactagcgtgactcgggccagtacacgtggattctgcaagagaactccacgcggcactcctttgaactcacttgaaaatgcttgtatggtgcttaggccttgtttagttggcaaaatgaaaagcttgcatggtgctcttcggtcatgcgacatgtcctgaaagcaaataaaatgggcgtcgaaaaccttggtgctcttcttcaagcggttgttgacatggatactgatggcatttctgctagtggtacggtgcgcacaatgtatgctaactgctaa

SEQ ID NO: 3944 - DNA, 2716 bp, Sorghum bicolor
tggcttctgccctaaaacaaaagacaactgaataagcaatagtattgatttcgtttatttcagcagcacagaaatacagaaggtacacctaacaagatgcatataaaaattatcttgctaattgcaactatatatggtgaaatagaattttcaaacaattgtcaattttcgtaggccacaagagctaaccatgtgagatcacctcggggatcgctaaaaaaagcaggcactctaatgcgctagctaggcgagcaccaaccacaacatagaaatttaacaatacatcatagttgacatatacacagttttcagttatttacagaagcctgtttcgaccagcattgacatgttaaaggaccatctacaaatttagcagaatcatcctatagctaccaacgtccatccagtaaaatcattttcaccatcatttccccctcctgaaaaaaaatcccatttctctaggagtccactactggaagacagcaaagtaattgaaattcagaaaaaaaaaaagcagctcattagataactattaacatagatttgtagtgcttagagatgttgaacaaatgaattatcaacacaaaatattcatacagaaaagatatccatatatcaagtataatcatataatcgaacaagagcagtactaccagctctcaaagctccaaaagcaagacaagtttctgcttcgccgttcatatagctacacaaaatcacgctctccaatctcataacctaggggggagggcatttgaaactcatgccaggaccccagcgcggtgccagagctaccggcactcgatgcggcacgggtatcaggactagtacctcgatagcacgaggtggagggcccagtcgccatgaagctcctgccgccgtgctcagtggcgatagaggcggtggcgaacgatgaggatccggccctgaagcacccctcaaggctgagagagggccgacgacggcctccgcggcctctcgtacagcggtggcgaagccacgcgagggcatgagagtggcggcgccggctaggctacggcgactgtaggctgcacgatggcgacggccgaccggcggtggcagcgccatgagatggcgagggcgaggcggcgggtggtctcgtgtccgcatgtgggttccaggtcgtgtgggtgctggttgcgggggagggagagccgcaattaccataataatcttccatccttgaaattaattaaagctaataatttacttaggaaccaagaggtacccccaaccaccgtaaaagagctctattaatatacaagcacttaattatttactgaaaattttagataaatgaagacaatcttgaaaagtcatcttaaataacactgcaatgacgatagatgcataattttgatgttgaattctagtattattttcaggccacaacaatgcacattgggataagtgttcaatgtttcaaaagtttaaaagcatgtagtttaggaaaacaatggttttcattagaggtagtattttccctacctagctatttgaaaaatctttagatactatacaagacactctaataaaaggagcatacaaacttactgtaataaggtctacaaaatgtgccacacccttcttacattacaggactacaaaatgctcccatccaaaaaaaaggacaacaaaatgcttgatcattgttttattctctgtcatgtgcaaaacagactgtagtgtaactttaatagtctacaactctacatgctctccgtgcatgcttgcctataaatagctagcgagcgtaggaggttgtagccatcgaccaagctaagctagaggcaaggtaacttgaagtaacccatcttccttcagctagtttcatcactactagagctttccccttcgagctagcaatggccatccaaaaatcatacaataatatgagcacagttgctgtaatggtagtagtcctagttctaacctgtcaagtcatgtcagctcattgcactcctactatgatactagcaagtactcctagaagatacctgctagcagtgcagtcgtcagctagcactgcttcggccacaaaagcagggatgatggagggcacaatcactcccgcagaaggtggtgttcccggagcgacagaggacgttcggcctaccaacccaagccacagccccggcatcggccatgcattcacccacagcaggattgggaggaagctgcttactactcaatgatgactgatgaagattcgacaggcagccacaagtagtttagtttgttcgttcccgtttcatcgatcttgttgtaacttctgattgttattagttattacaccgtacccgttgtaataacaatttggtatacctatgattttatgaatttgtaggtttcctttcaaccatctttatctgtattattaaaaatgtgaaattaagctcttcacaaattcgatgggagttgcctgcatttgccattgcattgtagcttgccattacccataaccagcagtagactctttgatcgtgcggttattgaggtgctgctcagagcgaacttatctaccgaatctgtcagtcattcagcagtagacgcaaaaagggctagctagcttgttcgcttgaacttatctatcgaatctgtcagccattcagcagtcatggcttttcaaacaaacgaacaacaaaatttagaatatacattacaatctttttgtagtgtaaatgcacacatgtta

SEQ ID NO: 3945 - DNA, 5142 bp, Sorghum bicolor
atggcatgactcggacagccggacggacagtgcacgcgcggaaataccagcactccgcaggggcatttccgtcaagcgccgccccataagagccctccagtccacacgcttgccctgcccagccctcctcccctgcctgcctcccgcagccgccctttctttctcgtgagcagcgcagagcagagcagagcagagcagagcaggtggcgaggcagccacagccacagccagccagccagcacgcgcggccgcttccacgcccacagagacgcggcacgcctccaccacctcctccgagtctccgacaccgaggcgagagagcacgctccgcctcgcagtcgcagccgcgccttctttcgcgcgcgtgctctactacttcctcttctccgtccagcttgtcgcccgcttcttcttcctcgctcggaagggctcgcctcgatctggtgagttctgtggcctgctcggctgctcgtgtggggggttttgagtgcggtggtcgccgcgatactgatactcgtgtgggggttttgagtgcggtgtcggcgcgatactgataggacaggttcggggccaaatttgtgggtgccgtcttgaagaatggcttagtgattcgggaatttcttctaggtaaactggtgggtttaggcattggtttccgtttgcgcccccttcctcccaatttcattttttagataatgggaagggttccggcttcagctctacggccacatcgatcgatctgttacatagttgctagaatcggccctttcaaggcctagtactgatttttagtctcatttgggagtgttctgtgtatatacaacggccaacgctactgtaggaaaagcgtgctgttggcatttatggttgtcaacacgtgctaatgtcaattttgctcttaattaatcctttcgttgagctactgcaagggtttagaagcttatgcaatattccgctctatggtcacccggatcttggagctgcctgccaatttcaccctggattgattgcacattactgcccaaaatccagtcaatttgcctcattttctcaaatggctctcaaaatcacattcacatatgtagtagattagtagacagcagtagtctaacggattgcagagcataaatctgataccagcacactttagttacgtttcctatgaaagtattgttgtgtccttcagtatataaggaaactcatcaagaacctgggttttccattcgcgcaggtagctctggtggggaatcaatcagaagaactgaagactttacactagcacagtctgctcatcaagagccttggcagaatgaggtggcttggtctttccgttgatgtgttccgcagggggatctccttgaacctttactgccgtgtgattctgtaaatcgtctccccggctaccggagaccttccttccttcgcacgcctcctgatttataggcttgtgaaggcaccccccacccggttgttggcgttgctgttaggccgttgtggttgtttggccaaagcttttgaggagaacggagtggagtactaatggtgtggaaagcagctgctcagccgagattccgcgtgtttaagcatgagaacggaatcacagtgagagtaattgcttgcttccagctgctgcaaaattgccaggtaatgtagcaaaatgcaaacatttgttaaggatttcctttcttcacttgatggtcctgacattgctttggtatatctgctgtaggccgagtacttccgtcatctcctcaagcctgtgacgtagcttctctctctgctctccatctgctgctgaataagcttgctgctttaggttcttctccattacaattgaagtgggagaacttcccattcatctgaaatttctgctggtaaaaccatcattctttcactcatgttgctgctactacctgcttctatttgatattgatatactgacactcagtttcttcttgataatctcaggtagttctgtccggtagttgtttcatttgttcatgggggacaaggttaatccctggtgccattggcataatcctccatggaaattcaacactgaaggttctggcggcaatctccgcccacctgatgttgggcttgttaacaccaattcggtggcattgcctgcatatctgaacacagttgctgcacctgtgccatttttcacagcatcaattgctgagagacctctttcaatagctccaagatatgccacaacattggcaccaagtttggagttgcctgcactgtatccctcacgtaagagacctctagttttctaccagaaggaaaaccatgctcctagtgcagctcctttgctgagcaaagggccactggatcctgtgccagagctccaaggtagcaacgagactaatgtaactgatgttggagcagaagaaactgagggtattcatgagaactcagatgagatcaatgcactcctggactctgactcagatgaagggtatgaaaaactgcaagaactcgacagagtcagaaggcaatctgctgcagagaatgacaccctgagcgttgagtcagtgggcagtgctggtgctgccgcaggttctgcaccaccagccaagaagagaagactcagctcctgtactgacaagtctgttgttgacactgccagttcagcaaggcctgatcattccatcgagcagaagcttcttgtgaacgactgtgatgcgcagtcatgctgcgtcggtgaagtggaaagtgaccacaagttttctctgggggaggtagaagcagcagaaggtgacagccccgatgatcagaagcgaagaagagagaggatccaagagactgttgctgcgctcaggaatattgtccctgggggcattgccaaagacgccactgctgttcttgatgaagcaatctgttacttgcagtatctgaagctgaaggtcaagacgctgggagccgtctccctctagctcctggacaattgtgatttagttctcaaagccgcttgcttctgctgttctacatatacgaagtatcacattggtaataaggtgaagatgccaaagatagctcaggttggtgcttcaggacgcgccagaggtgaataacggaagaagaaaaggttcaatgctgctttcttggcttcccttgtacccacatggctctaatgatatttgtgggcaaatgactggcacgcagcattgcagtagtacttcatctgaagcaaaggcgtgcgagttttccttccattgtggttgtggcggagcaccacggagcgacgctgcgctcctggccacctatgctgctctccagtaagctagcctaccaccatctttgtgtctgagagctccagatcttctcataccagcagctaacaagtatgtcactgtcggtgccccagtagtacctgcctgtatcactcactcactcaccttcctcaaaaggccctcgtgggtcggagcaacatctgtatgttatgcaaagctagaaacatctttttgctgagcgtgatccaaagcagagtgggggaaaggaaaggaaaggaggcccattgcatgcaaagcgccctgccgtggtgtttcgccgtccatggcttttgacccagctaccaaaggcgatgacacatgagatggctggaggttgggttcgtgtggtatagagttccttcctgcgggtccagccggtccaacaaagtgttgtgtgcctgatgtggagctcaacttcagcacacacacacacaccggttgcgctgcgcctttcatcatctgctgccgctgccgctgctttactttctgtcatcaaacccgctgatgcatatgccaccactaccattatagagtacgtatgtatgtatgtattgcttgtggaatggctttgccacgcctttatacgcgctgtaatgataccatatactcgttgctttggctctgacctgcccagaataatgtttgctttggtagctattagcttggtgtgcgtactactgtttatactagtacgccagtggaggaggcgcagcattattgtacaggtagtcctgttttgcgtgcacgtcctggagccaggaggaggagccttgctcgtcaagtgtgcgtgcgtctatgctgtctcctgttgtcctgttggcaatgattgtttggggctgcatgatgaatcatcctctctctctccctcgtcccgtcgtcgtccgttgttgagggtgcgtgcgtgccactgtcgctgccgctgccactgccactgccaggttgggaaccaccgcctggggtctgccggccgggaacggagggattccgagtgcgggtgtgggcagcggcagcagcagcaccgggcggcacgcgtggggggacggagcgtgcagcgaccgtcgcggcggaatgagtgtcgtggcaggcgggggcgcctgcttttcttcggtttggttcggtgcgccgagggagagaggtgggggccaaagcggagggagggtaggaggagcacgggagaggcatgcatcatcgcattcgcatgcgatggaacggagggcgggcgggccgcggatcccgcccgcccgcccgcccgccttggcaatgttggcatcatcgcatgcgatggctcgtcgctcgctcgtgcgccctcatctgacatcggggatgtagctttcagcgtgcatgcgacggccgcaccatgagcgatggatcggcacgcggcacgccacgctttgcttgcggtttcccactgtctgtcacctcggcgcgtgtgccgcccgccattccgcttccgccgtgtgcgcggtggctccaaattaacacattccctccggttttttttttttttttctctcgatctctgatcggaagtcacgcaacggcgaagccaggccaggccttatgggtgcggcccgcgctggcctgcgatgggccggccggaacccaagtctccacagtgagaacaagctcgcaagttccacatctaacccaaaataactttcttctcctgcggtctctaaaaacaagggggagttcgtttggttgataagtcatgatacaaaatactattagttaatttattgtgagagaaaaacgaatgattgacatattcggctgaagtctttcattgtttttagtatatgttcgcttggctgaaaaagtcatgactgaaagtattattcgctaatttgttttaaagaaa

SEQ ID NO: 3946 - DNA, 4334 bp, Sorghum bicolor
ccccgtaccccacattagagggaggaagcagctgcacctgctgacctgcatcgcaattatttggccggccggccggccggatggacgcattcggttcgccgggcaacttggatggctagagcggttggagatagacagatagataggatagatgccgatgcttcaggagccatgcatacttaggcgtagttgtcgcaggtggccggccggccgccgcccggtgtagctagatgcccagatgggatgccggcggaaccgtcaacaaagctggaacgggaatcagttagacacactgcaccacacggtatcacccaccgattcccttctatctttccattccatctcactctgactcgatcgatcagtctcttgcgttttgctttcccctcaacgcatatatttggtgcctcagcaacgcacggctcttatctagatgatgaggaagaatatgaatccccactacatatctatgaagaatcgccgccggccggttcaatattctcatggtcattgttgctgtattccacacgagccagccttgatcatgtaatcatatatatattcatccattcatagatatatgcatgcctgctaaattcaagctaagattgcaacggataaggcgagagaactaagaaaaatttgtttttttactgcaaagttggagcgcgtttcagtatttgtgacggccacggatcgcctgacgatcgagaagatcgatcgagaactcctcgcaggtccccccaccgccgtcacgaatttgtcctcccggtgttttttccccttctttcccatcgacgtcgaatctttctccagtgactgaatggctaacgcaaaagaacacatgacaaggctctaaacgttactcatactttacaagttcagataaaacacagtcaatatatatttcatatagacttatttactagtctacttgtcatgtcagatagagtaaacaatcaacccacactatatatgctcaatatatccacccttatcacaaatctaattatataagtgataaggacactctaactaatcagtcagcattgagtgtaaagtgtaaaccatcaagtaatagcatgcatgcgcatccacaaaaatggtgaatgcacgagtctgttgcaaagttacacctctcaacgccagtgataaaacaaggatcgcttacacagagtcgtgccaagaagctataacacatgacttcactcctcattgaaactaactttaatgtaaccgaaaacaataattatattatactctccctaattaatatgcactattgttgctcaggtttgcatatgaggagttcgatgagaatggttatgctatgctgaacatgaggaagattatatggacgagacgacatcaaccatattgcaagtggaggaaatgctccgaacacagtttttcagtccatacatgctgggcatttgttatctggaccgtccacatgtatcgagatatatgtcatccaaaacagtagtgtttcacgttagatagtgtgcacaacatgaatttcaaagcactcttggacgatgcagataacacgtactaagtatgtacatgctatgatatatcacaacttacgcagcaagagctgcaacttcatgtaataggttgtgcagcaacctgtaaaattttggacggcatgatatagatatggttgggaattttatcaagtctacttccaaccaaacaaatggtgcatcatttgaactttccaataagaagcaataaccattttagtggagacaaccagctgaaactgaaacaaccatgccacattttgtcacttttttttgcgatatacatattcagcttagaaaataaatagaaaaatgttctcacaagacaatatatgctcatatccactaaaatgttcttcttcccctttcaaaggtcgcttgcaccaaaatgaaatccctggcattggtatctggtagcagtagtcatacggtcatttccctataaaatggggacgggacgaggttgatcatagaagcagccagccaagaagcaacctactaagcaaacgcaaggcaggtgccccagctcgctccgggcttagttagcagccaggcagccatgaacttcggcggaaatggcaacgcgacgacgatccggtgcaagtactgcagcgcgtgcctgaccgtgatccccggcgagcgcgccatccagtgcgcgcaatgcaactgcgtgacgcgcatccggcgcggcgaccgcatcccgccggcgcggccgccggcgcacgtgccgccggcgttccagcgcgcccgcggcaagaagcgcgccgtcctgatcggcatcacctacgccggcatgcgccgcgggtgcggcgagctcagggggcccatcaacgacgtcaagtgcatgaggaacctcctctgccagcgcttcggcttccccagcgagtgcatcatcatgctcaccggtaagcatgatatagttggcacgaattgatttgatgagcagctgtgtcactgtgagtcagtgatatatctacctgatgatgatcatggtattgctgcatatgcatatggcatgcagatgaccagagggatccgttcaggctgccgaccaaggagaacatccggatggcgatgcactggctggtgcagggctgcagctacggcgactccctggtgttccacttctccgggctgggcgcgcaggtggccgacgacgacggcgacgaggcggacgggtacgacgaggccatctgcccgctggacgcgttccagaggggccccatcctggacgacgagatcaacgaggccatcgtgcgcccgctggtgcacggcgtcaggctgcacgccgtggtggacgcctgctacagcgccacggtgctggacctcccctacgtgtgccacatgtccaggaacgggttctggcagtgggaggacgagagccccccgtcgggcgcctggaagggcaccagcggcggccacgccgtgctcatcagcggctacagcgagggcaaaagcaacttcgccatggtcagtcagggatcgaattagtctgaatttcttcttgttcggccattgatctctggcttacattgcatatatatatgtgtggtgcttggacgacgacgacgacgacgacgtgcagatgccggatgcgtacgcgtcggtgggggcaatgacgcacagcttcatccgggcgctggagtgcgagccgcgcggggtcacctacggccgcctgctgacctccatgagagccatcatgaagaaccgcggcgggggacacgatctgcagggccccatcggagcacccatccacacggtggccaacttcagcggcgtgcaggtgcgtgatgagattctgatcgatatcgtggcagattccctgtctgtgtgtgtgtgtcgtctggcaacaaattaaacagcctccgctgtgccactgccctgaccaaactcatcttttgtgtgtgcatggttgatttgatttcgcaggagccgaacctgtcctcgtcggagatgtttgacatacaccgcaagccgttcgtcctgtaaaacaccacacaccaggaccgcttgtacgcacaaatcactattactgctgcagttcaacaagaacacttaatgatcgccgtatcagaataatcagttatccatcgggttgagctatgatgcttcctagggtaaaccaagtgtaataatcagttatcctcccttagacttctagtgaacctcagtgtaataattaagtctgtcgttcatggtcctcttatatacgtatatatgtaaaccaagtgtaatatacatgcggcttcagcatgcagtttcagtgatcaaaatgcagtttatgcggcttcagcatgcagtttatatatccaggtgtgagtttgtggtggaactgaagcttttctagatagtagaaagaactttaggcttcatcctctaggactagcaagaggaatcagaccaacctgttaaatccaacgcgccacagcgaccagattgaatttacagaacaaataaagccaactcataactcaatttttgtaatataaaaggttattgaaggacgcgacgcgcgaccaaatgcatagacgcattctcgagcttgtggcattcccaatacgaactactactttttgtgcctcactaaggaccgaatggccaaaaagagagggtgaactagtagtctctaaaagtttaagtagcaatcttagcctacgcaaactctaggcctattacaccttttctagttttttttcctaaaaaaacagtctaatggatccttaggcacaataaatattaagactaagacgaaatactcgtaactcgctagctcgctcgttaagagctcggctcgagctcgactcg

SEQ ID NO: 3947 - DNA, 4032 bp, Sorghum bicolor
gcctcattgctgaatttagatgacgaactcatattctcggaacggccggtatgtctctggactctttctgtccgaacattcagacgaaagacgtggtccgatgattcttgcacgcgtctcaacacataacaacacctacctaagcgaagcgacgtacgttcctgtacgtatgtttctttttttcttctttcttcttcttatttgttttcttattaagtcctaaactcctaacttgttggtggttgcgttagttcctcttttttatttcttttctcattttttattttatgtcttttttattattttattattcttatattttttatgtttctttttttatttttcactcttttatttttttatattcacacgttgtgcatgttctaattttattttttttctttgaattctatttattgttttttcttccttctatttgttcttactttttctttcgtttttagttttctatatgtttttcattgttattttccctttttccaacccttatttaaattatttactttttatttgttctatatatttatccttgttagtgatgtttttatttttttatttgtattttataattatatttttctttgatctatgtttttatttttttattttttatttttattttttcttctcatgcatattccttttttgttttacttttttttttcttttgaattctcttcattgttttttcttgcttctatttgttcttactttttctttcctttttagttttctatatgtttttcattgttattgttcccttttttccacccttatttaagttatttactttttatttgttctatatatttatccttgttaatgatgctttggagcaaaaaatattccaaggaatcttgatcaaagttggaattggtgtgagaaatggttaccatttggcaggaaatttcatttatgtgggattgcagcggtgtgctgggccatctggaaagcgcgaaacaaagcatgttttgagaaaaccatcatcaaggaccctatgcaaatcatataccatatatgtgctctaatgaaatactgggcaggtctttactgtgaagctgacaaggagcaacttgaagatagagtgaacaccatgttacagattgcaaaccagatcctgaagcgtcagaagaaggatgccgagacgtcaagactgctgccagatggggatttagatggacagggagatccttccacttgaagagatctgaagttctcttaagaaacttaaagatcggttttcttgaagcttttgtactattggttggttggttgtgtaattgttggaactgtgacgcggtgctccttttctcttctgttaaactctctctttctgtcgctttctaaaagttgggagagtccagggttataataccaatatcatgtatttaaactgaacattgttcttctaaaccgagaatatttttcttaccaatatagaacattgttctctgaacctaaaacatacgacttttttgtttgtaaaaacatatggcatcacctcatgcaaatcaagcaaataaaataatcacctgcatgcaggctgctgtgatgtccatcctgcgtgggccatctttggggtcattcttcctgtgggcgaaaaagttgcgagctcctgcacggctcatgactacgagcgctgggggcaaaatttatccacatgaggcccagggaactgcaggcttcctttctttcccgtgtgctcctcgtcctcgctagcgctgattgggcgggaaactatgggagggcggcaaactatcggaggcaggcgccggcccgtccatccatcggactagcagctcccggtatgtcctgctgcctctatttataaagataatcaacacatgtttagacttttattagagcacctcatcaagcagaacactatataaactgcctagcgctagcaatcgagaaacagaactaaccagccagccagcagcgtatagatatacatactatacgtgcacgtggacacgatggcactcgtgcaggagagcagccaggacttgctccagtcttacgtcgagctctggcaccagtccctgtgcttcgccaaatccatggcgctcgccgtggcgctggacctccgcatccccgacgcgatccaccgccacggcgacgacggcgccaccctcgcccagatcctcgccgagactgcgctccacccaaacaagcttcgcgccctacgcagcctcatgcgcgcgctcaccgtcttcggcaccttcagcgtccagcaaccaccaaccagcgtcgtcgtcgacgcgtcgtccggcgaagccgctgtctacaggctgacggcagcctcccgcttcctcgtcggcgacgacgaggtgagctcgtcgtcgacgaccttggcgcccttcgtgagcctggcgctccacccgatcgccgtcgccccgcacacccagggcatgtgcaagtggttccggcaggagcagaacgagccgaccgcctatgcgctggcgttccggcagccaacgccgacgatctgggagcacgctgacgacgtaaacgccttgctgaacaaaggcatggtcgcggacagccgcttcctgatgccggtcgtgatcagggagtgcggcgaggtgttccgtgggatcgactcgctggtcgacgtcggcggcgggcatggtggcgccaccgccaccatcgccgctgccttcccgcacatcaaatgcagcgtgcttgaccttgcacacgttgtcgccggtgctccatccgatgtcaacgtgcagttcatcgcaggaaacatgtttcagagtattccacctgcaaccgctgtttttctcaaggtacatccgtcactgctgagtgctgactgctcaaatttgactatcctttttcttgtcatgcatgagatgctcactgtatcataaaaccttaagtcaaactatcttaaatttcactgattttatataaaaaaaagtaatgacttctatgacaccaaacacttatattatgaaaatatatgtcaagatgttttagtgatactaatttagtatcataaatacttaatgccatttttttaaaaaattcgattaagattaaaatagtttgacttaagaccactctatctataagttaattcaggttgtgtttcatagggatctagattatttttgtagaaacatttcagatctagattacctcataaaacgttttgggtgatgaatcagaatgactttacaaaatcatttggttatgatcttgcattcttattcccagaatctttttacataaacaatcatacaaataaaaataagcttaaaaaaattcctaactttgtgtggacaacgaacaacttaaatacaatctagtataatttgctgcacttaaaaataacaattcaagaaaaatatattcgctagtgtatagccagggtggagctagagaaaatttgagaaggtgtacttaccttgtaagtgtatatatttttatagggatgtgtatatgataaaaatttaactataatcattgtttttttatttttcagttttctagtgcatagatcctcctctacgtgtagcaagcactaaaacacaatccttcgaaactagtgtctaggaccgtttcacatgtgtagtgcaaatagaagaattgtttctgaaaagaaacgctacgtgtaatatttgtgtttagcagtgattctaacgttttagtgtaaagtcggagttgttctagtattgccgaccaaactcttaatttgggactaatggagtagaagtaaagggctctcacatcataaatgtgctattatctttgaatccaaacaccaaagacccttttcttcattacctatcgattaatttgatgattacctatgtcagacaactttacatgactggagtgacgacaactgcgtcaagatattaaagaaatgcaagcaagcgatatctccacgggatgcaggagggaaggtaataatcttggacatggtagttggatatggggagccaaacataaagcttctaaagacacaagttatgtttgatttatatattatgacgg

SEQ ID NO: 3948 - DNA, 5785 bp, Sorghum bicolor
aaaacacaaatacaaaactgttggatacctcattttgataattttggtaaattacaataatgcaaacccccaaattcaaaactgttggagatgctctaattagcttcctcactagaagataaataaaactggtggtttctacgtacggacctggatcttccattggacataaatatctcatccgaactccaaaaatggatgtcccacaaatgtattttttttattatcttgtcaagagttacaaaacggtgaagtcaattatgacttgacaatttctcaaatctattaagctgatttctcccgctaattttaatcatcaacatatgccccagtcccccccacccccacccccagataggaatgataaatattagaaactacgactagatatattgttctggatcaaaattcatgaaaaatatgctagctcgctcgccgtggagtccaaagagaagaggccaaagaggaagggaaaagtggataggggagagaaggtgtgtgggaggaagatggcaaacaaaaatattatttggaccccactaaagaaactaggcattgtacaaatttttttgatgcagtgtcttgaggacgtgacatctattgaaaaaacttatatgtgaaaaatattagaatcactatgttggatgaataaatgatcaaacgaccaaaataatttttgtagatcttaaggagttatgaaattttgtatttggaaactttttcatttgagttcatcttgtcatacaaaactgtgtctttatttaaaattttaaaattcgaattttttaaacaaccttagatggaaaaactttctgaataaactttttagatctcgaaaagttatcaaattttatagttgataattttttatttgaaatcatcttgtcatgcaaaaactatgtttgaatttctcaaatctgaaattcaaattttgtaaacgacctcggatggagaaacttccttaataaaaattgtagatctcgaaaagttataaaactttgtagttgacaaccttttgatttgaaaacatcttgtcatgcaaaaactacgtttgaatttctcaaatttaaaattcaaaatttgtaaacaacctcggataaagaaactcccttaataaaaattgtagatctcaaaaagttataaaaatttatagttgacaactttttaatttgaaattgattagggccttaaataattaaattatatatgatttggtataatatatgaggaaccgaaatgcgatacaggtagaagtgatagtttggtgcagtggttagcgagggagacaagcgagagagaggttacaagtttgaatcccatcggtcgcgtagctgcaaaatttgtaaaaaaaaaataccacgacttgcgaattcgatgaagacgagcggacactagttgttgggggcctttcccggaaaaaatcctgttttttgaggttttttttttatatctttgccgagtgtcagggttcgccgagtatcgaagacactcgacatgtcggacatttggcaaaagagccctttaccgaatagaactctaccgagacctctttgccgaacatggcagagtgtaaatatggctttgtcgagtgcccaaaacactcagcaaagcactggctgccgcagtgccagttgacatttaaaaaaaaaacacctagttcctcttagatcggatctctcgttttttttaagtctcaaacttgtcgttatgcgtccttgatctcagcacccatgggtacggtatatatgcacacagcatcacacgatatgcgcccgcgtacagcacccaagcgctccacacacacaagcaacaacccacaagtgtagacggagtttctgcaagagaagccatcatatcatcgatcacggcgaacgtgtgggcggcccctgcaattctcttgatgaggacgccaacgtacaactagctaggagagaggagactacgcatgcatactcgatcgagctgatgaatgaatagcccaccttgtggctatggaatatatgggggccgacgacgaccagtggccgtggccgccgccgcccctgctgctggctgcagcactggtggtggtggtggtgctcgcgctgtggcggcgcctggtgtggcaaccgcggtccgtggcgcggtcgttggcgaggcagggcatccgggggccgccctacagtttcctggccgggtcattgccggaggtgaagcggctggcgcgcgccagccggagaagggtttcgcacctggacgttggttgccatgacatcatgcccatcctgctgccacccttccacagatgggtcgtcgagtatggtaaagcctaacactctgtaatccggccgtatatatatttatttttgatagagtgagttagtctggccttttgagttttgacaacgactagtaagacttccgtcgatctcttctatacattaattaggagatgtgtgcagcgattacctaaccatgttaaaactaagtatagctatgttactaaactccacaacaatatatagtttccatgtcaataactcttgctaattgtatactagctatagtttcattgtttaatgaccgccttgtcaaaaaaatatctctgtcgaccattgtcatgaagtctaggtatgaaagagaaattcgtcaaaaggatggctccgcatttttatgatgacaatggcaatgggaaatgcgtgcatatactttgcaactgcctccgcatcctcgtcatttgtgatccctggtttcttcataagttaaattctgatctgtttctatgacgagggctcgtaatgtaactatcgaacggctacaggaggtgaaaaactcgtcactagtagctttgagtccgtcattcagcatctcataataaatcaacaaacaatacattctgtcatagcttttccgccaaacgaccaagacgaaggttcttcaaccaagcaaagagctgggtgtgaggctttgtttagttggcaaaattttttgtttttggatattgcagtagttttatttgtatttgataattattgttgaaccatggactaactaggctcaaaagattcatctcgcaaattataggtaaactgtgcaattagttattttttacctatatttaatgtttcaagcatgtgggggaaaaattgaaaagtttttgaatttaggatgaactaaacaaggcctgaatctgaactacactaccaggcctaaccactgtcactacgcggcccagcatcttgtagagcgcagacattctcgagcccaatatatttccgttcaccggcccagcagcatcctgagaaggcccaccaggaatcgtatgggtcaggcaagcaacgggcccagcaagatcggcgccatgcatggcatcaaccggacttgggcctaataaaaactctatatatttattacagatgtcctaataataagatacttgggcatttctcaaaaaataaaggtacttgaggggagcagaagtagcattacgtacgctgttaagttacatgtatctgctacgaacgcacatgctttgaagtttgagcaaataaaaaggtcctcatcatgagattatttctttaatttgaccatcatcattcagggaggacattcctgtactggatcgggccaacccctgcgatcttctcagttgatttagagctgattaaggaagtgcttacagacaggacgggcctgtttgccaaggacttcatgatccccgtcttcaaagtcctgttgggcaacgggctcatactagcaaacggcgacgactggaaacggcacaggaaagttgtccttccagctttcaaccacgagaggatcaaggtggccatcatcatcgatcacaaaagattacgcacatgaaccatatgcatataatttcatatatagtataggcagattttaatgcagcaactgactttggtcctgttgcattgcatgcatggttatatccacgattttacctggaatatcatatcgatcgagttcatcagagcatgtcggcagtgacggctgaagctacggagcagatggcgcggcgatggttcgagcaaattctgcacagcggtggtgctcgtcaagcagcggagatacaggtggaccgcgccatctgcgacctgaccgcagaaatcatcggccgcgccgctttcggcaccggccaccaggaagccggcgatgtcctcgtcctgatgcacgagatgcagaagatgggcgccgcggccatgttggatgcccctatactctggtaataacaacaatgcaagctcatggcatttgacgacaaacaatgcaaagtttggttccggtccattccagtaattatataaagattttcccctctttttctaggcatatgccgactcggcgcaacctaacggtgcgacgtctggacaagctgttgaggaccaagatcacggcgatgatggcggcgcgggtggccgccgccgccaattgcggcagcggtggctacggcgacgacctgctcgggctcctgctggaagcgtggtcgccggagccggcggagcgccaagctgggagcgacgacgaagggacgacgacgacgacgctgaccaccagggaggtgatcgacgagtgcaagaccttcttcggcgccgggcaggagaccaccgccacactcctcgtctggaccatgttcctgctcagcacgcacccgcagtggcaggacaaggtcagggaggaggtcctccgcgagttccccggcggcggcgacgttcccaactccgacaccctctccagactcaagttggtacgtacgtacggtacaatcacgcagctctctggccacttctgaaagatgacaaataaataaaaaacatgcattcacttctacaagatgatgcgcgtgcgtgcagcttcacatggttctgctggagacgctgaggctctacccgccgatcgtgtacatacaacggacgaccgcctcggaggtcgtgctcaggggcgtcgaggtgccccgggggaccgtgatatcgatccccatcggcctgctgcagcgggacagggaggtgtggggctccgacgccgacgagttcaaccccctgaggttcagcaatggcgtcgccagagccgccacggacccgcacgcgttgctgtctttctcgcttggcccgagagcctgcaccggcaagagcttcggcatcatagaagcacagatcgtcatggcggtcatcctcaggaagttcaccttctccctctccccgacctacgttcacaagcccaagtatgtcgtgtccttgactcccaaatgtgggatgcctctcatcttcaagaacctccatgggtgacaaaagactattgcccgtaagttttatattatatatatggtacggtgtatggcgttgagccatcgaaagatcatgtatatgattactactgttagtttttctgatgattattatgttaccatatatgtacttcctgtcgtgggtgtatatttgtgttttcctttgtttataaaagtttgttttgaaatgtatactcccttttgttcgtttttatagagtgcagtgcgagtgtgttaaactcagtgtttgactgcatattcgttttctataatacgccattatgatttataagattttaatcttttttgttcatcattcaacatttagctaagacattgtaagaatttaaaaacaagttgtgtttatgtatcctaaagggatcgtgacaagaaatgtatctttatcagttgctcgatcaaagcgtgtcaatatgatatatccaaatgttcaactttaaaacggcccatctcctaattgtcttaaaatccaataaaattctt

SEQ ID NO: 3949 - DNA, 4900 bp, Sorghum bicolor
cttgttatcaggaccatcaatctgaccataacagccctgatacctgacgaatgtggatgagaaacttgcacgcacgaattgtacagtcaagctaaggcaagcttttggcgacggacgtactcctacatagaggttcagtgaattcaatggtactcgactaccgtgatagcacaaggtcatctgctgagagtttcagagaagctatgttccagtggctatcaggcagtacttcttagggatcacgatcgataaaagtcaagatcttcacagtgacagatgtgtgttgagcagcgcagctctcttctctgcccccacaactgcacggtgtgccaatatgtctagcaagcgaatttatagacacaaccatgccgcctcatgaatcatgattaaggcgcccaagctgctcttttatcacattctttttttcttttttgaaaagattatctccaacaatcaaccgcaaaaaatgtgaaccgaatgcaaggaagctgcgcagctctgcaaaaaatgtgaaccgaatgcaaggaagctgcgcagctctcttctctgcccccacaactgcacggtgtgccattatgtctagcaagcaaatttatagacacaagtacacaaccatgccgcctcatgaatcatgattaaggcgcccaagctgctcttttatcacattcttttttcttttttgaaaagattatctccaacaatcagctgcagaaaatgtgaaccgaatgcaaggaagctgtgcagctctgcaaaaaatgtgaaccgaatgcaaggaagctgcacagctctcttctctgcccccacaactgcacggtgtgccattattcttttttcttttttgagtatgtaaggaagctgcgcagctctgcaaaattttgtgcaccgaatgtacctatggactctcacattagggtagttgaattatttcagctgaggcatcgcgtgactggctggtcaccatccctttaggaaaggccaaaaaatggtccaaacttcctttagaaaagaagacaaaatataatgggcagcacacacaaaaaattagcaataaagatgatacatatacacactggcacatataagccatagagataatggcaccatgaacattaatttgtcttcaagtaagttacggttagaaatgatagtgttagccaccaaccgaatagatgttcgtgacctcacacctagagtagctaagtgagtggctcacacaacctatatctttgaattctccaaccttgtcaaaaaaaaaaacctatatctttgaattctccacaccttgtctggatcctaaagctgagccagagtgagattcttatcgtttggactttcttggattgcatcctatatatgaacacgtacaagtcacactttggagttcttaaagcagctctgatctgctaaaataaaccatctcaactctctttgaatcaatccacatcgtttgagaaatattctggtgaaaaattagctaattatacaccctagtacctcttaacatatgtggattatggtgaattggtgtgcagtcaaacaaatcctgatgcatcaatgaaatccaagtgggaaatcttccccgtcctgtgtggaccatacaaacaagcagcgcaactctctctgaattagcaggcttttggtaacagataacagtggcatgaaactgatgtaacagtcttttggtagataacagtggcatgaaactgatgtaacagtcttttggtaacagataacagtggcatgaaactgatgtaacagtcttttggtaacagataacagtggcatgaaactcatcactgaaaccagtctaatatgtgtttcagaaaagaaaaaaaaaagagcacagcaccaaattaaaggtgtttatttatttgtctcggattaatcattgtgaccatctcaactcgacatggcagtatggcaccgacgctgccaaacgcatactacacacatgctgctaacgagccatgcatgctatatatcatttttttttctcttttgcgaggaactatatatagcatattattacgaatacaagcaagacgctccacccacatgacatggtagccgcacgcctgggtttcagtgagtgatttgggtggggcaaaacaaaaaaggacctccgatcaacaagcgccttacgcaccggcggacatggtggtggccgtggccttgcagctggcggcgctcctggcgctgctgctcgcgctgtggcgtctggcgtggcggccgcacgccgtggcgcggtcgttcgcgaggcagggcgtcggtggcccgccctacacgttcctggcagggtccttgccggaggcgaagcggctgctgatggccggccggagaggcgtgccgcccctcgacgccgcctgccacgacatcatgcccgtcctcctgccgcagttccacagatgggtcgcagactatggtaggtcgtcgtcactcgtgactcttgaaccccagtgctggcaagacattatcttatttataagattttttttctttctttttgtgagaattatctttaagattttgatgatgaggttcagtttgatcaaaatcttacagggagaacgtttctgttctggatcgggccgattcccgctctcttgtctacggatctacagctgattaagcaagtgctgacagacaggacgggcctgtatcagaaggacttcatgatccccgtgctcaagttcctcttcggcaacggtgtcatactgataaacggagacgattggaagcggcaccgtaaagtggttcttcctgcgttcaaccatgagacgatcaaggtcatgagatagaacataagccttctttaatttactgcttaatttgaaacattattacaagtagtatataatatagcaactgactggtgtttgatttcatttgccctgctggctgctgcgcgtgttcagagcatgtcggcggtgacggcagaggtaacgaagcagatgatgcggcaatggcgggagcagattattattcagggaagcggcgacaaggaatcggccgagatagacatgatccacgccttcaacgacctgaccgcaaaggtcaacggccgcgtcgccttcggcacgagccaccgggatgtcgaggaggtcatcgtcttgatgcgggagatgcagaagctcgccactgccgccacgctggatgctccaatactctggtatgttacactactggtgctactatatatagtattctgtattcacttctggatgcagcaccaacaaccgagtgattttgtttcgtttgtttaatttaggtatctgccaactcggcggaacctgcaagtccgacgtctgaacaaacagctgagaagcaagatcatatccatcatgcaggcgcggctggccgccgacggagctaagaagtgtggtgggcgcggcggcgccggcgggggcgacctactcgggctgttgctagaggcgtggacgccgcagcagcagcagcagcatggcaacaacggcgagacgctgacaaccgacgaggtgatcgacgagtgcaagaccttcttcgccgcggggcaggaaaccacggccacgctcctgacctgggccatgttcctgctcgccgtgcacccggagtggcagcacaaagtcagggaggaggtcgtccgggaattctcctgcaccagcgacggcgacggcgacgaggtcccccacgccgatgttctcgccaagctcaagctggtaactgataaccaatgcgatgagcatgctgctgcaccatatatatgtaaattgtaaacaagcaaacattcacccatgcatgtgcagctatacatggtgttgctggagacatcgcgcctgtaccctcccatcgtgtacatacagcggagggctgcatcggacgccgtccttggaggcatcaaggtgccccagggcacggtcatctcgatccccatcgccatgctgcaccgggacaagcaggtctggggcctcgacgccgacgagttcaaccccatgaggttcgagcatggcctcacaaaggccgccaaggatcccaaggcgctgctggctttctccctggggccgagagtgtgcactggccagagcttcggcatcgtggaagtacaggttgtcatggcgatgatcctcaggaggttctccttctccctctccccagagtatgttcacaagcccaagtatctcctgtccttgacacccaagcttgggatgcctctcatcgtcaggattgtggacggctgagaaagattgtaaaagctcgttcttgtgtgtgaaaatcaaaatatatatgatgactagtgtgtgtgataaatggtagtacgttacaattcattctgctctggagtagtaactatatggcacatatacaaggacgggcattaattaataattctaaagtaatgcaaaacaaactgcagacttatgtttagcacataatctacttttggactatcaccttagtcaaattatttcatatgaggtaccaatgattcgccggtcaccggcactttacaacaggcaaaatggttaccaaaatcccactagctagaagatgagacccaaaaaaaacaaactacatcaacctaggaggcactagatggcattttgtattaacagaaaatagacacgtaaattcgctcagttgaggtaagatgacttaccaagatgatctgtgtatgcatccacacccttgaccaagctagcatctccaacagttcggtattttttgtttgttatttgttgtagtttgtcaactcccaaaacaatatggcaagtagaaaaaaaggccatatctaagtgtttggcataattgacttagcaaaaaccaaaattatggacccaactgtatttgtcatgacttttcttccgcgccgtatctggtcccgcgcttttagtcacgcgcgtttcttcttcgcggcattttttcg

SEQ ID NO: 3950 - DNA, 7064 bp, Sorghum bicolor
gatagttttactgtgtgttcagttccgaaactactacagataggctgaactcaatcaagatttttgagatgggatggaataaactcatctcgtatttggttgaggaggttcggcctattccagttccatgtttggtttgaagttttttttagacgtggatgatctaatgacttaccaactttgtggggcccatggaagcctatcaactctcttcttcaatctacctatagcaagtcacccaacatgccccaagctccacccactagagctcgtcgtatcctcgagcgagtctcaatgtcgtgccatgacccgtgagcaccaccccaacaccatgtcgcctgctttgtccttgacatcacgttgcacccaacacactcactttgcttggtgaatctccattgtgctcctaatgccgcatcgcttgcgggagcttcaccgtgcttctcacgagagcttctaacgccatgcacgcctgctccactcgcgagagcttcgttgcactatgagcttctcccgtgggagctcagtcatgcctacgaggtcctttgcatccctgagcattgcccccatgtcgcgcccgagctcaaacaatggcaatgctcatgcccacatatccacacgaggaagtgggttcaattgttttctctgttttggagaaatataatgaacccacgtctaagggagagaagtgttgtgttggagttcctagtcacggtggaagagaggaaggatatcgcagggtaggaggaggagatccggtgcaacggggcagcctttgcgcagcggtgttatggggaacgggaaaacggcagtgttgcgagaaacagggggagtagggaagagacgacaccagtttgtagccaaactagtacaaagagatagaggtaggagaaattattgacacatagatgttatattaagtgtatattggggttaatgtattaatgatttgttgtagcaactctcaaaaatctccaaataaaaagtattgatgatcacctataccactatattagagatagattattactgaactattggaaatgctataaagacgggagagagtataagaggagttgaggacctagatagaataccttaggccttgttcaattcaagcaaaaatccataatttttcaagattccccattacatcaaaatttgcggcacatgcatggagcattaaatatagatgaaaataaaaactaattacacagttacctgtaaaccgcgagatgaatcttttgaatctagttactctatgattggacaatgtttgtcaaaccctaaacaaaagtgctacagtaccacgaactagaagtttttgcgaactaaacaatgccttatatggtaaaaaatttgaaccatcgattccatatatttcaagatggaaggagtactacgcaaaaaaaaaaaaagatcatggactcatggtcccctattctttggcatccactattcccttgtgcgccttcccaaaacactttcatatagaagttattagagtatatggtcaagagagccaagtgtgtttagctacaagtcaaactataagaattaagttatataatagtttgtcttctatttatctataaaatttatctatcgcttactatatattttcattctctttcatattcttttgacgagaatccctagtgcctacgcttacgtgcctaacttcctttctcttccacgtcagcgaattgttatacttgctctttaaaaaacccgcctccataccatgcggacggtaatcaggactttgcgtccacctgtcatcaagaagtccctctccgttccctccgcaccgcccggctcggccactcctcggcgcgccacgccacagggagggggaatctgacaagcgtggcccacatcccggcggcttacactcggctccacgcctccaccaccgcgcgcgcgctctctctctcttcgttgttgccgtctccacacttccacagtccccacccatccacacccatcgcattttggctctccgcttccgtcacacctcctccctcctcctcctcctcctcctcctgcggctgcggcccactacatataccatcatcacgtcgatgcgccgctccgctggcatcgccatcgccgtcgcgccgccgtagacggcctgacatttttttgtttatccctttatttatcatcccaatttcccacaaacccccccgcgcgcgcgcgcggcggtagggggtaaaaaacaaagagagggaaggatggcgtcggagccggtggcgcgggcggtggcggaggaggtggcgcgctggggcgcgatgcgccagaccggggtcagcctgcgctacatgatggagttcggggcgcgccccacggagcggaccctcctcctcgccgcgcagttcctgcacaaggagctccccatccgcatcgcgcggcgggcgctcgacctcgactcgctccccttcggcctctccaccaagcccgccatcctcaaggttgttcccgtttcttgcccttctattacttctctgtgatgaattcggtgcttgggcgggcggttagtttgattcctcctgcgctcaatttgttgcggggggggcggtttccttgctcgtctcttccgcttgattgaaatttgggggttcgggcacgttttgcttcggtttagttagcgtcgtctgcacatcttagtttttgggaacgaaggccgtttcgtttttcgcgagtaatatggcacttgtttatgtcctaggatgtccacagtattataatagttattttatgatacagtaatctgcatttagattttttttataatatattaataatgtgcctgttccattttatatctgctgccggttcttaccttatcggggaagaataacatggacgatgacagctattattgtggacatggtcccgttcctagatattctatcggttgtcctgaattaccttttgcaactttttgagcctgacatatttgtgaactactcctataaaggattgtattagttccggttaacatggtagttgtcatgtcatttcgatctctccatttcactaaaatacaccatcaaatcattcatttcaattccaaccagctttttttgaaaattaagtgtcactttagctcttgtagctgcaccatagttgtatcctagtataatcaggaacttcggggcatccttacctcccaaatttcggacatttcgcttcgagaatcagatttatctaatcctattggcttctcaaacatttcgcttcgagaatcagaagcacagagacttgcatgttgcaagttttctaaagtggaattcacagagttgaacaagctagcaaattcttgcatgtgaaagcatccatttacgggactaatttttggtctatttgcctctgctaaggtgagagattggtatgtggagtcatttcgtgacatccggtccttcccagaggtgaggaaccgggaagatgagctcgccttcacccagatgatcaaaatgatcagggtgcggcacaccaatgtggtgcccgcaattgcattgggtgtgcagcagatgaagaaggacttgggaggtccaaaggcgttcccccctggaatccaggagatccatcagttccttgatcgcttctacatgtcaaggattgggatccggatgctgataggttagtgagcttagcattctcatctctcatgtccagttctcagaaaggtgtttggtgagtcttggtaagattagcactttaggtattaacacactgttgataaaaaagcaatatgtctacagccctaatttagctatctgttacctatgaaagttaccttgctgctactgctttctttcttgcccaaagaagaacatctgaacctgtcattctgtctgatagatttctgaatgatgtttcagcccttatttatttggaaacttcagtttgggtgcaaacatataggcgctataatttttgacataattctgttgttataatagttaggaaataaaaactgtatttcttggctggataccagaagtaactgttgtaatgttcctcaagatctagtagttaatggataaccaattatactattccttcattttagacaacaacggttgccatatggttacttttatgatgtcaattcaaaaaaggacaaaaagaagcatttgtgcttcagcttttgtcctgatatggactaaccgttctggtttgcttgatcagggcagcacgtcgctttgcatgaccctgatccagagcctggtgtgatagggcttataaacacaaaaatgtcacctatgacagtagctcgaattgctagtgaagatgcacgtgctatttgcatgcgggagtatggatcatctcctgatgttgacatatatggtgatccgggttttacatttccgtaagtccctatactgaaggcttgctccctgcatttgctttattagatgccatcgtactttagttcaggattccaatgcatctcttgacacatttgagttttcttcttccccatcttttttagtgaacatattgcttggcttgtttgtacctgacatttaaattgatattcatgtcttattattgtgtgttgttaaccattctacttgtacttcactctctgtagaataatctttggctgaactgtaataatttagagcctgtaactgctgtgaacacctgtatgtcctgtttgcaatgcatgatggaaaggggtcctgttggccctggaactctaaaagatcttttgtctaacagaaaagtaaatcgtggagtctctctgaatgatattctgagctattcttgaactcttgattgcagatatgttacaccacatctacatctcatgattttcgagttggtgaagaactcccttcgcgcggtacaggaacggtatatggattctgataagcttgcacctccagttcgaatcatagttgctgatggagcagaggacgtgactattaaggtgtaactctacgtctctacctaagattccccattaccttttcttactgtgaagtttgtagtctcaaacatgttttgttgttgttttttttaataattcacaagcttgcagtttccattattttcatgtatatgttaatttatccttcgtagtgcttgtggtaggcaaaggaaacaaagttaactgtagaactaaacttgtgagttgtctttaaatctgagtgatgttgacctttgtgagtcttatatgtgcctggaagagaaatagacattgttgtcgtgcgaagtagtttcatttttgcagctgaccttgatcttgatgctgaacttttcttgtcttggcatggttccatggtggtactggactactggtagccaaatgagtaaaagagatttaagggaaattgagtccatttattttttgctggcctaaggatacaagacccatattaatagtcacccagcaatgtcagctgattttttctctcttattatagccaaacgcaactagcagagacgtaaatgaagcgccctttatgatgctaacagatagccaatccaacttattgaccaaagccttttgttagacttttctttcattaattgtgatattcggctgacaaacttgtatcttctgcacctatatcagcaaaaatcaatagtttcaattattcatgatctggtatgaagtatgaactgttcgactaaaccatacttttgcagattagtgatgaaggtggtggtataccaaggagtggcctctcaagaattttcacgtatctctatagtacagcagaaaaccctcctgatctggatggacataatgaaggagtaactatggctggatatggttatgggatccctattagtcgtctttatgctcgatatttcggtggggacttgcagatcatctctatggaaggatatggtacttaaaccttttatattcagatactgagcacactaaagaatgtggctgtattcatctctctttgattttcataaatcagtatgaactttagactttctgaatgctgattactcctattttgtaaaatgcaaatgaaggttaaaatattgacacataaaccttgggaagttaagcatatatggcaattcttccacattattttagctgtcctaatttgctatgggaccttataactctgatgatgaaattgagatgttccattagcatcaattactatattgctgcatcagtttccatcttacagaaatgcagcatagctacactcttgtcattcagttgatcactattattttttctgatttcatgtaggaactgatgcttacctccacttatcacggctgggagattcagaggaacccttgccttaaccgattcagaagaagccattcgattcagaagcagccattcctgtaattaggactctattgctttctcaattactgtgctggtattatgcaaatatagttctgatgaccagccacctatagtttcagctgttggtgtcctacttgttgtctttgttgttcattcatcatcttgatggaatgtgattatgattcagaatcgttttgcttctagtttgtactgtcattataattgttcgacctccaaaaatagttgccgtcgatcacctgaggcatttagtttgagtaacgggctcctaagcatttttttttagtttcagaccacccatgaggaatgatcttccactgaaatcattcggggctcgttcgttttgaaccgtttcaagccaggattcattccagttgatagaatcgtatacaaatataaactaactatccagccggaattattcctggacgtcaatacccaggaaacgaacggggcctcgatttgttaaaatggactggcgcgatggagaatgtgtaattctttgaaccaaatgcctgccagatatgagattgattgtttttcccaggcagttgatttcatccgtatctcacaggcaatctgtgcgtcgacacatcagcttcagagtgcaacattactggtatccagttatcatgcacatatggcgtggatttagttatgttggaccctgttgacgacatgttgaccaggactcccatttcacttttttttttagccttgctacggtactctcatt

SEQ ID NO: 3951 - DNA, 4835 bp, Sorghum bicolor
caaaccgaatgatgaatgccctgcctggtccaatctctatctctgaacaagacacatcacgttcaggtttcaggacacaatcagcgcttcctctccaaacatgttcccagaccctgtgcaagaccacacctatgtttcaccttttcagatcgaggcgataatagtaactaggcaaattgcagtagtaaaacgggacgcatcattactacagtaataataacatcgtctatcgtcagttaaatggcgtggaactataattagttcagtaggccttgcagtctcagacgaatagcatcccgccatcccctctctcagatctcttggcggcatgagcgtagtgcaagcgacactggaactggcctgctgatctgatacaagtaagtacaagctagttaattaaggggtctcccgacactcattagagaattgtatgccgtgtgatggagaggaggatacgtatacgtacgagtacgatgcaatatattttcactgattgtgtttttgttcggtaattgtggtccaacttattggccgcctgagcgcactgctttgctgattggtcgaggaaaaccattgtgaaggttcaggaagctcaaagaaaagggttcaacagtgctgtcatctctctttttttttttgcgaggaacagtgttgtgatatatattgggtgcttggaactgtggaatcacatgactatatgtgtgtgtgtttgatggagtttctcctttgccagctaccagatgttctttaaagaagaccggcagctttggtgttttgctgacgcctaatcctgaaaactctgaacgttattttttggttggtcgctggcttattcacttaaactgtcgaatctgtcgatttaaaactttaactgaatttctagaaaaaaaaatgctaaattttatagtaccaaattaatatcattaaataaatttatcatagaatgtattttttataaaatactaattttatatcatagatattgatattttttttataaaattgttcaaattaaaaaaaaataactgatacggattctatgagttaaagcgtccagaacacagcaagaaagagcccaccttcgcttcataggccggcccaccccgtcgaactagcctgggttcaccattttgttgccgaaaacgaccgaggtccaacagaatctgcatttggcccaagtattatgtgggctttaattataacctttcctgcatcgctctccagcccgtagacagaaacagagaattggctggacctcgacaacgtcaaggcgcggcccattcaccgaacagtcccaggacaagacaaggagagcgcatgcgccggcggtaatgagtcgatgacggcatgccgcccccagaatttgcttcctttttttctctctcgttcgcatcgaatccgcatcgtgaagggaaatccaccggaatccggattggattggattgcggcatccattcctattcgcattcgccatcgcaatcgccgtcgccgtcgccatccatcctcgcagcaccatagcgcagcgcagcactcggccgtgctttgctcggcccacccaacgcaaccccgtccctatcgctctccatcgtctccctcacctccacctccacctccacctccacctccagctccccgcctccctcaccagtcaccacctccaggccccccagctttggcgtagacagacaggtaccgcggcgccattaccaaagagagacacacagatcgcggcgctgcccgagaaaagaagccgcgccccttcttcccctctccctttcctttgattgattcacggatcgtccgccggttgcgacactagttctgcgcggggttcccttggattcggcctggaaccgtgagatcaagaaaaaacgcctgccattaaactgccaagattatatatatattaaaaaaaaaagaaccaaccttgattcaccgcaatctttcttcaacaaaggaaagagccttggtttgatcggcggcggccgatcttggctcggatggtggcgccgccgccgcagccgccggcgtcgctggactactggcggggcttcttcagcggcgcgcgggccagcatcttcgacgccatagacgccgccatccgagtagccgccgccgaccaccccgacgccctccgcgcgcgccgcgacgccatcgccgagcgcctctacaccgcgctcatcgccctacccgcgccggaggcgccgccggggcaccccacccgtggccagccgccgctcctcctcctccccgagggcgccggcagcgtgcccagcctctgcagctccgaccgcgctgaggtcgtcaacaacgggcggcgccggcgccggcgccggcgcctcgccgcggaacaagagcgatgatgacgacgacgtcgtcgccgaggcgttccgtgtcaaggcggctctctccaatgcccaagacaaggttcctccattgcttccctgtttgttgattctgttcctgatttgctgatgttggcattaatcgcttctgatcgattttgctgtgcgctcaactctcctgcagtcagaggccgagttgctcgagcttcttgggaggttggggcagctggaattcacggtggatgccattagggtgagccgtgatgaaagtgaaactgccatgcagcttgatgaactcttctttgtgcgtttgttcatatctctcgaatcacttatataggctactgagattggaatggccgtgaaaccgctgcgaaagcatggctccaagcagattcggcaactcgtccgatcgcttattgagtaagctgcttgtgcttttccttgcccaaagatgtctagttctttatattgcttggccatcattttagacactacagtagtttggtcttatgcagctttctcgtatttacatgtttgattgatgttatgcttgatctgaatttttagaggttggaaggctactgttaatgagtgggtgaacaacaaagatcccattgtaggtaaggaatacaaaagtcaatgtagtctttgctgttgtgttcttcctattttgtcctttattgatatatgatctagctgaaataattcacagatcatacaccacaatcagtggatgcttcttgcctggatcaggaagaagggggtctgccttcccctcccatggatgaggcagccttgtttgcagcaccatgtacttcaatccagctatccgaggtaccagacacataaacttcacctctccttctttttattactgtatttatcaatgttacaattgttctgacaaacttggatgccttatcgtactgaaaatctgcatcggttttgaagttcttcgatgaaatggatgatgatggaagtgagtaatcgcacttcctggatcacaccacatgccctagtgactcttggttgttacatattgcattgacctcactcctgtcctgtaaactacagacattaggagtgatgccaaggatggtggtcagtgtaatccggcaagccaagagtcagtcaacaagcagtcacctccgggccaatggtatgacccagagcagaactggaaagttgaccaatctgctatgaagcaatcacgaccaaatgaagcattcaactggcaaacaaggcagcaatctaattcaggggcgcaagtgaaggcgtcaagtgcagcttttggtccaggaagacctcagatgtcgcatacggggccgaaatgttcagaagtgaagccaaagcagcagcaagatatctcagtggctcaaagaagaccgaaaccgacaatgcctaaggtaagcgttagtgtgttgtgagcaactcactatatctatttgatgtgtattttgctactattgggctaaaatatttcactgctgatatagcagccaccaactcagcatgatgtaaattcagtccgggccaagctgcagctcgcaaaggatgccaagctggaggctacaaagcgcaagcttcaagaaggttaccaagaattcaataatggtaagcggtttctgttcagccttaggcacccacctctttggttctgtgcagtgccatcttacatagttattacagtatggatgggatgtttagtttagccattgatcaatgcgtagttctgctaatagcaccccatttcttgactggctggttgatgtgatgatgaattatgatcccattgtcgttttgaaagaagaaagatgaatgatgtttccaatttggcgcaattgcagcaaagaagcagcgaacgatacagatggtggatccacaagacctgccgaagcaagggaaccgaaacctagcactcaacggcaagccaaggaacaacaacagcagcaacaacatcaggaatcggctgggcatccgcctctgatttcatccatccacccacccacccatccgttcaccatgttttgttcactaattaaccaccggccgcagcttacaatctggatataccagtttagtgtttctttcttttgggtgcagtaccatccatacatatatgacatacatatctggaaggcgaaaacttgagtcgccaggcaggggatgcactagtgtttgcagccctaacatcttgtctcgggtcatattaactcgtataagtggctcgttccaatggttgacaagcttgtagagagataatgttacatttcatagctatatatatatatatacagttctgggacctgctgagacaccgcgttgtgtgcctttggtttcatggtccgtctggactctttagatggtggtgtgcagcgcagtttctttgtcgcaatgaaggtgtgtggtctccttgcggtgaagaccggaaacacacacatttgccttgcttttgtggcagaaatcgcttgcaatgagcgacctgcc

SEQ ID NO: 3952 - DNA, 4818 bp, Sorghum bicolor
caccgccagaagcaaagggaaagccgataaaagacaacaagaagcaatagaagccgcttccgttggaatccgctccaaacaatcgcgaccacacgatcaaagatccgacggctgaaaaaaaacagggtgacgtagaccctgcttctcggcctggaagccggcggctcatttaggggagaataggagggtcccgggagctctatctccgtgaaaaaaaaaactctgaaatagaactcggtgccattatggaggtgctccgggtgcccttggatcggaacagttttgcaaaagttttggaggcaacttttaatacgaaaggcttgttgcatttctttatattacaaaagaaacatgccgttctatactttggttatttgtgttttccctaaagtaacttgacaatatgtataagttagtcagatgccatacgagataggtaagttatctgaccgacaacattcaaggcataaactttcctgcagaagcaacaaaagaacatgtgaaaacaaggcctcagacagtcatcgtgtgaaataaaaggagtaaaactaaataattccttttatgggtgtttttctattccatacatatgggaaatttaaatcttgacagcctcttgcgttaataaatcagtaaagcaataatcaagacccacccaggttgcaatataaatcaaaatgtattgaataatcaagccccacccagttgaaacaatgtattgaattaacgctcaaatatattgcttaaagatcacactaggccatgaacattttcggctattagtgcaaactatctgaatataggtgccattgatctacggtgatttgaataaaggctcaattggtatgtgttttgatcatgcataaagcaattttgattttgccttgaagaaataaacaatagcctaatttgaagtttgcaagctgttgccgccaccactggtagagagctcacaaatttcactatcccggcaccatgctactactgcaagctaatggttcaaaacatgtgttcctttatttatcagtaaatttctctcgcctaagctatatgagcagttcagtatcagctatattcagtatttttcagggaattcagattaattttgcttcagcgcaattccctggagatttaacaatttgaagtccttcgaattcatgcattcagtgctcttctttgtctcttgccacatatcttgtacaaaggtcgtgctcttcgtgactatgtttgatttcataaactttgcgatcctacaatatcattttcaagttggtatttaagtaggagattctaacattattatcttatcatgcgatccatatattttaaataaaaaatattagctatcccgtagcaacgcactggcacgctacctagtattacaaaagaaacataccgttctatactttggttatttgtgttttccctaaagtagggcctcattttgggtcaacccggccgatccattctcgtgcctacgaaacgtgctgaggatgatgcatgtgtcaccctaacccaccttcgcgtggaggggcaagaaaatttggactggccgttccgcacagtgcgcaacacatccctcttgatcgaggccgtcgcgtcgccgagcccaatttgccgttgtgcatgcatctgcctctgttttgctgtctgcctgtctccatctctgcacataaggcatgcgtgatacatgcattgccttgtgtttcatatttcttcgtgataattcgtccttgatcgattgcgtcgttgtgtgtagtcccttgactaatgcaccatttcctgtctcggccagctgcagttgcttcactgtagatctcgttttggctgtatagtctgtgtatcagctatcacatctatctatctgtatttctccaatcaaccccgacagctgtagattaagatggacgtgcacagatacctacaaggattaacagcgatagcactgttctaaatctctgatagatccatatattaattgctaatgctcacacatgtccatcaccaatatcacttggctattggctccatagtccagactccagaggaacgggtgattaaaaaagactgacaccctactccgtacgtacgtcctaagtccccatggagctagcaccgtcgtcggcgtccttcctcgccgtcgtagtggctgctgccgccgctctcttcctcgcaaccattctccggctccgcccgcgctccacgcgcaacaagtacaggctcccaccgggcccccggccgtggccggtgatcggcaacctgaacctgatcggccggctccctcaccgctccatccacgagctctccaagaggtatggcccgctcatgtccctgcggttcggctccttccccgtcgtcgtcgggtcgtcggtcgacacggcgaggctcttcctcaggacccacgacctggccttcatcgaccgtcctcagacggcggccggcaagtacaccacctacaactgcggtggcctcttctaccagccctacggtgcgtactggcgtcagggccgcaagctctgccaggcggagctcttcaacgagaggcggctcacgtcgctcgagcacgtccgcggcgaggaggtgcgcgccatggtgagagatctgcacgccgcggcgtcggcggcggcggccggttgttctggtggtggtggtggtggcggccgcgcggtggtggcgctcaaggagcacctctacatggtgaacctccacgtcatctcgcgcatgttgctagggaagaagtacatcgtcgacgggtctggctcgccggcgacgcctgaggagttcaggtggctcatcgacgagcatttctttctcaacggcgtgctcaacgtcgcggacatgatcccgtggctcagctgcctggacccgcacgggtacatcaagaggatgaagaggtcggccaagatgtgggaccggttcctggagcacgtgctggacgagcacaaccggcgacggcggcgagaaggcaaggatttcgttgccatggacatgatggacgtgcttttggagctcgctgacgaccccaacctcgaggttccgatcaagcgggataatgtgaaggcgttcattctagtaagcgttactaatccacacatatgcataattgtctttttaggcataggatgatttgttagcgttactaatccacatcatgcataattcaaatacataaaaaaaaaatactacacatactaatagcatgatcattgatttaccgtgagagaaaaatactgctgactgactggcagatttgacacataagctcaagtgaatagactctaaaaacaaaatattttagacaacatagtgagtataaatgctaacatattttagcttggttaaaattaactttggcctgagcacaaaactagactaatgggtggtggtggttctgcatatccaggacctgatgggcggcgggaccgatacctcggcggtgactgtagagtgggccatgtcagagctcctaaggaatccagacgtccttgccaaggccaccgaggagctagaccgtgtcattgggcaggaccgtctggtggcagagcgggacattccaaacctcccatacatggaggccatcgtgaaggagaccctgcgcctgcacccagtcgcgccgcttctgacgccgcggctgtcccgggaggacgtgtccgccggcggctacgacatcccggcaggcacgcgcgtcttcgtcaacacctggtccatcggccgcgaccccgcggtgtgggaggctcccatggagttccgcccggagcgcttcgtcgtcgggagcagaggcggcggcgtggacctgaaagggcagcacttcgagctgctgccgttcggctccggccgccggatgtgccccggcatgggcctcgccctcaggatggtgccgatgatcttggccaacctgctgcacgccttcgcgtggaggctccccgacggcgtggcggccgaggagctgagcatggaggagacgttcgggatcaccgtgccgcgcctggtcccgctcgaggccatcgctgagcccaagctcccggctcgcctatatgcaggcccgtgaccgtgatccatgcagatgcagcagagcctaccttgctcttgctgcctacgtatacatagtactctggatacgatgtcgacatgcatgcatatgtgctctatatatattatgcccacaataaagaagagatgtgatcatacgctcatatttttctgtggttgtttttttttgtgtttttttcacttataatgactcgaatttatgtatcctaaaggaactctccatgaactttttgcttaatccagagatgggaaaatcactgatttcgccatatgccttttaattagcacaagcaacagcatacagagaatccatggatttatttggttggaagaatagggaattaccgtcgaacaattttaaaccgttagtgatagggactaagggtatcactgccagtcttagattccagaatctctggcgcgctagaccatgttagagttctcagttttggaggggacgaagttggcatttgtgtcaaacttggtttttaaccatagaccgctaatctgtgtcgtcggttcatgtacacatattgttaggtactgagaaaaaataaaattggttaaattatttttcacacatcttgataactcggtcatcctccattccgtcctatactctttaggcttatctttatgtttcttttatattcaacgttgcttgactatgtgacatgagctgattttttttcatttaatatcactacattatgtggttttcactggttcttgatgtcaacatcctcctctctattctctaacactaca

SEQ ID NO: 3953 - DNA, 4036 bp, Sorghum bicolor
ggaagattagagagaaagctgagagaagctagtatttttagtgtcatcttgttttttgtgctgtgagaggagttgaaaaataacttttagggaaaagctttatacctatttggtaggagaagctgagcaataacttaggacaaaagctataccaaacaagtctaagaacctgccacaagctaataacaattgtgtctctctcggtggctaaacgtggaggcgaaaataatgatattaaagatataactatcagtgtgacgaatcaaatcaataatgtcgctggtaaaacaggttagtcaaaatgatcatgttataattagttgacaaaatcgcactagatgcctagatctgtccactcgtacgtccatcgaccaccatacgttgatctatcgccttgatatatacgctcaattttcttcgcgtgcgttcctcctcgtacgctcgcgggctcgttcggtaaggggtggatgaaacgaacgggccttaattaatttgatgggtcgtcatcagcacgatcggtatcaccacgtaaagtagagccaacgtacataaatggaccacaacagctatctttttggctgatcgctaacatttttcaccatgcatttttggtactccggagtaattactctcatcttcaataaaccacattactcatgtattcatacttgtttatcagtttgttcatatatttatattaagatactttagatcttaccatgcgaaaaaaattcaaaggaatttatattttttaatatattactaaaataccactacgtactgtagtatatatataataagtataaccatatactctatgtatacatgcatacttaacatatatactaccttagatgatttggtatgatcatatacttaatgtacatacacttcatcgagccatatacatcctaaatctagagatatacacataatacacataactgtaactactactggaagtaaaaaggaattatcctctctctctctctctctctctctctctctctatatatatatatatatatatatatatatatatatatatatatatatatatatatatatatatatatatatatatatatatatatatatatataagttaaatacaatggcggtcctttaacttgcgtgcctatgccacttcggtgcatgactaaaattttacaaaaccaccctctatagtatcttactacctccagcactccttctccaccaacaccattgtccacacattgatccaagactggcctgttgcgccctagtcgcacctacatatcagcccgtcgtgtctcttggcgtgacaagggtggtgctcggcgaggtcgtggccacgtggatcgcggtgtcatggttgtcggtgaaagatggagatgtcgtggtagttaaggcagcgaagcttggcagatgacatggggaggatggcctatcggtggtgcggactcctcactctacatgtagccgaagctggaggtgctcttctccgatgacgccacgtgccaccaagaggtctctcgggcatcgtccaacaaggctccaccgtgggccacaaaatcaaggagttcaggttgtccatggcgaggtatcatatcgctgaagcccatccacaacagcgagatggatgacgtaggcgaatacgcaccggttcatctcggtcctgccagaggggttttaggtgcagatgggtgaacgcgggatgcacaattaaggaaataactatgctagggtgttttttataaaattttatcttagtcggcaactatatgaagagatatggtccttcggtgcacgattaaataagtttagggagacagattttgagtttgtaagtttatgtatctaagtggcacagaggcacaagttaaagggccggtagtgtatttaactctctctctatatatataacataagcgtcatcagcaggtcttgaaaagaagtctaaacgaaggaggaggagcaggagctcatgtggtaggaaggagcaaattaaaataacaatggcggacgcagcaagaggcatggggtctccatctctcccggtggctaacgtgcaggcgcttgccgagacctgcaacaccggagttgacgagccggtcccctggagatacctcagcaaggatcctaccgcggaggaggtcgtagccgccgacgacagcgcttgcgcgattccggtcatcgatttccgtaagctgcttgatccggagtcgtcgtcgtcggagtgcgccaggctgggatccgcatgccaccactggggattcttccaggtatgcgtagtcgggtgtatatatatatatataaagatgaaccatgcaagcatgcgtcaggcatataggagtataagagcaagtattatggtggactgtaagctggctaaatgctgatgtggaggagagaaggaaggagagaagagaagcaggcttacagccagcttagacaaaaaaaccaagaatctttgggagagagataagtaggtcatatattaatagtgaatagttaactattgtatgggtggggctgcaagaagactgtaaagaatcttacatattgatgaggtgcacgtgcatgtgtatattgcagctcataaaccatggagttccggatgaggtgattgcaaatctgaagaaagacgtagtcgggttcttcaagcagccgctggaagccaagaaggaatgcgcacagcaagctgacagccttgaaggctacggccaggccttcgtcgtctctgaggatcagaagctggactgggcagacatgctctacctcattgtgcagccgagggagtcgagggacatgcgcttctggccgacacgccctgcatccttcagggactccgtggactcgtactccatggaagcttcgaagctagcgtaccagctgctggagttcatggccaagggcgtgggcgccgccgacgacgacgacgacccggcggcgtcgctgcgactgcaaggcgtgttccaagggcaggtgcggggcatgcgggtgaactactacccgccgtgccggcaggcggcggacagggtgctgggcctgtcgccgcacaccgaccccaacggcctcacgctgctgctgcagatgaacgaccacgacgtgcaggggctgcaggtcagcaaggacggcaggtggttccccgtgcaggcgctcgacggcgccttcgttgtcaacgtcggtgacgcgctcgaggtacgagtgtacgactacgacggcgtacttggtttggtgatttggtccggccgtttctctgtcgatgactccgcctgtaaacgcctgtgaaccaattattgcagatcgtgagcaacggagcgttcaaaagcgttgagcatagggccgtgatacacccaaccaaggagcggatttcggcggcgctgttccacttccccgaccaggatcggatgcttggtcctctgccggagttggtgaagaaaggcgacagagtgcggtacggaacaagaagttaccaagatttcttgaagcaatacttcactgcaaagctggatggaaggaagctcatagagagtttcaagttagagtagtaaaaacgactctatacatatcattggagattggagatggaaggagattgacgacctctctcaactccaacaataaataaatgatcttgtaacgactagctcaatatattcagccttgaactgggtactgtttggttctctctaaaatgtaacgcaacctcgggtatatgcaattatatatgcattatattaccgttacatctgtttgcttcctactgtccacgaattcaagcaacgatcacagctagctatgactactccccaacaatcgacgatgccgccttgtttgtttggctgataagctatgacagaaagtactgttggttgatttgttgtgagagaaaaacactgcagctgataagctcaagcgactgtgcactgcgtacattatcttgtattagccattgtccacaaattcaagcaacgcgtcatgttgactagtgcacatggagccattggtgcctttcacttcgactagtgcacatgaagccattagtgcc

SEQ ID NO: 3954 - DNA, 5807 bp, Sorghum bicolor
ggaaaagatcagatgcattatctcttataatacatatatttggaatcaagggatgctgcacaaatttactgaaacgtgactgccatgtgtctagtacaacaaattctaattgcttgtgagtcaaatatgtaactaagtatattgttagtaaggtttattaagtgaagaagcttcctaatatttaacataaacaagctttagactaaacgtggatatttcatcattaagcaaaaatccattcaatggaacatttccatttgattggcaaaggtgggtccagtacatagatccataatggattacactcatcaccatatgctgctctatgaacatataatgtaggttgagtactaatccagaccatggaaacagatgatggctacatggtaacgtttgtttcattattttgtttgctatagtctctttctatcaaaagcagatattacttaaaaatatcctttcaaggcagtaaggttttttgctgaaccttcagatccaaatatacgtatgtgtaattactgccagtgcaaggcgattaaaacatcacattctagatgttgatacagccattgttggaatgcataaatcaatagttttctccacttatgttttcagcttcaattttttctaataacgcatgttcacatacctactagaactctagaagctacgggtgtttactcatccttatctctcccaattaaggatcatatgtttacaggctacacatccatgtttactgatcactctctctaatgtcttttcttattgactttattaatgtaaatttctaagctttttgttgtcaggtgcctttcactgcctaaactaatgaataagctcatcagaaattctaagcgctgccagtataagaaactatttctgaagcattgttctgtcaattccaaggtacatatgaacagatgaacatgttgaactgttttcaattatgtaagaagcacttgttagacagcagggtgtggcatgggctgcacttcccagcctttcttgggccctgcactcgcacatgattagcatagatatcattgagatattttaggcaaggagtcgtttctgtttccataagccaaatcctaggtcttccttgcctatatatgtgtgttatccatcaccctcaataatcaatctattattccccgtgtcaatacttgtttacagcacctaacagagaagttcattgttactctgtcttttataatttgtttcgttgcaacacttaccatcctaaagttctttgccttaccaaaaatctattatgttatctgaactttatatataggattacaaatcgtgaaagacataatatgttagactaaattgtagttttttttaaatttctgactcttagaaaaatcatggctatccaatacaaatatgaacgagcatgttggttgttgtagcattggatattagttctcaactattatgttgcttaacaaaccaaaacaaattgtttaatctagtgtgcagtgttctacctttagttgctataatatttgacatatgtatatatgttggtcaaaaatgataatagacatgtataatgacaaactataatatttgacatatgtatatatgttggtcaaaaatgataattgacatgtataatgacaaactaatgattgaagtaatattcttaacagcgtgcaactgatgttgccaagaattataatggcaagacacaatatttagttgaagagaaatcggaatattatgatcaaccttatgttcagttggaggcttataatacacatcagcaagtagtttcctttatttgggcagtgttgacacgaattatacccgagccgttgctaggaaactcttgcagcaagagatctttaaggataaacatttggaagtttattaagttgcgtaggtatgaaaaaaattgcttgaaagattgtattggtgagctgaaagtatcacattattcttggatatcaaatattgaattatctgattgctattgctctgatctaatgaagaaggaaatttggttatcaactggatctgacgaggagaaacttcagaatctactacattgttggattagctggatgttttctgatattgtgataccattactgaaggcatatttttatgttacagaacgagaatcaagaagatatgatgttttctattatccaaagacagtttggaaagacttaactagtactgctattgcttccttaaacaaacaaaacctaaggattttgcgtggtacatccagaaaaaaagtaagacaattatgttgttcttcaagagtgaggtttgttccaaaagcaaaagatatgagaccattagtaaatctcaaagctcaatcaaaaaatgtcctcctcaataattgtcatctgattataaaaaaagtaagggatgagaatccagacaagtttggttcttctgtttttgattacaataatgtgcatcaaaatctctggcattttatttcttcagtaagaagtcacctgaaggaaaaattcaagatatatattgttgttgccgatgtatcaaaggcatacgattgcattaatcatgatatgttactgaaagttgtggatgatgcgttgaaatgtgatgactatgttttgaggaaatgcaaaaaagtagtttgcaactggtctaagaatgccctctaccgttttgattcaaatgtttctatctccaacggtgatggtatatgtgatttctcgattcagttatcatcaaggggtggcattttagttgaccaggtactatatcataacccacatactgtgttacatatacgtattaacaaatttttatgcaaacttttcattggaaactactgaaatggaattataatattcatgaccttgctgtttctgttcattcttataactactgaaatggaattataatatttatgtccttactgtttctgttcatttatctgagtagaattccaaaaataatcaccatcacccagaagcgcaaagtattagaagtgaaggggaaacatgatactttttgggccctatgttagcttagtgatgattggctggtcgcaaacaagttcctaaaaattacggaaggaagtccttcatgtaaaacatgtttgtttgcaattgtatcaattagttttgtccatgtaaaacaggtctcttcctgttaggctgttacatcctaacaatttacagaataaaaggtttggtaagtaatatgcggcctcagatgacatggtttgcaacccaatatagattcttaacttagataagccatgttatgtaaacatgcaatatatgtgcaaattagtagactttctttatttataaatggttttaacattgctaggtgaacaactatagaactattgtgcaaatcaggattatagtagtgtgcaacagctatggcaaaaagactgtaaaaggattttacagctttactttctttttgactaacctccaataatgctaataaaaccactaacaaagtgctaaggaaacttttcctgtcagtaaaatggttctaggatgactgcctgtaagttgattatatagtgatcctgtgacacctttcatgctatagttgtgtatttgcttggtaatttgttcattaactatagtttgagttaaccttttctctatccaaaattagggaaaatttaacaagatacaaaagaaagagattcagtgtttcctttcgaagcaagtgaattgcaatgttttgaagattgggcaaaacttttactcacaacaaataggcatcattcaaggaaacaagttatctcccaaactttgttccctgtactttggtcatcttgaaaattctgtgctttcggaatttcttcatgatagcaagattgattcaaaaaaggacgtttcaacacctaaaagtttattaatgaggttcattgatgatttcatattcatatctttctccaaggagcatgctctagattttttcaataggataagaagagggttttccgactacaattgctacatgaatgacagaaaatatggtttcaacttcgaggttgcaaatagtgagcattgttgtaataggatctacaggtctgatgatggattctctttcataccatggagtggattgcttattaattgtgaaactttggaaattcaagctgattatacaaggtatgccttttggtgtcgggtttagttggtgaattcaatacattaataataagatatggagatgaattttactagtccatctaatttgtgtcaagatactcactgagtagttgtggactagtggctgtttcctctaatcaatatcaacttaaaacagtttggttttgccatattttctgttgaaatcttggctttccttgatgtgattttttttagtaaagtctgatttgcctccatgaattaaaaaaaacccttaagttcaaataccaacataagcccctcaactttcgataccgaacagattacccctgcaaaatatttcatagtccccttaactttcagtgactagctcattgttaaatcagatttgactgttcctttttaccagtttgtgaacaaaaacagtctatccataatatctttggacaacacagcatcaaacaagtatctttgacaactaattttcatagtattgtgttggtaaaaagaaataaaggtacaacactattatattacttaacttgcatatattatattttggaacttgcacacaagaaaaatttattgaacactattttaacatattagtctatatatggcagtcaatgttttggaaatttggctgctcaaaacataaaacatcatatatctgaattagggcagtgttaacagaaaatctaggcagttccgtgtctggttagagatggcatcggggatttccctgtctggtattgcctccctgtccctgtccccatccctgcgaggctaaaaatttccccatccctgttcccgataaaactcacgggggatgttttcttcccatccccgccccctttggtaaaggagtcctggtcatttttcttaaccttttgcctttgtaacagaaacttgattcttcccactaaatcattattatatttcttactacttcctaattttgttcctggtcattttgttccctttgacaaagtttcagaacctaattttgtctaccacactgttgaagaagtaatggagtgcatcttaaaacaggtatctggacatttcctccaccatcactgttaagacacattcttcagcaaagtaccttgagagcaagctacgccattacatgcgtccgaagtgtcatcccattttctttgattccacgatcaactcaccaggcacagtaagactgaatatatatcaagctttcctcttatgtgcaatgaagtttcattgttatttccggagcatgcctgatgccagcattaggaaactggagctactgcatataattaagagaactttcaggtaccaaattatcttcaaatgttttatagtaatgtgtaaatggtgctagattttattatttattgactattaattaacaaagatttagtatcaaatgtattggaagttgctactgtctttcctcgtgatttcatttttttggtgaagcaggtatatgcatagcctcatcgtcaggcgaatccacgacgtggagctgcaatacaatgtacgcccagttctgaagcttaggcgaaaagaaaccatgtggctcggcctatcagcataccttcgagtgcttcagaagaagcaatcacgttacaaggatttgttggcattgctgagagaggaaattcagaggtgtggccatctggaccatcacaatgatggtttgcgcta

SEQ ID NO: 3955 - DNA, 6213 bp, Sorghum bicolor
ccgctacattcctccccgatagatcgcgcgctccgcgaggtttggttcctccgtacgtacggctcgcggcgcattttgtttttcattttccatttcggcaaaaatttctggaacatgttcgtgtttcgttgggggcgcgtgcgggggtttagcccgttccggtttgttgatgcgtgtgtgctcgacgtgggggtggcggctgggaaccgaacgcggtgggatgggtggcctggcctcggtgattgtggtttgggtggctcatcagtgttaagcgtcgttgatcactggggggttagggtttaaaaccgaggccaaggttttggctgttgcggggtggcggggtgccgattgcggggattgctagttcgttgcgttgtctagctgtttaatcgcagtcaatcgcggtggttttggtgggtttctggttggttgtacgagcggttttttttttaaaaaaatgagaaatccatgcaattttggtgggcaactgtgcctgcatgtaatttagttacgttttttccgtttcttcgtttcatgactggtggttgtgtgggttgtggtggatacaatcaggtggattttctgtatttttccatgcgggctgtacaagatttttatttgtacaagagctgacccaaaattggctgcatgtgtgatttgtgtcccttgggatgtgggagcacttgtgcgcggtttaattgttttgtggtggcatggtaacatggaccacattgcttctgtgtgttcgtccttgttgaagtggtgatgtaagcctatattgacttcagatgttcttgtgcatcacatttcgatcagactttttttttgtgtgtgtgctcatgattcgtaagcttgtattgcaattgtggtctggatgggggtggaattgagtcttggttctggaaggatggttaattaggtggtgcattgggtatgcatttggttcctgttggaaggcaggggattaaatgccatgtgtaggaaattttgtttcaatggtttcctcagggttgtgtgcttgttcactgattgataatctttttgactgattatgatgtccatggctctattttgcaacaagatttagtttcagttcaaatttttggtacttttgttgctactctgcataacattcatggtttattgaaataaatataactttccttgcaaataatggactagcagtggattgttttggttacatgttggcatcaaatggttaatctacatgttacttgcacttcaaaaaagaaaatgttgctaatgttttcaaccgtttgacctatgaaaccactgatggttgtatgctttctctcctccaattatgacttagaaccaagtgttatcttattgataccattgtattttcttaactgatgtgctgcttcccatgcaaccaaaatttctgaaggtcaagcgcttgaagggacccacaatcttgcaatgcaagcaattcagattcagccaaacagccagcctgggctccagattcgtaatctcccagtaaaaaagcttggaggggtgatctttggatgcaagcctgaaacaattgaagaatgcttcaaaaaacagctctttggttcgcaaccaccttcataatttttaattccacaattgggtttacagtatcctgtttagttgtggcactattattgggcttggtttataaactatttgatttctcggtttaattagactgttttttgtttgttttgtctcataggtcttccttcagtccattattcatatgtgaagaatgtcaaacctggcatgcctttgtttctattcaattatactgacagaagactccatggtatttttgaggctgcaagtcttggtcagatgtctattgatccatatgcttggagtaatgaggactcattaacaacaccttttcctgctcaggtatcaaactttttaactgattgtttggtggaatggtttaaacagttaggttttctccattccatttgtctcaaatgactgtttctacttttaaggttcgtattcgcacaaggactcggtatataccaatgctggagagccaatacaaaacagtgcttggtactaactattatgatcgtcatctgttctactttgagctggaccatacacagacaaaagctttaatttctttgttcaaatcacttctccctattaatttcaatcaagttccagctgcttcaagcaaaaagagtattgttgtgtctttaccaccaactaaaaggaaggcaccagttctacctgacccaaaaaaagttaaagcaaattcaaaggatatcaatccatttagtgttttatcaaatgcaagtgatggtgttctacaaaactgggttgattctgatgtggaaaatgctagcatcaatgaaaattcacacagtgatactgatgagaaggaatttgaggagccagtttctgattgggaggatttggatgacaatgctctgcaataccagtttagtcctcattcaaatccagatgagagtcaaaactcctcatacaaaacagtttgccaaggaatggagcttcctgaatgtattcatccagttgtcaatcctgtgaatgaagaaaaacacaccatgcttgtacataatgagcataaagctgctgtgagtattgacaaaatagagagtgaagttaataatatcccgggtggtgttgggctacagcctgaaaggcacactatcctgaaaaagctgaaagagttgttttccatacgacagcaggcggcactgtcttcccaggattgtgttaattcaagcccagatcaatgtgtacctgaagaaacaaaggtcaatgcaaacctgtcctgtggcccatttgatggcactgtggaagataaaccctcctttgaggaacaccgtggagaatttgctgaggtgatctatgttattcattatgtttgccttttttttaatcgacacactgtgtctagccctcttacattttctttttcatggaactgtagtccccttacatttttactttcctctgtagctccgacaaatcattgctgatttatccaggagggctgaagcattggagaaaaagcaggtttgtcatttcttccttgaacaatggaaatggaaaattcgttggtgtattcttttgtttgttggaagtggaaaataaatgagttttttgttcctagaagaaataaacaataaataaataaatgactttgctttccctattccgcaattttattcactgggcaatatttaccttttataatcatgttgatagttgatatgattagtttaagcataccagtttctttcaccgagaatctgtaatgttttctcttgtatttgtatgcaccatttagctcatatctacagtgcctatttcatttagctcatatctacagtgcctatttcttgcatttgtatgcttactgtagttttttcaaatctgtttgccttaggaatcctaccagatgaatttatggtggaaactttgttgcacaagattttctaatatgtttacgttattttctcagaaagggtcagatcaagatatactatttttgagggaagttgttaaagattcaggaagaaaagtacagcagctggaatatcttgtagatgagttacaattccgatttgactcttcattgcctcttcttggaagcacgcgcaagccatcgatattcctgataggtggttacaatggcgtgacctggttaccatctcttgattccttttctcctgagaaagacacactgatgggtcttgcaccaatgagtgtcgcccgctcatatgcatctgctgctgcattggatggtcacatatttgctttcggtggtggaggtggcaactcatcatggtataacacaggtatgacatggttttcataatatgatttcactacttttgcatgaccttttcattttttgtggcatgtatttacttctatgtggttgttttcttttgatagtggaatgctatagttcaaggaataacgagtggatagaatgcccctcattgaaccaaaagaaaggaagtcttgctggtatcagtcttaatagcaaaatatatgctattggtggaggagatggaaatgaaactttttcagaagttgagatgtttgatccatatctcgggaaatggatatgtggtccatctatgctgatttctgtatgatctcatcctctctttgcttatactatttacctagcttgatgtcttctaggctctagcccattacaacttagtgcttggaccttgagtcagctatgtttgtattctgattaacctggtgcccttaagaaataagaacacataaagggaataactttatttttgtgtaaagatacataagatcagttatgatgtgtaatttttctcacttttttttatatacttacagcagcatatggtgttcattctctgtgtaaagaattttgcttcatataataataattcatctgatcattgcatcattgtttgcataatttgcctagatttttgtttaattgagcgacaatctatagctacttactcttgtatcttcacaataatttcttacatcagttgtacttattagagtatctcaaagaggtaaatagtcttgacaccaatatgctaactttctcacaatatatgtcacagcgatttgctcttgccgtagctgaattgaatggcaccatctacgcaactggtggatatgatggaagcacgtacttacagtaaggcctccttaacacttcccttcatgttgttacatgatatacagtcacataagacaacagaactaaacttaagaaacacattgttgcatgcagatcagcagaacggtacgaccaaagggagggtgtctgggcccgtcttccaagtatgagcacaaagaggggatgccatgccctaactgtcctgggagaaagcctgtcagtagtttcctcgtctttctggcagaattaagctcatcctggtattgaatcgtggcaatgaacttatctagctgtttgccctgtgtttcagatacgcaatgggaggatacaatggggacaagatggtttctagcgttgagatcttcgaccctcgcctcaatgcctggaggatgggagatcccatgagcaccccaagaggatacgctgctgcagttactctggatggaagcgcgtatttaatcggtggcctgaagtccaatgtgcagatcctggataccgtacgtaactgttggctcctcctgacagttactcctgacaacaattttacctatgatagatgttgcctggcaaacctgtgctctttcctgaacctgaagatggttcctctcttctgtcacaggtggaggtttataacgcgagctccggctggtcagctctcggtttcagttcactcgggaagaggacctttgcatctgccgtggccatgtagttactgatcagatcaggaggttaactagtgttaataacatcaggtttaacatagttgctgcctttcgcaaggaatagtagttagggtaaagtgggtgccgatgtgtattgtgtttggatcttcatcagggtaaatcatccgaatggtatgggagactgggtacgtggcccgtggattgaccgttgaaccctcgctgactgtcagtcttgagaacccatgcatgcattcgctgttgtatgcgtgccactgccacgccgttgaacttagctgtactatcagatagatagtgatacccaaactcacggagtttaatggaacaggatagaatgctgtgcatggggtttgttgcttccttcttttggccttttttttttcaattggtggtggtgatgttacagccggtcgcgctgtaccttatctgtgctgaaactcggcctccaggctccaaccacagcaggtagtgaaagtgcaaaccaagcaggcacatgcaactgctctctgctcagcatgatctggggttgcatcagagctagctcgagtgtggtcactgcgcgcggttattctgttgaccacgcgtccagcatgatgcttatttgaaggaccatgcccgtgtcgtgtcaggtgtccgttacacgtatgtttttttttttttgcagacgtaataaaacatcagcgatgtggcgcaaagggtaagcacgtggtgacgtggcaaacgatgtaaccggtagcctgtacgccgctatgtttgtgagttctgacgatggcaagcgatggggtttgttgcttgtgagttcagcagcagttccaggctccagatcgtgctccttgacac

SEQ ID NO: 3956 - DNA, 5029 bp, Sorghum bicolor
caaaacaactcattttgatatctaaatctattctctacatctgtcatctgtatttgaatgtgttctttatattgatgaagtgatgaagtgatgaatgtgtttgaaatctgcttttaaatctgtgtttattgatatgttatctattcaaagggctatgggctggcccgaccctccatttttgccgtgcctaacgggccagcccggtacgcaaaaaggcccacgggctcgtgcttgggccggaggttagacatgcaggccggtaaggcacggtccgcaggcacgacgtgccccctcggcccgttagacaacgtgtcgtgccgtgccaggctagcctgttgcccaagtatacctgccaccatcttttgtgatagtacacctggttatccaatttcttaatcaaaggagacaattcaaatttcaaaagcttggacatgccaaggggacgtcgggtgacctccccataacctcttccatcatttccttgccccccactcactcctactaaaagtctgtttagatgtctttaaaatttcaaaagtttataaaattctttgtcacatcgaatcttgtagcacatgcatagagcattaaatatagataaaaaataatgaattgcgcattttatctataaatcacgagatgcatctttaaatctagctagtccatgattggaactgtttgtcaaatacaaacaaaagtgctatagtgtcaaaacaaaaaaaaattaatgtaaacacgccctaagcatccaaaagcctatatctcttatcgaaaccaaaagaggtggacaagaggatgtcggacgacctgcatgcagtcccatccttcactcaacttttgtttttcccattcactaatcactagaggaaataatatttgcatttcacatgagggaggggcatagggaggtccaccgaccccctaatgacacttaatccatctcatctctctccatcatactttgctggccttgtttagttcccaagattcttcaagattcttcgttacattaaatcttgcggcacatgtgtggagcattaaatatagataaaaaaagataactaattgatcttttgatcctagttagtccataattggacaataattgtaaaataaaaacgaaagtgctacagtaaccacaacccaaaaattttcgcgtaaacaaggcctaagggggtgtttgggactgctccataaactctgctccacaaactccaccatggagcagctctacaaaaaactggagtttgtggagtacctctttaggtgctctcacaactccaccctttttccttgaactgagtgcgtggagctgaaaccgtttggctaaaaaatgtggagcggagctgaaaaacatagatcggagcagtcccaaacaccccataagtattcaaggagctttgctctgaaatttttctaggaaagcggccaaaggaggggtgtctatcatttctctttgctctatgagtctttgtattacgaaatgctgagcatttaaatttcgaaaatagaacattaggggaccgggtcgggcgacagacacatggtgcctgcagcatctctccctccttatctacaaaaccctcatacaaaggagctcatttgcacacgcaaaaacttccgagcatttcgacatccaagctccctcctctcaagtttagtgctagttaatctcaagtctattcatcctaagaaaagcctaaaaagttttttcagtttttagtagtgttttaatcttgtctatcactctcacaagtatcttatttatttggctgatataagccacaaaatactattaactgattttgagagaaaagccagcgtcagtcgccctctaaaatggtgcgtgtgcacaaacctgccctccgtagaggcgtagatcgactagatccgcgtgcagacgtgcacaaatgtggcggagccgaacccattcgtgtgatcgtgtcgacaccagcccctcctctatataaagccttactctttcgactcgacttcgaaaaccctagaacccgcgccgccgccgccgccgccgccgccgccgccggtcctcctcactgctcgccgcgcgttgcaatggtgatacatctaacctcctcgcaaatttctcgtctcgggtaccatggaccgttgtccgtagctgatacgtagcccactttcctcgcagggtatcgacctagtcgccggcggccggaacaagaagaccaagcgcaccgcgcccaagtccgacgatgtctacctcaagctcctcgtcaaggtactttctatcctcgccccgatcttatggcaactggctcggatttggatacgcccccccatcgcgtgcgtctctcctcctgatttgtgcctgtgtttccgcagctgtaccgcttccttgttcggaggaccaagagcaacttcaacgctgtgatcctgaagcggctcttcatgagcaagaccaaccgcccgcctctctcgctccgccgcctcgtcaacttcatggagggcaaggtctcgcttcggtttccattcagattttgtttgctgaatgtgctttgagggttgatgtcacattgtgatgtgtttgcggtagagcaggagaatcagattgctgtgatagtgggcaccgtgactgacgacaagagggtctatgaggtaccagcaatgaaggtggctgcgctcaggttcactgagacggccagggcccggattgtgaatgctggtggcgagtgcctcacctttgaccagcttgcgctgcgtgccccgctgggccagaacacggtaatgtccacagttactctaatttcgaattcctacagctcggtttaaatgtgtatatgaacaatggtatcaatttgctagtctaggggaggcttactgaagtgtcattgagcttcaattaacagctggttggtagaaatgatttatgatctgaatttttctctgtatggctttgttgagctgtgtggggatgtcgctttatttccgacgctctgcctgcattgtcagtttgatggccatctattcatatactctgtatgctgtattttgtatctgaatttgcagaattaatagttttattgaaaagctgaacatctttcaaattaaatgaactcttgagacattcacattttccttgttatctctcaatgatgagaacaaagcagacgggcggtcagaatctgatgttgtgttgagtgtctgcatttttgtgcattccacttctggaatgcatctgagagtaagaacaaggcatttcacttgcagccgtattgcctgttttctagaaccaaaaatcactctagtcaagttgtggatatattcctcgtatataagtgatgtcttccaatttacacatgattgttgatttgcttaattttgaacatgcacctgcataaattttcttcttggagatttcttaaggccaagaaggtataactggtgcatagatctatatggttgtcttaccagcccattgcattactacatggttgctttggtgccaaatggtctaacaaaaattttctgtcatctttctatttgtttgctttcttattgttggtcgattttatcatgttatcatatcaagagtttttttttggctgatgtgatagtttggtacctttttaagtgttgtttactctactctttccaattttctcatctttgtttcaccgctatgtgataatagaatggcagatgatggataaccttatcctacacactgaatctaatgtgttgaccaatactccgcttattgtctgatgccattagtttacgagctctctgttcattgcttccgaattttgtggactaaaaaggaacaaattgaggtttggttgttttgctttttttttgcttgtaacatttaaatcatcagtgtgttgtgttaaaatactttcatacattcctatctttttgaaacatgaatatcttcatggtataatgggttgtaaaagtatagggtgggaagctgtttctgggttgcaacatgaatctcttgtttaattatcttgtcaaatatttggatgtgcaatagcattttgttaccccattaatgtatgtaacatctgaatctcacaatttactacatttctcaggttctgctgaggggacctaagaatgctagggaagctgtgaagcactttggccctgcgcctggtgtgccccacagccacacgaagccatacgtgcgctccaagggcaggaagtttgagaaggcaagaggaaggaggaacagcagaggcttcaaggtctaggttgtcgccatatctatgtattctgacctggttgaccatcttgtttgagtcatagagttggtatatgatattacaccccagttccaggacgtttgagagctctttgttgtttgtacaccagttcaggatctgcaaaaatttgctcgattggtttgcgccctacttgaagttccaagtgacaaaagcacaatagggtgcatctcattggatccattaatgtctgtttggagaacgtcccatgttatccttttgtgttcgagtcgcattcagttatcctacaaagatgaagttgtgatgtatccactgaatcatacttatttttgcacgtagtttgtcggcagtctgttatgtagtatgcaacactcatctcaacgctaacacgtctcgattaaagctgtgtgtgtgtgtgtgtgtgtgtgttgcccccgttgaaaaaagttctgtagggaaagaacgccttgcgttatgttcacagttttcaccgagctctggaaaccaacggcaattgcataacagggtcctatctaggtttgttgtctatagcatcgcaccatgatgtaataaatggttaagacaattcttggatttcatctttttcacttgaaaaagaatcaaccttgtatagatgacatgcagcaggtcctcttgggtggcacccaaaatccgtctacatcggtctacatcggataaatattagtattcgtattcaaatataaatagtgtcagctttgtccgatagaatacgattacatatccacgtcggaccataaccaccgaatacgagtttgcactcc

SEQ ID NO: 3957 - DNA, 3774 bp, Sorghum bicolor
ctcggcgactcgtagggcgcgggggcgcggggcgcggcgtcgacgcgtcgtgcacggctgcacgcgggcgtcgcggggaggggagcggcggtggctcgcatcgcagtcgcatcctcggcgactcgcttcgcagggcgcggggcgcggcgtcgtgcacggccgctgcacgcggcgaggggagccgggagcggcggtgtgcccgcgcgtcgagcagagctccgccagacgaccagagggcagaccaccagagcggcagagcccagtctggtggtgtgcgacgacagggaggggagccgcgtcgagcagaggccagtccacggcgagcgggtctccaactctccatccgctcctccagagtccagactccgcccggtgctcctgccgttcttcaagttcaaggagaagcatggcgcctggtgagcactccctgctccctacaccttcttgcagttactttttttttcattccttttagtttacattttccagaaatattgaacatgaacttcaaatatagtgctgtactagttgtcgaatctggaatgtggatacataaataatctggaatctggaatctggactagtttgtggcttcataatttctgtccaaaactgcatttctattgaatcttgcataatcttcctatgtatgacactgtcatatacttgtacaaatatagtcatatatatataccggttcaattattttgtggccggttcgatttgtccggttcaaaataatcgaaccggcggttcaaccggttcctaacggttggaccattgaaccattgaaccgacggcctcgccggttcgatttccggtccggttctaataacttggcttggaataggcatctttttaggctttgtattttgttttgagactttgcaaataacctcaaatgcaaaattgatttggagaggcctttggagatgctctaacagcctaggttcaactcctcgtgggaacaaatttaaataggtctagaatataaaaatataaaaaaaataggttgagatttttcctgctgacttgggtcaaaaataaaaatatggtgttggtctgttggatatgaattgaattgagttatttactaattgtatttgatatggttactctatttatcatcgaccattagattatcgtaaaatctgtgaatattcttttctttcttatattttttgagccttatgtttgatatcgatactctatttgtttacacagcatcataaattccgacaaaaattttccattagattaatcaactgagatgtgggcattgcttagctctgactcatgtaacaaacaaaacattcccgtgcattggctagatacacatttctagccggttcggaacatttcttgcgcaatcctacatggagaccagaagatagacacgccagcaccagctagtggctccagtttaaaatgaagctggtgggtctctgtctccttgtcccaatcatccatgtgtatgcacccaggtagccgaagaccagtcaagtctccagtcggaccccgcaatggacggtcatcggagaaattgcccaggcattgccccggtgaccctgtggtcaaagtccatgcgtgtgcgtgatctcacgctgcctgtgtcatcgcgatgacggctcctccgtgcccctgcaccaacggtccggtagactggtggtatcctttcctcctctgggtatccagcggcgacggccagcggccaatccaccggcagtccggcaccgggctccagtgactcccatgctttagttccttccatgcagcttcctcccctcactcttttcaacctttccacaccgccttttccctccccagataactaaccatggggtaaattaacaacagcgcacaattagccggcaccacaagtcatttcctcgcatctttctacctcgctcgtagagaggagctagtgtgcagtacgtgtctctaggtataacaacagcccgcacgcacgaaagcagctcaccaactgtgggtttctagatcgacagcatggtctaacgctgccctataggctggatcgatcgatggcgtcgtcgggcagcgacgtgccggcggcgagggcggccgtggcggtgaacgatctgatccaggcgcgcgacggcgcggcgaggctcagggccttcctgctgcagctggacgaccagcgcgcggcgtgggcgcagctgcagatcgacggcgtcctgaccaagctgtcgagcgcgatgtcggcgttggatgtaagcgatgccgccgggtcggacgacggtgcgaggccacggccgcagtcggggagctcgtgcgggaacaagaggaaacaaagctccagcagaaggtgagcacctcttcatactctaaattactagctttttatacatgtacagctgatcttttgacttgtttctcgttcgttccaattcgatctgcccatgcttaattatttcggcagatcacagcgtccatctgacaaaaagatcactgctaacctggaagatggccacgtatggcggaaatatgggcagaaagagattcaagactcaccctatccaaggtatatatgtacatactacatacttcgtgctcatatgtccagtaattaattccagttatatatatagtggtatggccgaacgaaaggccatcaaacagagatcacggaaccggaacgtgtttgctttgcaggagctactacaggtgcacgcacaagacagaccagggctgcagcgccaggaggcaggtccagcgctgcgagacggacacgtccaagtacgtcgttacctactacggcgagcacacgtgccgggacccctcgacgatcccgctcatcgaccacgccgccggcgcccttgccgagctcgaccgtgccaacaacctcatcagcttcggccccagcggcaccagcaacgacgcaaacgcagcagccgcggccagcaacgccggcgcctcttcgtcgcagtacctgcaggctatgggcgggagcgctgctgctgatcagctgtccacgtcgtggtgcaccagcgacgacgtgttcagctcgtcggccggctcgttcatgcaggtggaccagctgatcggcgccgtcgtgggcggctccgccggggtcgtgacgtcagcggcggcgccggaccgtggcgtcgtgcttggtggcgtggcgagcggcggcagaggcaccgccagcttcccgacgtctccgaacagcctcggcttcgtggtgggatcgcttgggagcatcggcggcggcggcgaggacgacgacgatatgtttagactggatccttagtaaggaactgaactaggggcggcattgcccgtatacgtgaaacgcacggacctgtgattcgtcttggtgcgtgaaccggccatggctgcttgtaaagcacaataaggcctcgcaccagcatgtacacatgcatacacttgtgccatcttgatgccgaatgaagttttgctccggtcactagctagttataaatgtgtttggtttgatctcgatccttcaaccaaagctggcgacctggcgtgtatctgcccaagcgaagcgactaatggcggcgtgtcttgatcaaattagtggtcggtcatcatggaacgatactccattcggccagacgataaacaccgtccgggactgtagtgagaagctccattcggttcccccagacggcatatggaactcctgtgtctgtgtgacggggcgagcaacgatgtgtgtgaggcatcaagtagcggtggctggcctgctgacgacaggaggagcctactcccagaacggcctggcac

SEQ ID NO: 3958 - DNA, 7185 bp, Sorghum bicolor
  misc_feature (3874)..(4304): n is a, c, g, or t
caaacacccccgtcacgagcaagggcggatccaaaggggggctggatatgctccagcccctctatgactctaatttatctattaaattagtgctaattaaccttaaatttttattaatctctagttttaaccttaaatgtttactatatttagccctcctttatcctcgtggatccgccactggtcacgagtctacacgacagcactagaaacttcccatacgatggcttccgcaccggcacaattaaaggaaagaaaccaggaacgcctctgcttttcactccttgtttagttcctaaatttttttaagattccccgtcaatacggcacatacatagagcattaaatatagataaaaacagcagtggtggagcccggatttttatggttacaactcctccaggcaggttcttaactccttctaaaatcaatgtttttggctcttcaggtggaatagcttttccatagagctcctcaagtggagtagattttcaatagaactaaagccgttttagagatcatttaataaaaacagctctagtgatagttttgtaataatttgtaattggtttgtgaggagaaaataaaaaaacgaggccatatttttatgggtctagctcttctataaaaaaaattgactctggctccaccgtacttattttaagaagtcatgtttattgcccatttaatagagctcattgcaaagagtggtcagaagctaggggcagagctatgtgacctaacacataatatagagcatagtatatgaaaacaaaattagataaccaaattaatccatctaccacaaactaccgcctataagaaagtttgtactaaaagaattactccttctgtaatatagtttattctgacattttatcctcaaatataatgcattttagaggatgaaacctaattttatattaaatactttctatttatcaaccaatcatcattaatcaagttgatgaaagtgtctgatcagaaaataaagcaagagtacatgcgtcttttacattttctcttaatttgtcttaaactttatagaatacattatattataggacagaggaagtaccaatttgctaaaatttgtaggggtcatgtgacccgttaatataggctagttttgcctctggtgcacatgctaacaaatttagtactctatccactccaattataagatgatttagctatacattgcttttgttgtgtatctagataaataggtattatcatatatctaaatatataataaaaacttcatattaagaaaagccaaaatgtattataacttggaatagagggaacacttacttacaaattgaactaacttatctaggataattcaagcttagtttaatctataaaacgagtaagatatgtactcaatccatctcaaattataaaccatttgactttttaacattaagtttgaccacttgttttattcaaaaatttgtggaaaatatcacttttttatcgtgtgttggtttattaataaaagttcttcaagattgaattaaatttgactatatttgcatagattttttgaataagactagtggtcaaacttggggtaaaaaaatcaaacgtcttataatttgggatagagggagtatataacaataaatatgtgtgtgtatactgtactcgttattccaataatgctaaatatactgatcaagtgaaaaacatagcaactaaaaatggttgtagttttatatccagagatgggactaagtgcagccaatgatgcgcggaaaattcagggttccgcatcccgtatccggtataccgatataccttgaatactccttggatacgtatccaggcagtactcaggattttggatacatacctgagcgaatatacgtatgggctgaattagatacggcccgagtaacaaaagtgaccttaaccgagaacgcacatcccagccgacccgtagcgccactcaaaaaacggtctttccagatcagtttcggaacaatttctgtcaaaaaccgttggaaatctgttttccaatccacgccctgtcgtctccgctggacctcctcgtcgaccactggaactggatcagtcagttccagccttcccgcgatgtgttcctgcgcctgcgcgcgcctcctccccccgctcttcagccccgctccaagcccaaagcccagacccgccttcccgcacggcccaacgccagcccggagccgcgccgtcgtcgcgctcgcgggcgcagcctcccgggacgacgcgcctgcgccgctgtccggcttcgacttcctcgcgctgaagcgggagcttgaggaggaggaggaggaggcagtggtgtctgtggatgcgaaggaaggtggtggggctgtcaatgaggacgatggagagagtggggcagagaggagtgcgggtggtacgaggaggcggcggcggcggcggcagatggcgaggcgatcggctctgctcgcgaagcaggtgatcagtgtgagctcggcgcggagcctcgggttcgtgtcgcagctctggatcgacgccgcctcggtatgtgagggctgttgctctctgcacttcattctttgggtttggtcgagctgcgtgctgtggcaccgtgtagctcgtgggcggcgattagcatttgcgtttcataacatagttcagttgccatattgatttattcgttttcgtagctgtattattgttaggggcttagggccaatgattacagcctaatgtgcttagtgtaattgctgcactagccttaactctgggtgtcccttaattgagatgtcaagcgtgatactagtgtttggtttaaggaatcacatcattccagatgaggtggtgcatcatataagttgattcatcaattttggtggaatgactccgtttctcatagtagtactaattattagcttgttggaatggagtgatgatggatcaacccgttccattccacaaactgaacaaaaaagtgaggagtgagaagataatggactaactcaatcctcaaaccaaacacccataatcactgacctaatgctgaaaagtgatggcaatgctatgtctattattttttaaaagttgcaaacaggttcacatttgcaggcagctaagctgagttttctatttcaattgtgcactagtttgttttctttcatacaccattactttgatatcaagatttccaagatagataaacttgatctctcatataattagtgatttgtttataggctgtataacatgtgatatggttcagttgtgacttcagcacttcgctcattagagggtgcgtgggtttcaaaagtccatgtattactacaggtagcgtttaaataactttttagacttaggcctgatatatcatcattcatcaatggtggagcagaaaaatattaaaaaaatatatatgtcctaacataaattctgaagtggtgtttgactgcatagagtgcgtttattctgtacaggcaagagataggccggttttccaaggttgggaacaagtgagaagtttatgcaccagttgcggaaatgggtactgacaaaagaggggcttgggtttagtcttcaacttagtctatattttgagccttaaccattcattagtatgtttggtttgttaaagtaaacatcctagctgaatttaaaacctgaaaatcagtggtttgccattcacagattacagacagctccagaggccaggtaggatttcgattccaaattcctcagaaaaataaagctatacaccaaagcaaagatgactatatacattaaaattcactctagcatttcaccatcttcaggtcaacactcaacacatctctgttaattgcagagcttaatggtcaggctcagtacctccccctcccccccccccccnnnnnnnnnnnnnnnnnnnnnnnnnnnnnnnnnnnnnnnnnnnnnnnnnnnnnnnnnnnnnnnnnnnnnnnnnnnnnnnnnnnnnnnnnnnnnnnnnnnnnnnnnnnnnnnnnnnnnnnnnnnnnnnnnnnnnnnnnnnnnnnnnnnnnnnnnnnnnnnnnnnnnnnnnnnnnnnnnnnnnnnnnnnnnnnnnnnnnnnnnnnnnnnnnnnnnnnnnnnnnnnnnnnnnnnnnnnnnnnnnnnnnnnnnnnnnnnnnnnnnnnnnnnnnnnnnnnnnnnnnnnnnnnnnnnnnnnnnnnnnnnnnnnnnnnnnnnnnnnnnnnnnnnnnnnnnnnnnnnnnnnnnnnnnnnnnnnnnnnnnnnnnnnnnnnnnnnnnnnnnnnnnnnnnnnnnnnnnnnnnnnnnnnnnnnnnnnnnnnnnnnnnnnnnnntcgtgtcgcatggtattgtatggtagcacttgccagcctagggcttcctatgattccttacctatcattatatttaagataggatcttgtctatttggatgttatccgaattagttaaggaaatttttgggaggctcgacctctattaaagaggacacacatattaccaatgtcatcaagcatgaagaaagaaaaactcattttcgtacatagtctctgcttatcccaatcaaacatcccagcctctgccatgcagccttcttcctggtgataattatccagatgatccatggatcataagttcataacagtccatatgactgagtgccatgttattgcattaacttttaaatttgaatctccaataactgtgccatgcatacatcccaacattgttgatgctctgcaaccatatgctaaatcttgtggacctggctaagacccccagttctcctcaactaaatagatgagtcctagctcacggtatgcaccacactcagtgtcccctttctttgagctgattggtaggtgtaggaccatctctgcttgtttgaagaaaaccagttccatgcgatgataatgctctaattttccttccttatctgccagtgcaaactttcctaataccttgacctggacccacacagacattgagacaagctggattttttttttaagtttgcagtggcatgggagcggttaatactagaagttaaacctgcttctacagtgagttaggcgttatcataatgacaatacaagcaggatggaatgattccctaatagaagttaaaatgatatcacctctttatgtcgttccattctatttatcttcagtgggctgttgcattggttgaagtgaggccaagcttactttcaggtgaagcagagaaattcctttttgaggacatctatcaggtgcgatagcagtgaatgctcgatttcctttctgacatagccgtttttctattgtcaatataaacatgtgggagaatgtattactttacccagtatgccactgattaaactgatgtgtacggaagaaatctcttttataggttggagacgtggtgcttgttgagaatgaatctgtgatcgataatgaacataaactggttggattgcacagcttggtatgccagctttctgcattggaacaagattcattaaccatgtgatgtgccatcaaactgtatctattttagtggataatttagcattaaacaaccacctctgttgaatgtttttttttctgtatgtacaatttcacacaaaaagggattggctcctttgtttcaagtccctcacaatgataatcttacttgttaggtgggctacaatgtcgtaacttccaggcggcgcaatgttggcaaggtgagtccatgtggtctttaaagagaggtaacctgcgtagttttatttccaaaagcattctaagaatctgcttgaattcttgtgttgaagttccctttttcattccttaggtgcgtggtttcacatttgacatcagctcaggcgccatggagtctcttgagcttgactcatttgggctttcgattgtcccttctagcttggtaattcaactagaaaacaaatcttgttgtgcatacacgcctgctgaatatattatcctgctgctgtctcaatacaccacatacttttttttgaacgcaaaatataccacatacttccctttgcaggtaagcacatactgtttattggtcgaagacgtgttggatatagtctctgatacaattgtggtgcacgaagacgcggtctcacgggttcaacggttaacgcaggtctgcattctgatagatgctaataaacctagaatttgttcctgataattttagggcacactttgagtgaaagcatccatcaactgaattttagggcattttgggcacccaaaacatccacggccctggtggtgagattgacgagtacagtagaattggggggaggaggaggaggagagcaaacggccagggaaagtccggtggccgagaactccgcagggaagcgaggcaccaggatggactattgacacaccgtaccggttgctttcgtgcgggagcaggaggaggaaacttgccgtggtagcattctgttttgtgcaaatcttgtgtagttgtgtgccggaatagtcaataacgtgatatgctttagctgtagtatacatgtaccatatcggaggattacgaattcagaaaagacgaaagggcggtgcccctttcagcctggtcatagtttggtcgctttggcccggtgggttagtgaaaagcgagatggtaccccttttgacttccccgacactggatgaatgtagaggactactatctgtaatcattcagtgatgcaataccctactggtattcagtgacgagtactggtggaggcgacctcgtctctgtcccttttttttttctttttttttttgagaggatcgtctctctccctcttgtccgttgtttgtgtacctttcgcaagtggaggcccatatacacatacctttgtttagctgggccctacgatttttggcactagtagtagtacagcgaccaaccagcttagccatcactgtcctagtgtgaactgagcgcattttccccgtttgatatcgagggggacctgagctgatgaatgccttcactcccaccagattccgccggccaattgatggcaccaccggccggcactcgtccacccaagtcagttcttccggcgtccagccaaaaagatcgccatcgttccacacaccacaccacagtgcagctgctgctgctatcgggtggtgcgtgccgcttctgctagttcaaacggatagccggagacggctgtcgtggaacatgacaagtctatgcccggacccgggccg

SEQ ID NO: 3959 - DNA, 7284 bp, Sorghum bicolor
tcacaagtcatctatctttcagccatttgatgagttctggggaaattgactgtgcaggaaacggttctcatggactgacacggatcaaattgcgggagggaaataccaggtagctgaactaactgaacttctaaacttggagagggctcggtattctcaacctagaaaggtttgcattggcggttctagcaatcggcttggcttgagggcattgcacaaaaagactgggcaccgagcattacaagatccgtaaaaaaacaatggaggatttgacaaatattgcttggttagtggttctatgtgagaactaggtgaagttccccttgccgtgggaattatatgatgaagctgatagtaacacagaaaaaagttcaaataatgtttatgattcatccttgaatgattgctaaagccatgttagaataccgtaaactaataggaataggattacatctttattgacggtaatgcctatgaagatgattatgtttgtaaaatttgattgtacatggcaggaatgagctgtatacgaacaactgatgtgcgcatgcattacagctgattgaggataggaaacaaataaaatcttaatcaatgccataaaccaagttccaaaaaaatgttacgaagatggatagattagactgattggaccaaatgtaaaatatattctactataaaccaaatgtagaagtaatataatagtaaatatgtatagaagctctaccgaggccaaaaaaacatcatcctgcccccaaatcgcttcagatcagagcctatagcaggtacctctcagacgtggcccctgcatcgctgctgcttccctttgttcaggatgtttttcttgttcctacttcctaatcttcattagtatttacaacagtgcaaaccagtgatctccctacttcctagctccgcctctgcccaagatgaaacgattttgcatacatattgccactactctagacgaatttggcatctcatattgccactacacaacagtcaaagaatggtggacacacgttggactgagatccttgatcatactcgtttctgaagccaaatacgccactcaaaagtctgagatccttgatcatcctgtttcttgggaattatggcaaggactgaacgcaagaattcttcagaaggaaagtgcttcagtggttgagctacttgcatagatcaaggatgaagtgagtgttggcgaccatgaatgcatagtatcgtgtcatatgcatggtttggcgccagttgattcgagttgaaccaggctataaccagcggtaatacctcagtgcccagctgctcatggtctgtttcgcactgttgcttaccttgcagaattgaatggttatggtagtacttgcttaatcttgcttacctagtagtaacttactgtacagtctataatacactagtaggattacattttgaagaagagaaacgttataacatatatgaggggatgagaggagtaaattgtggcgcttatggtaagtcggtaacgggcagagctcttacatgcatgctcaaaatagtctcaaattccaacgctaatatttgtgatgctcttcgcatttctgacgtgaatttctgatccatgtgaagctgtctattccttttcaagttccatttgtctctggtccatcactcctcacagctcgtgctgcattgctcctgtctataatctgccataccaaaactgcaggccttaaaaggcctatagatatcatggcattccggtgcctctaccgtccaattaaaaatctcatttcttctctccaagagagaagattccatttcaggacgagcggtcacaaatacaatagataatacatgagctaccagctgtagaattgaaatcttctcctctagtatctcgcgacatagtaggtacacaaaagctgaagacagatgcattgtcatcatcatcgtagcccctctctatctctctccctcctttttgttctaaggaaggaagcacaataggaccagcagagatgtctggaaaagggaagaggcgaagtgctagattgttgaagctggaagagcagaagaacgacggcgactccaccgccgtctgcctccttgatccctggcagataatccggaacagcatttcaggtccgagtgcgcgagggaaaagaaaaagaaatgaagaaatccaggtaaaggaaaaatcgatctgcagccaaatgggtgttttcaactctcttcctcctccggttctcatctgccggatggttttgaagcagttgcagggagaagcttcatgtagccaccaggagccatcatgtgcagccaacaacagtacggaatttcacatctttgtaatcttgattggtactgttgcattgcctgtttagacatgagagtttcatatttgtttttgtttcaggtaacttaccaaggcaaagctcagtaggacagatcattgaatatatcctcgacgagttggagctgtaagctttaggatctcttgttttggcttgtccatcaggcaccgcgtagtttcctattaaatgttaagatttatttatttgtatgtatgatgcgtcttcgtctcttgcaggagagacagacatgagttgtttgcaatgccagatgacatccaggtaagaaataaagtgatagatctgaattgtttgtgtagagtgggagactgaaacaccattcttgatgcgcctatttcttgtttcaagtgaactattagaatgcgaatagcctagaatgaagagtcttagcatatgaagagtcatataacttgttttataaactcttgttcaatgaatggaaactcaagccagttactttcacatggcatcaactaggtacccgttcctctccctgacttctcccctaccttgacgccacgtcgtcttccctgctgcgatgcctctcctcttcctcgccgcgacgccctctcttccaaccctaacctatgatagaagataatgcctaggctgccgccgtcctgcctacagcaatcctcgctgccctaccttctccccctgccccgatcctggcttcgatgcttgccacgatcaatgtcaaaactcatatccccttctccctcaaacttaatccacccaactactccacctggcgtgaactctttctcacccttgtcggcaagttcggtgcgctatctctcacatcgatggcacaccggcacccgaagatctcgatgcctcgtggttggtgatcgactgctccatctgctccctggtatactcctcatcatcatcccatgtgatgcacctgctcatggagaccggcacctccacccacaccatctggaccaaggcggccaacctcttccttgacaacaaggcgtctcatgccatgactcttgaggccaaattccacgctctgtcctagggcgatttgtcggtgcttgagtcactcagcggctaaaagacctcgctgatggggctcgctaatttggaacagcctgtcaacgactccacgctgctgctcgctctccaccacggtgtcaacgagccactccacgacatggcctctatcttgaagacgaagactccgctgccctcattccttgaggcccagtcacttcttgctctggaagaatccgagctcccgaggtacaccttggctgttgcctttatcgtgcctagaggcgccctcgtgatacaagtaaatttccctaagggcacatgtcctcacaatgtagaccacaggattcacactgagattcatgccaagtacgagagagataattttctattgtctctctcctatggtccatattgtgagggcattgtcttgtcctacgtcttgtccctggggccgcgacaagggcaagggaaggggccacatcacctagcgtgctccccgaggagtggctcattctagatgtggcctatgcccggttagggcattctggacgcatgcccgggcatagggccattcgaatatcttcgtccgccgacatcgcttccgggtgctccccaatcgcatcttgctgctgctccttagctcggctacccctacagtgcttacggcttccatgacaacccatcggttggtgcccctgccgaaccaacggcatcctggaaccaggccaccttagccaaccctttcaacacaatgacatagcaacaatccgaaacaaattgttacatggactctggtgcatcctcgcatatttcctcatcgtgtggtaatctctcttccatcaactcctctcttcctttcaattccaacatcattgttggtaatggcgcaagtttacctatcacttgttccggtcaccctttactccctaactccaaccgccctcttcacctttccaatatccttatatctccccatcttatagctaatcttgtttcagtccataaatttaccaaagataattcttcttcagttgaatttagcccctttggcttatccgtgaaggatggctttagagatctttacccgctccttctgccatccacttcacattcaagtgtcctgcttgctgcattggagaccacttggcaccggcgattggggcatcctggcgtccaagtcctctcatgcttccattccaataattctatttgtgttactcctagtgatcatgaaacctctttgtgccatgcctgtcagctgggtcgccatagtcgcttgcccttctctacttacttgtcaagggcttctaaaccttttgagtggattcattgtgactaatggacgtctcctattatgagcatatccgcatctaaatactaccttgtgtgtttggatgattttactcattatttattgacttttcctctcaaactgaaatctaaaaccttcaccactttgcacaattttcatagctatgtgcttactcatgtcaattgtcgtatacaatttgtccaaagcgacaatggtcgtgaattgacaacaatgcagctcgctcattcttccttgaacaaggcattcatctttgcctttcttgcccccacacatccgcagaatggcaaggccgaacgtgtcatttgatccaacaataacatcatgcgcacctaacgactgacgacatgtgtctacaggttactgattatgcagagctggtaagcaggcccggtgactttgcaacattgagacagaagaacaaggatggcatgtacacggcactggagcaatttgaggtccatttcttgtcttgacgcagttacacgtcgttatcctttccattttacggttttaatttccatccatagacttatataaacagaaaaaaaaaaccatccacaggcttaaattacttttttggtttcactcactatcttcgttcactatgccactgcagaacgatgtttacatggtgttccagaaagcgataacgatgaacagccaggacaccgtgcctttcagagaggtttcgtcactcgcctagctcttattaaggtacctgcacaatgcaagaagctaaaggctacagacgaggtcgtcttgttgatttctgcaggccatggcactgctagatcaagccaagctggtgttcatgtccctgaagagcaaccagatgttctcggagtcggagctggcggcgtggcgccagaggcacgcggaccagctgcagcagccgatcacgccggaggggagagagggcggcggcagaggcccatcacgccacccggctgccgcgccgccgttgcagccgtccgccgccacgccgaggaagaggagcgccgccgagacgaagaagcaggagaacgccaacaccggcggcgggaacactccggagaaccagagagggaggcagcgcggcgccagggagagcaaggccacgcccacgccgccgggaaagaaggcgagaaaaggtatcaagccgccgtaaccgcaagccagcgctgtttgtgactgacactgaaatgcacttagctgacacgctgttccgatccgtcggagacgcagcagcaacggcgggctctaacggcggcgccggcccggtggcgacaaggaggctcacttacaccggcgaagctgcagccgatcatggctggcgggcgatcgcggcgacgccggtcttccaaggccggcacgttacactcagcgacgtaagacccactgaccgacgaccactggggagtttgggtggctaaaaaaaaaaagtctctttctgaatctgaagaaattttctggtgcaatgcaaatcgtgcagcagccgcaggagcagacgttccgaggcagcctgcagcggttcgtgcggcacgcggggctcaaggcgcgcgtggccgccgagttcagtacgctcgagtgcgtgtcgcgggccaggcacagcagccccgtgccgcagtgctggaacggcttcgcccccggcgccggtttcctcccgccgtcgcctcggcctccgggcgccgccgccaccccggagtcagatcagcaggcggcggcaccggagtgcaagctggagacggacgaggtgctcaagctcttcgtgctcatgggcacgcccgccgcgttcttgggtagagccaagaaaatgttcggccatgatgagccggaggagaaaagcgcagcgaaggagaggcaatcgaccaaggccgccgccgacgacgctcgggcgcgcgctggcgctgcaacggcggccgagactgagcacgggaagaagagcagcgcgggcgagccatcatcggccgccgcgtgcgggccgttcgcgccgcccaagttggtccccggccggctgggcttcggccagttcgcggcctcttcagcacgtccgttcaagctcaagtccaagccttcggcgtcgaatgcttccggcaagaagaaagtttcgtaaataacaacagctcctccatctttgtcaatttgtcatctgtctccatcgatcataatcctgtctcgtcgaatttgaaagatacataataattgggtgatttgccttctagtatataagtattttggaatcgctctgtaacggctctctaatacacgggatgatcaatgcaagcaggtctacaaagtcaaggctgaaattattgttgactgatttattataaaaaaaacactgctggctggcagaaaaagtacggctgaaaaaaaaagaaaactcttcaatatgactaattaacaccgagttatacccattatagctcttcatatttttcaagtttggcggtggggaagatcaaagataggcattatagttcgtatatcattattggcaaacagaccacaagttacaaggggcgtattataactaattaacaccaagcttattgtaggagccttctccttccggacaccacatttctcaaagcattggacggcagtaaacct

SEQ ID NO: 3960 - DNA, 7597 bp, Sorghum bicolor
taatggaaaagatgcaaaaaaggagggaaaggttcaaagaggctattgcaccacaaaaagaggatggtgacaagaaagacctgtcgtctttagcatgcagtacagattatatccagaatcagcggcctgctaggaaacggcggtggggtggcaatagttggatgctggaaatgccttgagagtatgtccatgatgatttcttcaacaaggtgttccgcttatggtactcaaaatcttgtactgttttgtgtttatttctgatggctgggttagggaaacaaaatatagaaaacattagtcacttgaggtacttttatagcatagtatcttgcatagtttaagagtaaaagggttcaacttcaaatgtaacgtgtttgtgtcgggggtgctttcaaaccaccggggaatgatttactatcccctaagatataagatttaaatgatttcctttctgcaggctggcaaatgtttgtgtgtttttggattcaagaacttatctcttcatacactctgaaagtctgaatggcatcaactacagagtttttttttattctgcagcagttgtgttttttctctgattaagacgagttcatggtaaaatgtagatcgtatgctgctgcggctgcctttttgcatttttgtttgtttgattgtttttatatgcttctgcctctgcactgcttctatagttccgtctcttttgatttgttcagctcgcctgtatgtgaaccttgaagactgttggctagatttaggctcccctttgaactggatgatttgtggtcttcctatgtagagtacaaactcttcgtccgtaacttacgtattcttgattcgtatggcattttaattgcaggtcattttaatcttatgtttttcctatccttccgtctttagaatcatgcgttctaagagcaactccaacagctttgctattcttattatgaaggctttttagaatttttatagtagaaaaataggctccaacagatgtgctatttggttttgtaaaatagaaagtttgctatcccttgattttcgttgggcatatatagcccaccactggcactagctaatagcaaggctgttgtaaatttcttcttttttaagaagttatctattttacaaaatggctaaacattagaatttgactactcattttagccaagcttttggagatactctaaatagggctttgaccaaatttatacaaagaattatagatattatttgataggaaacaagtattatttagatttagcattaaatatattttcaaaacatacctatttagagttgtataaatgtttatactttttttataaagtaagttaaacttaaaatagttaatttataattaaacaataattaccaaataaaaacaaaaatactatagtataaaaaactttttacctctccaactaaacaagacgttagtataactctttataatggatagactcgtggttatcccgctcgtttttttagttgcggttcgcagtatggttttattgctacgatatctgattatcttcggtcagtcacgtatacaacttgcggtctgcagtttctcgttgccctgtgcactctgtctgtgactgtgagagagaagaacggacatttggcctcgtcagaaggcgaacacgtgaccagctccattgccaagagaacttgaagaaagctgagacgacacgatggtgttccctgcccacgagaggagttggtgcctgcctcggggaagatggaaacccggaaaccgccttcaggaacagaacacgccgctcgtgcagacagaaatattgccggacgcacacgctcccgactccgacaggatcaccgtcgactggacagtggactcggcgctcggcggtgattcggacgccgaaccgacgtggcgcgctgacgacctccaaccgcgcccccatcccggcctcccgcttctgcccttccaaccccggctacggcaataacggcaccgcatccgcgagggcagtcccgtcagtccaggcccctcgtccttctccttccctctctcaggggcgcgcctcgctcaccctccccactggcgaatttgctacaggcaagcgctccactcgagctcggcccgcatccatggcgatgcggctcctgtccccctccacgccgcccccactcttcccgagccccggcccgaaggcacccgcctccgtctccgcatcgtcttcctcgtacttgtctgtccgcttgcgccgcgcgcgcgcggcgtctgcagcgtctggcgcggccgcgtcgggcgggtccgaccgggacggcggacgcttcgagggggaggcgatgagcggggcattcgacaggggcctcgcggagatcgcgaggaaggtgccgctcttcgagcccgcagcggacggggagctcgccgccgcggccggcgagcggccgttgcctatcaatctcgagctctggctctaccgcgtcaaagtgcacaccaggaagttcgagttccctgaagcagagaagcttctcgacaaggtgagcacgtagagaattatagcatagcatcacgcgttaggcagcatgaaactattaaatgcgcgttgtgcgctcgaactgagagtacttttgggcaagttgttgggttgcgagctgatggatttgatgctctgttcctgaaatctgaacagtgtatctcattctggcctgaagacggacgtccgtatgtggcactggggaagttgttcagcaagcagtcaaggtatgacaaagctagagcggtgtacgaaaggggatgccaagcaacgcaaggcgaaaacccatacatttggcaggtttgcacatgatcagttcatactctccattttatagagtactcctacacggattttttttcctcaaacacgcaggcggaggttagtttaccctaacactataaaaccaggttttctacccctacctatccaaaaccgtttaatttaacccctaggtgatttcgattgttcgttgatgtcacaggacaacaataattgtactgtggatctgcccctgcatgcccctctgccaaaccagcctccgtgtcaccgtgtgccctcgtcgattggctcatccaagaggcaaatgtcactatgtgcccgagcattgtcgctgctgttgcctagggctgctcgtgccgtgcgctaccatcatcacccactgcctcagagccgagccgttccacggcatccgcgcatgaccaccgccgcacagcgagcaccagctacttatgtccaatttgggaaactcggcaactataattttgttaaatttgaagggagcgagttagcagtattctaattgtatgattatgttgttttgcatttagtccaacaacgtaactgacagtttgagcatttgggcttcggttcagtaattgcattccttgcatgtcagctgcttgtctgcttttcttccaaatagatggagagtatagcctattacatgatacatcacacacaccattttgtttgtagggacaacggtgggtctcccagttatagctcttctttaaaattttcaatattaaaagggaccaaaacctcatatcagaatcattttgttaacttttactgacacatctgaaaacataatcacttggaccatctaaagaaataatttgatccttatgactgaattatatataagatgctgaaatcattatccagattgacgaggccagggcaatttttgcctttacaaccatataactatagccttgtttagtttccaaaaaaattcaagattccccgtcacattgaatcttgcggcacatgcatggagtattaaatatagacgaaaataaaaactaattacacagtttacctttaatttgcgagacgaatcttttgagcctagttagtccatgattggacaacaattaccaaatacaaacgaaaatgccacagtacccaaaatccaaattttttgccaactgaacaaggcctatttctgttatatgcatgatgcatctataattcagtcatttaaggataaatccaacaaagcatgtgaccatgtatgaatttgtttttttttctttgctaagcagtgctgggcagtcctagaaagcaagggtggaaatattcgaagggcacgcgagctatttgatgctgctactgtggctgatgcaaagcacattgctgcttggcacgggtgggcaattttagaaataaagcaaggaaatataaaaaaagcacggaacctacttgggaaagccctgaaatattgtggaggaaatgagtatatttaccaaactcttgctttgcttgaagctaaagcagagcgctttgaacaagcaaggactttgttcgaacaagccactcaatccaatccgaaaagttgtgcaagctggctagtaagtatttgcttcataattatcattttctctgcacaaaagaaactgcagagttgccatttctattaaactgtgcatttatgtatgccaattttctagtaggcttgggctcaggtagaaatgcgtgcaggaaacaataccatggccagaaatctctttgaggtaataaattgtgttccctttctaggataactattgccgtcattaatgattttgtcaattccaaaatatatctgagtatctcatgttcttgtgtcagttgaagtgcaaaacaaaaatggcattaatgtgggttcagttgtctttgtctaaatttttcatagaagatatgtctactctctaccaatatgaatataaagcttgataatcatttgttcaagttattctcaacagttgttttgacattattatatattaacatgtgaatgtgatggtttgtcactgtgtggtgtataacttcaattttctagtgcagaaagctgtccaggctagtcctaaaaaccgtttttcatggcatgtatgggcactatttgaggcaaatgaaggtaatattgacagtgcaaggaagttgcttaagattggacatgctgtaaatcctaaggaccctgtaatcctccagtcacttgcactgctggaatacaacttttcatctgcgaatgttgctcgtgtgttattcagaaaagcatctcaaattgatccaaggcatcagccagtttggatagtaagaactttctgcacttgcctcccttatttgactgtaaattccatgaagtttcctttaaaaaattgtttgagaaccattttttctttagttcctatatgatgttctgcatggagaaacaattattttaagtttctgatgttgcttcttgcacttcttaccactaggagacaaaggtttccttttgggagaaagttcttagtattatagtcaacttacaagtgctgtggttgtttaccttcccaatgcaaatgactgcatacgatccaatgatttggggagcagttaggtccagtaaatgatgaattgacaatatttttgttttttgtagttgaatctttgaatttgttttcacgtaaaatccccaacaataaactgtgagataaaatttctttcagatcgccaacaaactgcatctgatatacacaagtaaagctttaagtttcctaaaaggataagaaacagtttttgtattgtttcaagtgcatatgcgttgtcataattgtgtctaattgtatatgcaccgctgctgttttatgtgagtctctcctaagctcagcagtgacccatagatcatactgtaggcttggggatggatggaatggaaagaaggaaatgcaagaacagcaagggccctctatcaaagagctttgtcagttaattcaacaaatgaatgtgctgctcgttgccttcaggtaaagcatatcattcagttagcctggtagttgccaaactgtcagaaatagcttatctttaatgtcattctatattcaaaaggtcattgagtacttgatgaactagtgtatcatggttatcaaatatgaatgcttgcattactgaagaatctagtttactggaactgtatgcacatcggtagaatatattttttttttatctgtgatctatatgggcctaaaattaccaaaatgaagtttgggtgttgatttcagtactacagaggctagtttttcattttctattccataatagttgttgggctgccctgcttttgtaggcttggggggtcctagaacagcgtgctggtaactacacggcagccagaagattgttgaggtcttcgttgaatataaactctcaaagtgaggtgacatggatgacatgggcagcacttgaggaggaacagggagatccagttcgagctgaagaaattcggaacctttactttcagcaggttagttcagtttgccttcagagttacatctttatctgttcttgccatgtgtctttctgtcgtttggaccatgaactataattgttagtgttcagtttatctttgtgtgatatccttgacaatgccactgactgttttctatgctgacagcgcactgaagttgtggatgatgcctcctgggtcatgggcttcctcgacatcatcgaccctgccctagacagcgtgaagaagctgctaaacctagatcagccttctgggccaacgaggcaagatgatgttaaaagcactgccaggagttctgcagctagggagtcttcagaaacctctgcggctgtaggttcagatacccctggccttacgagcaatgatgctggtaacaacgggagggaagcaactaggactccaacaaatgatttcgatttggatcgtttcatcaaaaagaggctggccctcgacccggcggagctggatgccgtgctcgagggctctgacccgaggggtgttgtttctcagaggaggaaacagcggctgcccaggaagccactccctgtcccgtaatccagatcggtctgtctcatttccaccggtaaaatccactaacagtagcaggtatacgtggatatgtgtgaggagaggacgacccctgccgctgccatagcaatcacctgttaattgtcattccaggcacgtgtatgtaattctgccaccatttgtagtataagtctagctctgtacataaattagactctctttatctacataattcccccgagtaattagtcgagaaatattctgataaatgccaatgccattacttcaacaccttatgctagaaatgccagcatagcacaagctacgaaatctcaagagggaacagagagatctatttctgtttattgtaagaggaaggcaagcaagagtcctttgatgagctccgcaccattttacaatcttggtctggactcatattaattgaaggagacatccaacttagtaaggaccaataaagataaggaaaatggagccattaatttgtactggattgctgcttttaatggttcgattgatagttgggccttagacactcagcccataaactaggacggtttctatgttcattaattagttgggcctaaagacaattaaagaagaggaaggaaattgtttcttagatacgaatctacgtctacatgaaaaacaagatatgaagagatgttataagtagataatggagagaaaatatatgtgattggacaaaaaggtattttcaaggtaaaaacacccattacaaatatggtttatatgtatagtgtctacatga

SEQ ID NO: 3961 - DNA, 9894 bp, Sorghum bicolor
ttgcatattatttaaagcagctttatatatatatgcaagagccatgaataggcaccaggaaccacttagtggctcttagaaactattcaccacttaggcaactggacactaataactatgaccaatcacccactaacaccacacacctgtcctcctaatgactagctaggacaatgttacctgtaaaactaaaacaaacaactatttatactttactctatctactgctattgaataatgtgcagggagtacaaccaacagattgttgctgagcagagagatattatgaagaaagcaatagtccatgcaaggagtttctcagtgctcaggatttgcagatttgcaagatatacatttgctaaccatattggtcaatgttatcaagttgttttccatctaaatagtatcagttttgttagttaaaggtgctaagttgggcacatttagagtattcagtcatattgttgggattgatttggtagaaaaattatcctactgtctttgattaaatgatgtaatgttgaaactcttagctatacaggagtagggggaagtaattagatccttggatatagttcagtgatttcttgtggaggaaaaaagaaaatggtcttttagcgtcaggtgaactgaagtgttagacattgaattagtattttcttttttctcgggttcaatgatcagggagtgaattacatgatccaccttttaattttattttactgctttgtcatggtagaaatatgttgctcttttgagttccttggtatatttacattggcaaataatatcttattcttcgtttaaatgaatatatgtctatcacatatatgatgttgtaaaaaaaggaaccacgacaaagttgaatttagcttttttttgttaaaatactgattcatacatgcgtatgtgatgacccgtagcaacgtacgggtactcaactagtataataaaaagtataaaacccaaaacttcctgctcgtgcatcatattactatatataaatatgtttatataaaatattgctgaagcctaccagcagaagcaagcgatcaacgagcttacccacgatctcagtaaagaaatctgttgtatcactaaagaatccaatgtcctgacaaaacactgaccaacatgattaaacaggcatggcatcatctagggcgcaccaaacctgtagcgaccggcaacccctagttaacaaccacccaagtcctaggttgcatcaacgacgtcttaatctaatggatggacgaataaattatgtcattttccaatgcctgtcacgagaagatctccgatccctccagaaaaatcaactccaactctcttaattaatcgatatgccctagtataacatactcctaacaatcagagtagatttcaaccctgcccgtcaaagatagagatgattatgctcctcttcgttcatgttgtgagatggatgagcagctccttcagtttccaacttttccatggtaaccaaccccggcccctgccgccctggggcctcatgtggagtggggacttggggttggggggccgcactcgacgttcaaaacgcaggagtccaccacaagtgcgtactggcgtgggcacagcacgccccctgttggcacttcacagatcacagtggcgcgtgtgaaaagcgcaggtcactcggcgcggggaacacaggaaaaggctgctgcaattggcgctgccaccgaggcctctctcgtctctttctcgggttctctctctcacgtggtatcgcttcggccctcgcctggcctcgcactccagcggtccagccctctccctcactcctccccctcccaccccaaattccccctcagacccgtcggttccgtagccctctccattctgggttttggggtcgtttccacgggttgggtttggggtcggtcagcggcggcggcggaggagctgggaggggaggcctgagatatcctgcaagcgggagtttgggcgcgctctctctctctgcggctggagacgcgcggggtgagatctacgagggccgctgcggcgttctcgcggggccggcggaagagacatgggtttcctctcggcgaagctgctgccgtcgtgcgagagcatgtgcgtgtgctgccccgcgctgcgcccgagctcgcgccgccccgtcaagcgctacaagaagctgctcgccgagatattccccaagacgcccgtgagtattcggttctcctctcctctcgcttcgcttcggtcggcgcgcgtctagtttaggaagttcggcaccggcattggctcttggctggctgttgcggccgcgtgatgcattgtgctattttggatctgcaagttgttcgtaacaaacttccttataaaatgcctagcggaatatttgctctgtcaagtgtgtcgtattctgtcttctctaatttagttttctggataatgtggattttagtattgattgtatgcggcattagtggtcaaatgtatcgctgcttactttgtttacatggtttactttttgcaggatggtgccccaaatgagaggaaaatagtgaagttatgtgagtatgctgcgaagaacccactgcgcataccaaaggcatgtgatgttgctattttgtgacgtattgcactgctacaggatgatgtggttaaccattgcttgtttcttcttcactgcttgcctgcctgccagattgccaagtttctagagcagaggagtcacaaggagctgcgctctgcccatgtgaacttcgtcagaatcatcactgaagcttacagcaagctgctctccatttgtaaggagcagatgtgagtttgccaatttcttagttaccacttgcgcaatacttatggcaatgttaactgttgatgataaggttttgtggcagagttcttatgttgtcctactgtgcacatgtgttgttgcagggcatattttgccatcagcctagtgaatgtccttaccgagcttctggaaagcaagcaggagaatattcacatccttgggtgtcaaactttagcaaactttattaacagccaggtggggcatggcaatcagacatgttctgtgctttaagttttcacataattggtcatcatgatttttggtttgaggtatccattatgattcaatttccccctgcatataagcaggtagacaacacatatgcacgcaatattgaaagcttggtacacaaagtatgtgcgctttcacgtcaacagggacaggagcacaggcttctgagggcagcaagcttgcagtgcctgtcagcaatggtaatacatagttcacttctttcctccttttactttcctgccgctttctggcagttttttcctgaggtttaggcttactgactatcataatgtttccgcagatctggttcatgaaggagcattcatacatatttgctgattttgatgaggttgttgcatcagcattcagctttttatagcattgatctgttgtgaatacttctgtttgccttcccactatcttgcttgtttgtacagcttattttcatgcttacaaataactagcttgtcttgcttcgtgtcagtcttctcttgcttgagttgccttgtctggatttctggaccaaatactatcaactatttaaggctgcaaactattacattttttctttgcttatacatggatgttagcttacttttttggtgttgtgtgttgaatttaaactgataaattttgtgcctacactcttcttaggttttgatttgtggtctagttccttggtcttgtgttgtatcaaactccttttattttaataaacagatacacaagccttttgtgcatttttgaaaattattctgctgctgattgaagttttgacctgttcttgcattctgtttgaaactttttgattggttgttgaatgcatttgatttcagtatttcttgagttcagtgaaacaatgggaattgaagatttaatgtcctgtggatttggcagatggtgcattcagtgttggaaagttataggacggaggaatctaatggcggtggtgatgagagacatgcgttgcagcataattgggttgatgaaatagcaaggtctgagtgtagatctggcgtaggtggtggtaatgatgtgaatattaacactacaactattaggctgcgaccagcaagaaattcttcagctcttaccaggtaaggcatctttagctggtatctccctctcatgaactttctgctgaaaatgtacgctgttttctcgccatgcgtggttttgcaccatggtattttgttagtcttatattcatctcgagcaataatgcacacctttcttctcatttgtcgaacggttcagtgttcagaccttaaccgagatccgatagcatgcttatgctctagatgttatttgatgtttttttcatccaatataatatctttggagtgtatagacatggtagaggtggagatctgatagcacgaagatgtagatcaattctgatttttggatctgtgtgctgtaagctgtgtccatttgggcatgtaactattgctcagtgaagcttaggttttgtgttgtctgttgcttggttttggggacgaagcgttctgacgtctgtgttgcgcatgctggctcttgtgctcagatgtgcttggtgcgttttaagtagattttgatttcgtgatcaagcgatgaacacttttgtaatttcattgctgtgaggtcatgaaatttgagcttcctgtcgtggaaaaatagatcaattctgattcctacactatggcttatttgtttttctataacattcttactaggttactgatatgaaaaaaattacttgtgaaaaagcatgtatcacttaaactaatgtccaagatggctatagaagaatgtcctatcaatgtaaataatttagggtctttttcatattttgttttgtctagtgtaaattatatataaagttcttaattgtacagttgtactccattttcacctaccctagttcaatgtacacaatagatcatggtttgttttaatggaatcacagggatgaatgtgactccccagaagtatggtcgcatatttgtgtccaaaagcttgcagaactggccaaagagagtacaaccatgcgtcgcattttagatccaatgctttcatactttgatatgaagaaacagtgggccccacgacatggattggctttgcttgttttgtctgatatggcttatctggaaaagagttcaggtattttgtctactcccaagaagttttgagttcagaaattagacttatatgacaataccaagcaacattatgttctatttgaaatttctttcaaatatgtgtacatggattttgtgagggattttttctccttatggtactatcgagtatgtttttggttttctttgtttcctacatattgccaacatatgcaatcatctttcccagagagtacttaactccacaattttaactattatttattagaatagattatctgttttattacaatcagtccacatggaatatgtggaccatccacattcttcatcacattatcctcaaaactcagtatggtgtggtgtcaccctattactgaaaatattatgatatgcaccacaacatcgtttccctatgtgtcctgtttttcatcgcattatcccacaactcaattaggtcttgtcttacaggcaatgaacagctgattctaaccactgttatccggcacttggatcacaaaaacgtttcacatgatcctcagacaaaatcagatattattcagacagcaacgtccttggcacggcaacttcgatctcgaggatttgctgttgaacttgtagtggcaggtgacttgtgcaagcacttaaggaaaacactagaggctgtggagtcaggcaatgttgaagatcagaatttgaatgaatctcttcagaatttcttggaggactgtcttatggaagttgttagaggagtatgctctgattaatttgctctattacttaactgatattgacatttcccatttgtatacctgttctttcccccacttaatttactgttttctggaacttctattagatcaatgacgtgcgcccactctatgatatgatgacaatcacattggagaatttgccttgtatgccaactgttgccagagcaacccttggaagtttgctgatcctatcacacataatctcgttgacatcagtatcatctaacagtcctatggtcagttgacagatctgaatttaagctaacttccacattacttatatactgtttttttttactatggaacaaataatatcccctacctctctccctgcgtaatttccttgtatttgtcaaaatcctgtcttttgaccatcatttaccatctttgatttttttctttctttcttgtgtctaggtatttccagaagcacttctccagcagatactgaagtccatgatacatactgatattgacactcgtgtgggagcacaccacatgttttctgctattattgtccgagggccaagccatcttcggagtgagtcggagtacctatatgaaacaaaaaagcagtctcggactacatctgtatttgcttcagctactgctctactggagaagttgaggagagaaaaggagagtttaagttcagataagcctcgaaatatcgtgcatgatgatgtgaaggaaatgcatgaagaggataaacggaaaaatccagcttatttctctaagctggtttcctctttcattgaaagatgtgcaaagcgaagtagctctgtagaggtactcgcaaattaccactgaattccccaccccatcagtttatttttatctctcttacaaattttccttttgccgtcagctgtgtttattaatgtgtaacactaacctcttccttgtgcaaatgtttcaggagaccaatattgccatgctaactgaagatcaaaccaaccaattgctgtcttcattctggattcaggccaatcaaacagataatactccttttaattatgaggccattggccattcatacagcctaacagttctttcttcccgccttaaggtatggatttgtttggaagaaaaatacccttttgatgttttgttaatgagacaacaacaaatttcacagaagcacaaagttgtcagtcttctctccacgtttttgggcaacaactttattttataagagattcagtagacttttgtctgtgatcccttttcccaactccaataaggcatcattgcctttgtttaataacctcatacttatgacagttttattttctgatgttcttgatgctacagaattcaagcaacggcaatatcattcagtttttccaattgccattgtcccttcgaagtgttgctctaaccccgagtggtatgatctgcattgtcaaattttatggttttcttagccctgcttattgatctttctcatgcaaagtcacatgctttcgtttatgcaattttttcagaagttgtgccggcttcttgccaacggtctatttttacattagcaatgagtatgctggcttttgctggaaaagtttgtcacatcactgaactgtcagacttgctaaggtgtttttcatcttcccaagtaagttctggtgcagaaaataataagatattatgtccttttcacacaaaatacttcatgctgtatctccttgatggtttttttcatgttcccagctatcttatagcagcttctgcttctgtaatattaagcaaatatagcattggtttttcatgtatgattagtgaaaatgtattattaaatgctatgcagatggacccttacctaagaataggtgacgacttgcaactctatgtaaggttgcaatcggatctaggcagctatggatctgaaagtgatcaggaggttgccaaatccatgctttctgactgcaggacaaaagtagggattaacgatcagcgagtgcttgatgttattgcctctgcactttctaatttcattgaggttagtcttttgcctggtctgtgtgatgttgccatattttgttgttggcattgcatgctgttgtgagccttgtttctctaattgaaactgcattaccagatgggcaaggatgtactagcaaaggagctcgctgagatgttcacacctgaagagatgcctctgtttggttcgaattcagcacttgactgggccaacttcaatgcacaagcattttctgatgaatccctttcttttgatgaggtgggttgcttacattaaactctgaacggtctttatggttcattggatgaaggcctgtttatgtctggattgatacaatgttccaccttatttttcttcccatcatgacaaaaaaatgttttagatcacctcacaagtcctttgcattgcaggaatgttcaagaacctcttcagtagattgtggcttgcacgagtcaccaatcaccaacactgctagctccatctcaaagattactctaccacagtcggttccacatgttttaggtgtcggtcaattgttggaatcagtaagtacttcaaaattcagttgacttgttactcatctagttcacatttgtaccaacattgttaagtatgggcatttaggcatccttgtatgttttatacattgctttcccctatctctaactgtggcatgatggtattattattatttattatatcacacaaccaatttattttgtcactcaaccaagttaccagtttctgactatcagtttctgttatcaggcgctacatgtggctggccaggttgcgggtgcatctgtttcaacctcacctcttccatatggtacaatgactagtcaatgtgaagcccttggattgggcaccaggaagaagctatcaagctggcttgtcaatggacacgaatcaaccccggacaatcctatgccaagtcttcccactgcccatcattccatcattcccaaggtatggagatggcacatctgaaacatgtctcctagaacgctgttatcatgtatattgttctcacacaatctgcattcgtccaggtaaaccctgccatgttccgcacatcatctgaaccatgttctgcagtaaagcttccacctgccagccccttcgataacttcctgaaggcagcctatcgcacccagccggagctgtgaactgtgatcgactgacctaagcaccctcttcacgagtgctagactgcgtaccaaagcatagggtactaggttatctaatggaacacttatctattatgacgtggttttagttgtagtagcgtaagtatgtgtatctatctactaaatgtctgtagcatatgcgtatctgtctcttatgactgtgcctctagtctgtagttgtaagccgtgagctctgtgtcgcctgtgcagactgagttgtatgagaatactactccgtatatgtttggcactcctgtatgcttgccaaaacgtttgttctgaggacttcattttaggtattcttgaggcagagggagtttagagggagctttgtatgcttgcgaatcgtttgtcgtaactcgtagtgttgtgtgcataatctcggtaagggcttgtgggtatccccactccccagcaacaatttgatcggtcttgtctagaatagctggagcacttctgctagggagctttgaaacagctgtttcattctgccgatgtgagtcttgttcctcttggggcacctgaagtcgtaaggaataggatatcaccggaatccactgtggccatacaagatacatacaacccctacaatctatatatatactctataaagttctttcttggggcatgagtttgctatatctttctattctcggacggttttcctatatcttgtttgcactattttgagaaatctggaataaaaaatgattatgtttagataaccaattaaagaagctattagagggggtttttttaccaaaat

SEQ ID NO: 3962 - DNA, 3165 bp, Sorghum bicolor
attttttttttcttcgttcgtcagggagcactgatggcagccgtacttcgcttgcatgccgtcgatcgaccgtcgtcgctccatcgcggccatgcatgaaagctagaccgagctcacggaaactgaccggccacccgtcagcagccagctgctatactagtcaccagattccgtcgatgacgatgatttacggtggcttttagcgtctacgtacatgacggcgatcatcctctcgaaaggaggcatttcaaatcgacgtcgacttactctggccgagttccagttggagaaaagagacacgtttgctggtgactttgtttggccacggtttgtcggtttcgttggttctttcccctggcacgccacggagctatcgtacaactggtcagttgcccatggaccacgtacgatgaaaatgatgttcacttaaagaaaactactgcgctaaccgccaatcagggtggactgaaactgaaaggaagccgtacacgtactctatactctgcagtcccgcagaaatatgcggtgcaagtactcctagttgttccaaactttcattcaaccaaaaacgataaggaaagaaactgcagttaacagttcaccaaaacttcattgattagaattaaaccctattactaggtgatgatatgatcgcactttcatatacattttgatggttggagtttatgatcatactttcattatttccatatactttcattttagagtcatggcgagcgagggtctcaaatgacttaactcgcctgagctagtcaaggatagtttcatctgttgtatcattcatggacatctttcgttctatgttgacttgtaaacatgaaaaaaaaaattgctctctatgtatctatgtgatgattacttaattgtgaaagcaatgtgtgcgttgttccttggctgcatgagacgcatataggagactatatcgggattattctgctttaaactaggttgtttagaggatgataatcatgtttaattaaggtaatttagactattcctgaagggaataccaatagtcctaaaaatgatattttagcgatggtacttctctgaaaaatctctcgcccgaaatgacaacctctttggggaaaaatcataaaacctcaaaaaatcatttctagaatagtactgtatgtaatagtagtggtgaacaatgacaagaggctagagacggatctgcacataaagatccatggcaacatgaccttcagtttcggtcaaaaaacatggccttcagtcctttgtcctagattatttttaaagatcttattttatttcccattgttaaaatgtccaaaatataattggttccatccaaacacaggatcaaaacaaatatggcaaatctagctctaacttatttcaaagtatcaaatcacaaaacgttgctttagactcaaaatctagctgccatgagtgttgcttacaatcattctactctctccatcagaaaagttaaattagacaaattttaatcaacagttaatcaaattatatgcaagtttaggacataataaaacttacatcaatattttttgtgtttgaagtgccgctaaaatgacattgttttttaacaattaactgtatatgataagagaaattaatggttagaatttattttattgattttcccaatggtcaaatgcatttgtcatttttgaacggaacaaatacttattactagtgtaaaagttgcccaccaaacaataacagaggttagaaacttagaatagctaggacactattacttaaattgacttgttaacaacacaattaatgctttgagttgaatagcgcagctcaattagccatggaaataacaaaaagtttagtaaagggaacgagctttctagaatgaaaatctgccgtggctgatctgtcaccacacgattggcaggaaaaggataagaggggaaacctcataaaacggatcaccagcccaacgcaaccaaaacatttttctcttctctccatcgcttctcccactcgtcaagccatggccacctcggtctccgccgtggccgccctagccgttttctcggctccaagaagcctccttcagcgcccggcccagctgccgtcccgccagaacgtcgtgtcgttcttcgtcgggccggcgcgggcgcaccgccggttggtggccgtggcggccagctcgccggccacgccgccggatcttgccaacaaggtgtccgagagcatcaagcaggccaaggagacgtgcgcggatgacccggtgagcgccgagtgcgtggcggcgtgggacgaggtggaggagctcagcgcggccgccagccacgcgcgcgaccggcagaagggcgtcgacccgctcgaggagtactgcaaggacaaccccgagaccgacgagtgccgcacgtacgaggactgaaacgcgcgaggctggcctccggcttccgccatcgctgtcgcttgatctagctagcttggcatgatggcaatttgcaggcatgcaatggatgatggttctgccccttcgtcacctttggtgcttgagtttggtttcttcgtttttttagtctttggcttggtgtggaataaagcgaggtttgttatttataagaaacatttaggaactcctaatgtaattccaagtaggatgtaatccttagaaatatatttgctggtgtgcttctggtacttgattacactatgtgctagtccaatacatgtctcaatgatactgcatgtcagaagtagcactaagaaatttgagaccgagacaaagtatttgggacgggattgtttacttatatcccgcccaattgacactccaattcacactcgactttacttttgctagaactaataaggtgactacttgcaattatgcatgaaagggaattcagttcaggtgaaaatcttctctcccacaccccaattcacactcgactttacttttgctagaactaataaggtgatgactactttggtataattttcaaagtaaagaattggtgtaactaaaattttgagtgtagggaaggaatattctacccaattcttacagcacatttgatctaggtgtagaatttctgtaaaacaaaggaaagttgcttataaagctcacaaaaattgagtgtaagagggactttttcacctgagcatgatatagcaattctgatt

SEQ ID NO: 3963 - DNA, 2798 bp, Sorghum bicolor
atgtggaataatgaaaatggtagggagtttctttgatttggatgtgctaaaggttccttagtatcttaagatttacattgtggagagtcaaaagtgtggccttactatgtgtgacagtatagtatgtagcatgactgcacaaatccttatcagtttatgtccactttctagtgtagttgcaattctaatataatatttcacatgcatttaggtggaagaacaagaagaatgcagcagcataagcaatgcaaggaaggaacaggaaaatgaagatctaagtcccctatctgtgcttgaaccaacctctctaagtgagagttgctggtcttctgagtgttcaggcagcagcagtggtaagtcacctaacatgaatttctgatatttcttgaactgttgacatttttttttacccctgaacattaatcatttttgtctcatgacagggggtaagggctattcatcactttttgatattaagaatgcccaagggaatttcttgattaacccagcatcagttgatattgaggcaaagacaacagactcagcttcttccgcatcagtagatacatcagatatttctgatgtcacccaatgttctaaaagatcaagacacacagagctggagtacattgcagatgtgctaagcggtgtcaacttgacaacagatgaactgggatcactctttgtcaatcaggatacatcagctttggaccccctcctttttgagaaaatggagaatatgcatgtgtatacacaagggaaggagcctttttgccgtcgagggtacaggcggctgttgttcgactgcgtaaatgaatgcctggagacaagacgcatgacctacttccgggcaggatatgcagcatggagcaaaggagcagcaacgctgagccggggcatagaggccgaagtctgcaatgagatcaccagctggaagagcatgggagactggatggaggatgagcttgtcgacaaggacatgagcagtggactgggcacatgggtcgatttccgggtggaggagttcgaggctggtgaggaggtggagagccacatactgagctcactgcttgatgaggtcatcggcgacatggtcgtgggacgacggcaggagtgtaaatttgtaatttgagatgaatcctgtagttgttgctctgtaattttgtttcattttgttgttatatatcccctatttattctgtcacccaagacatgttgttcaaatcaatcaatgataaatgttatttacccaatgggatggatagatagttcatggatcactttcagcttgattactgaatgagcttttgccctgcatgacatggtttcagaagtttttacctctgtcatagggaatactatggccgtttctacttgtaattcaatcaagacttccctgtgtctgctgctacaatgcatttaaaagggaggaaagcattgtgttatgcctccctcgctcacattgtggtgcgttgcgatggacctgtaagtgtcagaataatgtggctggcctggataaatcggcgtggcattatagcataatgtgacaggtcaagccggtatgtcagaattattggaatgcagttggttttatttcttcaggtttgatgtaatgtttcattgctctgtgttacttcagatattgtagatgtggttcagagcgtatctcccacactcagtgtaagtatcacttgatcttttaccaggtcagaatacaattacagtgatgttgcttataatttctcaactcacagatttaagtccataaaaatgtctcaaattaattctcttaagttttgccatatctatctaaactttatattttgtgatctaaatttaatatagattaatgaaacaatattggcagtactagattaattatttaaaataataataatttcataatttaaaattctttcgatttaagattattttttatagatattatttctaataaagaaattatctgttcctaattgactcatttcatttcttggcagtggcaaaactgttagtatttctctttgggatgatcttgctactacgactggccaagagcttttggacatggttgacagttctcccgtcattgcgatgaagagcctaaaagtatctgacttccaaggtatgtcatctaatctctgttcaatcttcttcctggaaataagtcactcaaagtgtcgtgataactgtggtgctgaaatttgtcttgtaggtgtgtctctttcaactataggcaaaagtactcttgcgattaatccagacctacctgaggctcagaatcttaaatcatggtagtactttcctgaatgatgtgagcttgttgtatgtttttaataagtatagtatgcttagactcgtacaaaatatgtcaaataggttgactctaaaggcaaagatacttcactggcaccaattggtgcagaaatgggtgccacacggaagtccatgtattctgatagaatttttctgtctcacatcaccagcgatcctgctatgggccaggaaaaggtactatcctgaatattcactgaaatatgatagtactccctccgttctaaactataagtcactttgacttttttagcattatgtgtagatgcataacaaaatggatgaacaaaaaaagtcaaaacgacttagaatttggaacagaggaagtactatttatatcttttaacggggggattgcaaatttggagaagccccaatttgacttgtttttgctttgcagcctgttttcttcagtttgaatgccatcataagccacatcaagcctgagcagcatatgtggtatc

SEQ ID NO: 3964 - DNA, 6722 bp, Sorghum bicolor
ttttcatgaaaaaaactaactatataatttgtgtgtattttgcaagacgaatcttttaaatctaattatacactgattgtgatagttacaacaatacccaaaacttttcttttcgcgaactgaataagacctaagttgaatcgtatgagcctaggtcaaatacatttttgtctaaaaaaattaaggctgcattcggtcgtctgagaatggtgacttggaagcattcctactcgaagttcttctctagtttatatagtcaaactctcaacaggagctatttctactaggaacagccttaaccgaacaatttctaatatagatgctcacatatacacatgcattttctcttatataaatacttgaaagatatatttcaccatgagaatcaactaagttaggtttagctcaccaaacaaaacagccagctctagcttctccaaagagaatcactcccaaacaaccaagcacacaaaatgccaactgattcacgtggggattaggagagaatcacttctctatatacattaagaactgggagctaaagaaactttcactttgctcttgttatattctagtgaggaccaacaatgaatcaattttcatcaccctcaccctaccccctcctaggaatccaatggaatcaatcaaagcagtagagctgaataatcagagagtagagctcttcgaaaggtgccttacttaccccccaaggtcccaaagagtaaaaacctgatggacttttcaataggtgacaaaaagaactctaaaattagtttaattatccgtaaacaatacaaacctattggattttgcagtaaggccttgtgttagttccctggaaaattttgtatattgtagtactttcatttgtatttgacaattattgtctaaccatgaactaactaggctcacaaggttcgtctcgcaaataataaacaaactgcgcaattagacatttgttatctgtatttaatgctccatacatatgtcataagatttgatgtgatgaagaattttaaaaagtttttagattttggatgtaattaaacaaagcctaagtaataaaagaacttcaaaactaataaataaaaacactgcaataagagaccaagtacctctccaaaaaagaaaaataaaaccttaaacatttgagtcgaacaaccaactaaacatcgagatcctccagaagctggggccttggaatatatcacttgatcactcgatttcgcccttcaacttcttgggtccactcgtccagattcaaatctcgctggtggcaacgctgggtgttgaactgctgatgcagcaacgagcgtggtgaagcctccccaccagcacacccacatgccacgccacgcaaaccaaccggatccctccaacggctcagcgagacgggccccagctgtcatggagccacccccgtacgtactcccagcacaatcattttcaaactcctcgggcccaccccccagatgtctttgacttgggatctcaccatgaccatctcgcctccgcagtccaatcgccagctcggacgcccaatcgcttgctgttccgcaccgctactccgctagtagtagggcgacagcttttctcgtacggcgacaacccaaccactccgtcacaggaaaccacccgcccgcccgcaaccgtccattccactcccacgcatcaagatccgcgcggcgtgtgccaccctcgtgatcgatcccccccccccgtcccgcacccgcatcgaccaggaatttgaaatgccgtgttcaaaaggagccgttgcccgtttacaaaccgccaggtgggccccgaccccgctcctgccccgcgcgtcagcctccccgctccgcttgggtcgaacgggcagagcggggcccaccggcgccccaatcccccaaattcgaaagcaccaatttctaatctagcgtgcgtttttaataccactctcggatcgactctccctcccagcagcataaatgcccggcctttagcggcgtccccgatctgatgctcccggctgcctccgtccctcctcgccgctgccgccgccgccgccgccgcttgtggcctccgcttcgtccgcgccgcgcggccgcctcgagctcgagaccacgtcggtaagcacagaaacacctgcctcctttctctctctctctctctctcccccctccctctcgattcgcttcacgagtagacgaatgctttcgattcgaggacgccaccactggccttaagattttcatgagttgatagtctgttccgctcaggtgtattttttcttgtttgatctggagcaggctgtatcagtgatttttctctttcttttggggatgctgcggagggaacgctgaggagcggcgaggagttttgattaaggtgtagagagattctaggatctatggggcccgagaagggtggagcgagggttattggcggcggtggaggaggaggcggcgggatcttcaacctatttgattggaagcgaaagtcacgcaagaagctgttctccaactcgcccggtatgtgtttgtaggaatgcctcgcttcctggaagagctcttgtctctgattaatgctttcttaatctggtctcgtgttctgttcgcagaggggtccaagcttgtcaagaggagcgatgaaaccgtgctgtcagggcgtctccacttggtgagtaatctttgggcagtctggctctgaacagcaattcgttgttgctgttatacttgtgaaggggattgcgttcgctgatgtttaggtggatgcttttgtgtagggtgatgaagatgaggggattggtgtatcaagcttcaaggggagcagtgactacagctgtgcgtcttctgtaaccgatgaggaagggcgtgagatgaaggcgccaggtgtggtggccaggcttatgggcttggacgccatgcccacctcgggtgttccagagccatactgcacaccgttccgagacacaaggtcgttcagggacagccacagcctcaagaggagccctgagtactcaatgaatgaccagttcggtcatgttcctcgaagagttgatggctatatcaggaagccattggatctcagagcacccaagatgccaagcagcccgattgaaaggttccagatggaagcattgccaccaaggtccgcaaagcacctaccgatgtctcaccatagattgttgtcccccatcaagaatccaggtttcagttcagcgaggaatgctgcccagatcatggaggaagcagccaagattcttcagccaagagcacaaggcagctctagggagaaaatctgctcttttagcccggcacgaattccttttagagtttcggagccaagagagagcatccctccttctcagaggactgtgcctctgaagccgcaatcatccaagaccgctcctgagctaccagatgtgaggttctccagagctcagcagatgaaccgaagctggaatagcgaggaagatattgtcatcatcacaaattcgtttgattcttatgagattaataatcctagttgttcgaattcgaagaacaacaagggaaagtctatttctttggcagtgcaagcaaagaacaatgtccagaagagggaaggcgtaactggttctgggaggaattcaggattacagaaagagcatgatgagcaaagagcaaaccaaccatttaggagtcagtctaatctccagagaaacaagcagcaaaagaagccatcaacatctggcacttcttcccctgtccttcggcaaaataatcagaaacagaattctttggtaaccagaggtaaggtggcaccaaacaaaactgtctcaacacagcaaggcagaaagctgatggcaggagattcctcttctgggaagatcaagagtggaagcaagatatctaaagctggtggtagaaaagacatcgtggaaagcataaatggtgatagagaaggatcgtcgtcaaacaacaaggacttcccacagaagaaacggttgatagagaggaactccaccaacgagaagggtacatttgtgcctgaaaaaacagtgggtaaacttaagaagcaggttcaacctaatgttgttatggatgagcacattaagtggaacaaggaaagtaaagatactacagatgttgtgtcatttaccttcacctcacccttggtcaaaccattgacaggaccgtccagactggcaggtaagtgggatacaagaagcaatcttgatatggatgcaggatgtgataaagatgattcagataacaaggctgaagggctgtcatcagtgggtctgaactttgtaaatggtgacgcattgagccttctcctagaaaagaagctgaaggagctaacattaaaaattgatccatcaatcacctttacgaggggtgacacatttgtgcctgctacttttaccttggaggaaccaccaacctcttcatgcagcaattggggctcggaaagtggagtatttgactgtagcccttctgaagtgaaaccttctcaatatgattattgcccttcagcacaatcatctacaaaaggccaaattttccgaggcagtaaaataaaggtacaaatttgtttgcattaccttatggtatataccacaacaacaattcctgaatatgacgagtatctttgtgaatagtatgatagcacggcattttacattttgcaccaataatttctttgtgaagtggattttggaaaggatgccatgtcatagtagaatagtgtttctttcactgctcaatatgtttaattgtttatggcttaatgttattaccaaaatcttcttgtgaaagaatttaaggcacctctgtaagctgttctctggtgactattctaatggcaagaattggatttcatcaatgtattgtgtttgacataatcatggagtcatgacatgcaccaacgttttgcaccaagtgccctatgagtttctgcaatggttctcttttctgctagttgcctcttctgtagtgcttgcctctgagctttagtcacagctccttataagtgtacacaaaactctctctgctgataccatcaaagtggaagaattaacatgtagaataattaaaatggcagggagttttctctgttctaacatgtggaataatgaaaatggtagggagtttctttgatttggatgtgctaaaggttccttagtatcttaagatttacattgtggagagtcaaaagtgtggccttactatgtgtgacagtatagtatgtagcatgactgcacaaatccttatcagtttatgtccactttctagtgtagttgcaattctaatataatatttcacatgcatttaggtggaagaacaagaagaatgcagcagcataagcaatgcaaggaaggaacaggaaaatgaagatctaagtcccctatctgtgcttgaaccaacctctctaagtgagagttgctggtcttctgagtgttcaggcagcagcagtggtaagtcacctaacatgaatttctgatatttcttgaactgttgacatttttttttacccctgaacattaatcatttttgtctcatgacagggggtaagggctattcatcactttttgatattaagaatgcccaagggaatttcttgattaacccagcatcagttgatattgaggcaaagacaacagactcagcttcttccgcatcagtagatacatcagatatttctgatgtcacccaatgttctaaaagatcaagacacacagagctggagtacattgcagatgtgctaagcggtgtcaacttgacaacagatgaactgggatcactctttgtcaatcaggatacatcagctttggaccccctcctttttgagaaaatggagaatatgcatgtgtatacacaagggaaggagcctttttgccgtcgagggtacaggcggctgttgttcgactgcgtaaatgaatgcctggagacaagacgcatgacctacttccgggcaggatatgcagcatggagcaaaggagcagcaacgctgagccggggcatagaggccgaagtctgcaatgagatcaccagctggaagagcatgggagactggatggaggatgagcttgtcgacaaggacatgagcagtggactgggcacatgggtcgatttccgggtggaggagttcgaggctggtgaggaggtggagagccacatactgagctcactgcttgatgaggtcatcggcgacatggtcgtgggacgacggcaggagtgtaaatttgtaatttgagatgaatcctgtagttgttgctctgtaattttgtttcattttgttgttatatatcccctatttattctgtcacccaagacatgttgttcaaatcaatcaatgataaatgttatttacccaatgggatggatagatagttcatggatcactttcagcttgattactgaatgagcttttgccctgcatgacatggtttcagaagtttttacctctgtcatagggaatactatggccgtttctacttgtaattcaatcaagacttccctgtgtctgctgctacaatgcatttaaaagggaggaaagcattgtgttatgcctccctcgctcacattgtggtgcgttgcgatggacctgtaagtgtcagaataatgtggctggcctggataaatcggcgtggcattatagcataatgtgacaggtcaagccggtatgtcagaattattggaatgcagttggttttatttcttcaggtttgatgtaatgtttcattgctctgtgtt

SEQ ID NO: 3965 - DNA, 4117 bp, Sorghum bicolor
tggaaccttttacctgtagcgctacccaaaggacaaatgggtcttgtattttgggtgatgattgttggagatagtcttagtaactaaaattttaaacatattgactaaaaggagctaaaatagtttaattctattagtcatctaagagtagctaaaataatttcagctagcggaaccaaatagggccttaatttgttcaccaacacaaggaaaaggtagaagctcgcgtttctcatcgcccgcctgccgccgccgccgccgcttgaggaagtcgagcagatcgtgttatggcctgtttagattgggaacgaaaatttttggggtgtcacatcggatgtgtcggaaggatgtcgggaggggtttttagaaactaataaaaaaacaaattacatagctcgtcagaaactgcaagacaaatttattaagcataattaatctgttattagcatatgtgggttactgtagcacttaaggctaatcatggagtaactaggcttaaaagattcgtctcgcgattcttaactaaactgtgtaattagtttatttttttatctacatttaatgttccatacatgtgtccaaagattcgatgggatggatgaaaaaattttgggtggggaactaaacagggccttagaggaagatgaatggtgacttccacagtgaggtgagctttcatctccgtcttttcttccgcggcgggagcaatgcacagcagtagggtcggagacgagcgatggcaaggaaccgatcgacgacggaaggtgagcaagagtcgctcgcgtgctatttagcgagcttccccgtttatccgtttgagaatttaaagataataacaagaacaaaagaagtaatccgtttgaatgtaaagataataacaagaacaaaagaagaaatgaatatgaactgtgtttttcattgattaatctttggtattttaattatagtggacagacatctcgaattgacacaactgctcggtgattatacaagagttccacatgtcttggtgagaagtggcttttaagatggcttatcccttttaattgatttttatcaacacttgaaaatgtttcaaaaccctgaaaatcttatctatgatttctaaattttcaagaaaaatatttagagcctgttgaattatattagaagcttcgtgaaattagacttcgacgtaggaaaaatgagaaaaatactgaataagtttagaaaaatcacaaaatattataatctatctcatttcctaatctatctcaaatatttcttagacttttgaaaattagagatatcttttttgtggttttaaaatcttatcaattgtctttttttccagatttcttaattaaaagatgaagaaacacttaaataattttaataagtgacggagacgatttatctggttttgaagtttgagaatagatcctagactatactataaccatagttcagaatgcaaaaatgtttttcttttcttcaaaaacctttcagaagttgcacgggtcgtcaatacggagtagcaatcttcgtggcccattaacaatgcactaacaaatagtcagagcccaagtcatcgaggcccacgcagcgcgtctagaaggcaagaaaattccacagtccggaaaccgatcccaatctcgtaaatagccgcgaaccccggtggcgaatcctggagctgtcgctcgaaaatatctcgccgcggccacgagctctggaaccttcactggccccaacccccgacgaccaaagcacacacgcctactcgtatttcgttcacagaaagagatatttttctcacgccctccccgcggaataaaaacttttttttctctcgcatccctcccttggaatccatccatccatccatctctcgccttctcccttccaattcgatgcctttgtagcgctgctgcctcgccctgcgtcgcgccgcgtcgtcgtcgtcgccgcggggtccccccggttccgcttgctgctgctgcgccagcgcttccaacatcatcatggacggaggatccggcaatgcctccggcggcggcggcggcggcagcggcggcgcgtcgacgtgctgctactacgcgctcctcggcatccgcaagaacgcctccgccaccgacatacgcaccgcgtaccggaggctcgcgatggtgagttccgcttgctgtgcatgcgcgcgcggcggcctcgcgccggccggtgtttgattggttgggttctgtgtgtttctgtttcctccctcccctcccgaacagacccgctcatatgttccgatctcttgccgtgggcgcgcagaagtggcacccggaccggtgggccagcgatccaggcgcggccggcgaggccaagcggcggttccagcggatccaggaggcgtactccggtaaggcctagtacctgtttggttatgcttggctttcacgagatttgatcgaattgcttgtttggttggttggcgcagttttgtcggacaaggggaagaaggccatgtacgacgccgggctcttcgatcccctcgacgacgacgaccaggtgaatcagcagagcatctcggtttcgtttctcgtccttttttttcttcttttcttttcctggttcctgctgcttatttgttcgtcgaattcaatcaaatccttttgccatttcgtgcgcgaatattatatgtgcatcatgcatcctaatgaaaagaaaagaaaagaaaagaaattaatttatctgctctgctctcggacggccaggatttctccgacttcatgcaggagatgctggtgatgatggataacgtgaaaaacgaggtaggcgcaacgcacccacccaccaccaccaccaccacgcggatttattatttgtttattgtaattaaccttagcttccgtgcagaagccggacacgctggaggacctgcagaagatgctagaggacatcgtgaacggcgacggcgtgggcgggcgcgtgccgccgccggcggccgacggtgcccggcggacgcgcgtcgcgccgtacccgcagccgcagcaggcgcgcaggtgaccggcgcgccggtgtacgagatgtacacgcgccccgccgtagtagctgcggagtactcgtacgcttttggtgaaagggaccggagaaaggtcagcaagcaacgcgagggaggctctgcctctggaaaaagaagaataaagatttcaccctttttaggccaatctgatgatgatgatctgatgtagatttacgcctcctgtgtgtagcggtggtcgattgtgtaagctgggggttgggtggtgttggataccggcgccgccgccgcaacaactggcggacgcgtggccgggccggggactctgattttttattttaattaaatctcgtcgacatttcgatttcgtgccccaatttttttttttgtccctggcaccctgactgttccatttgccattttcgctcactgatgcgtgtcgtgtgttgcagtccccggcgccgaccggcctggtggccacgttggcgtcttccggtaaacttgaaaagcagccggacgtggccttgtcagtcatggctcagcaggcatggtgccgcagctgggccgacgatggttctagttgcagctaagcttacgctcacgctcacagctcacttgtaccctggcattataatgacggttggggatttatgcagtgtttgcgcgcgtccgcgtcgaaattggcggtgatggatacgggccgcgctctggactcctcccggatccgcatcgcgtacgaacgaaagcgaaaacatggtgctgggctgctggcaaaatcgcctggctgcgagcccggtgccttttcccgctccaagttgcccggggccaggccagtgtcgccgtctggtctggaccagaggattttttttttttcctccgtggttggccgcggaggactcgagtgttcggggtgcaaatgtgacatccatcggcaggcccggacccggagcgtatcacgcgacgtgaatgcatgcgtcgccggtcgagtagctctctctacttgtggtgtggtggtgaaggccgcccttttgggcccctgggtctccgtggtccacggaaacgactcacctctcaccagcggaatgcgttatcggtcccggatccctgctcgcttctgaa

SEQ ID NO: 3966 - DNA, 4459 bp, Sorghum bicolor
cgaaatttatgagacgaatcttttgagcctaattaatccatgattggacaataattactacaaacaaacgaatgtgctacagtgtcgcgaaaaaatttcgtgaaggaactaaacaaggcctgccacttacttttttgggaaaactgaggccttgtttagtgtagcattttcatttgtatttggtaaatattttttaactatagactaattaagcttaaaaattcgttttggaaactacagataaactatataattaattattttttatttatatttaatgtttcatgtactgcaaggtttgatgtgatgagaaatcttaaaaagtttttagattttgaatacaactacacaaggtctgacgtgttcggatttgcagccgaatgcgatccactatccatgtgatgaaggcccttctgtcgtggaaaaccagctttgcacgaggacaccaatctcgcgtgcttccgagtattttactgctccagttacgcctgctgtttccgccacggatgtcggctgctcattaccgtccagtttcacgtcgatacgggctacatggatcagatttcagatagcagctgcttcgccgttcagcaacgaactcataccaaagtgaagtcagaggaacttcgagaaataataatgtgtccagaaaagtcaagttttggacggtgctgacagagctaactatccccgtccatgtcgcgaaacagagccccgtcattcttcatgagatggaaggaatggtcgagaaatggagatttgtggaagaaaaaaaatctgtaaagtcgctactcaatacaacgctactgttcatcgatatttgtcttattttgcttcattacacgtgacattttgtatcatgttgatttttttgcttgatagttttttaactacaatttttttcgcatgatagttggcgacttggtggttgtacctcgtatggaccatatattcttttttcagattttgtattgtggtaacactgtcacagtggcccataaacaatttgtttatggcaaactaatcatagattagctagatgaatttcttatggtggatatccagatacgcggctcaggcctgacggatggaagggctgtttggttgctaggcacagtttgccacactttatcttaggcaagtttgacaaagttggcaagtgttggttgacaactaagtttaggtatgattcttttgggctccacatgtcatagagttaaaaagtgtggcaaagttatggcaaagtgtggcaaccaatttactagccacactttttgtggcttgccacacttgcctaaagttagttgtggtaaactatggcttgcaaccaaacatccccttaagtcctcgacttagcacgggtgctcacattttcctagatttattttagaatttaacggtgctatattttcagtggtaactttgtgaatctcgtgatctgctggctcgtgcactgtgagtgcctatgttgagattgtaaaacaatttaatgagtctaattttcaataaaaaaattgtttatgggctcagtccttcaaaggtgctcgtacggtagggtttgcatacctgtattaatagaggtaagtgtgtgtgcactatgagtgcctatgttgagattgtaaaacaatttatttatgagtcttgttttcaataaaaaaatttgtttatgggcctcatcctttccagtcttggagcccagcaacgctgttgcttgctgctggctgggccaggctatgcgaggccttcttagatcatttccgctaaaaggccgaatcgtcttctctcaaagaaaaaaatattcccaaacgaaaaaaaaaaaattgaacaaacgcagcagcaataaccaccgtccgtcgtcgttgtgctggtgtggctctcccttcacttcggctccaacaccgatgcacaaccgtcgtcttcgccccctgtcccaaatttgacgctgcctgtagcagtataaaaactcgtctcgacgctctttgctaggtactccaatcacaccaaaacacacagtgtcgagccttctattggtgtgattgggggcaccaaatacctacctaaaggcattccattatactgtgtttgtgcgcgtgtgcgcgcgcgcgcagatagggacatatatatagacgggtgaggtgctttgtctccgaccatgaaaggcgccgtcatcggcgcgtcgaccgtcctggtggtggcggtggtcgccaccatctgcgtcgtgtccttgagaggcagcggcgatggcgacagcagggaggagggcgagatgtcgacgtcggtgaagtccatcaagtccttctgccagcccgtggactacagggagacgtgcgagaaggcgctcagggcggctgccgggaacgccaccagcccgacggacctggccaaggccatcttcaaggtgacgtccgaccggatcgagaaggcggtgcgcgagtccgccgtcctgaacgagctcaagaacgacccgcgcaccaagggcgcgctcgacaactgcagggagctgctggactacgccatcgacgacctcaagacgaccttcgacaggctgggcggcttcgagatgaccaacttcaagagcgccgtggacgacctccggacgtggctcagctccgcgctcacgtaccaggagacgtgcctggacgggttcgagaacacgacgacggcggcggcgggcaagatgcgcagggcgctcaacagctcgcaggagctgacggagaacatcctggcgctcgtggacgagttctccgagacgctcgccaacctgggcatcccgagcttccaccgccggctcctggcggaccacgccggcggcgtgccgtcgtggatgcccgacgccaagcgccggctgcggaaggtctcccccggcgacaagggtttcaagccggacgtgacggtggccaaggacggcagcggcgacttcaggaccatcaacgcggcgctggccaaggtgccggtgaagagcgccgccacgtacgtcatgtacgtgaaggccggcacgtacagggagtacgtgtccgtgccccggaacgtgacgaacctggtgatggtcggcgacggcgccaccaagacggtgatcacgggcgacaagagcttcatgatgaacatcaccaccaaggacacggcgacgatggaggcgctcgggaacgggttcctgatgcgcgggatcggcgtggagaacacggcgggcgccaagaaccaccaggcggtggcgctgcgggtgcagagcgacatgtcggcgttctacgagtgccggttcgacgggtaccaggacacgctgtacacgcacacgagccggcagtactaccgcgagtgcgtcatcacgggcaccatcgacttcatcttcggcaacgcgcaggtggtgttccagaactgcctcatccaggtgcgcaagtgcatggacaaccagcagaacatcgtgacggcgcagggccgcaaggagaggaggtcggcgggcggcaccgtcatccacaactgcaccatcgagccgcacccggagttcgagaagagcgccggcgacggcaagctcaggaccttcctggggcggccgtggaaggagcactcgcgcacgctctacatccagtcggagatcgggggcttcatcgaccccaaggggtggctgccgtggctcggcgacttcggcctcagcacctgctactacgccgaggtggagaaccgcggggccggcgccgacacgagcaagcgtgtcaagtggaggggcgtcaagaacatcacctaccagcacgcgctgcagaagtacaccgtggagagcttcatccagggccagcactggctcccacagctcggcgtgccattcatcccggggctgctgccgcagaaccagtctggcaggatacactgacgagcgacatgtggcactgacatgtacgtaccatgggtttagtttgttgggttggagactattgtgactgctgtttatatatatttgaaaaagaaatgccgtgcagaattaactaatgtgcatagtgtttggaacttgggttgccccgaaataaactggtaataagttattaataaaaaaaaatcaaagaagtcatttttccagatatcttggcaatcgaactatcaaacctgacaactttgatcatcataaggatgattttaaagatggctttccctgtatatgtttttttagtaaaaattaagatatgattaaatctctaaaaaaattataaccaattcattttaaatgaaaaagaaacatggggttcaaatccatcctaccccttatttccctatcccaacccatatatcccagtatccccttaaagtttactaccacgattcataacctatttatggttctaagcagcatataatgctataatgtcatcataaagagactcaaaccaaagacagtttagacagcttcccatggcacccaaaaataggttcattgaatgagatcagattccgattacatacagggcaaccaatggaa

SEQ ID NO: 3967 - DNA, 3914 bp, Sorghum bicolor
cacttggtcacaattgggcttggttttggttagatttatgcaccaattgaagacaatgtagcagccttccaccgaacgctgttcgtgttcatgtgcccatccatggcgtgcttgcttcgagatcaacatgaacaatggaaacacaagcatgggaatccatgtagaaggtgaagagagtcctgtatctgtgatggttttgttcagaaatcttctgattttgattgtttgaggtggattgtgttccagcgtgaaggttttccgttgccaattgccacggagtaacaccttctactcagctcaacctccaaagtatgatggctctgacaaaccactgtgtccaggaggtagtgttctcttctgttgcatagcagttgacactatgtatcatacacttgctgttgtataaatatgtgaaattgagaatatatgtttgatagtggcttctggatttctggacttgaattcttgaagttgtttctgccagtgtgcaaccttttctccatgtcaactactacctttgctttctcgtttggaaacattctgtttatttacatttggagtggctagggacctatggcacatgcaaattttgttcaaaagaagtttatttggaagtgtgtaagctttaacataaatataggacaattgctgttttagaactttctgacctgtcacattactatttatgagctataatcctgcaatctgtccactgttgttggtaaatgagcttcacttgtcccttggctgtcaaacagttaaatgttactaaattctttcaaatacttatttgttgccagctcctgtatgccactggtgtggtacctggaaaggtgataaaatttgtagtagctgcaagaaagcaagatactgttctgagaaacatcaggtatgtatgtcgaactttagcgtccatcaatttgtttctgacacaaacatatattttggattattggttcttgattgctgtttctcaggcactgcattggcgtactggtcataaaaatgattgcctccagataataagttcttctgctgcttcaaattcagttctgccagctgtaggaaaaggtgattatgtatggattactaaagctatttgtgctcttaacatttgaattgtgttgtgctcacatttttgtctactttcagttcctgctagcacttcttggctagaatttgagataaaaatagactatgaaggtacttttgattccgatagtggtgatgaaaataactcaaagtcgttggtgatgcaaagacatgggaaacccgatgctatgatgcagtcgtggatggatcaatttgaggttttgggcccattttctttcttaattctctttggaataatctctgttggacttcttatgcatcaatcattgtgtttatttactgctatctgggtaggctgatgctgacaacaaatgctgggcatcttttcaagagcgggtctcaagagaaccaaagcaagtgttgaggtgatatctcattgattgcatgatttctcttccattttaccatgtttagaaatgaatccatctgcattttgccttgtctttttgggaaaatagccctatcgttcctgaatttattacttgcattgcatactttattctaaaatgggaaaatgttgccagtatgtgcataacagtgtattgttcaggtattgtcgagaaccaaatgctaaacataacatgtgtattatgcaggtattgtcgagaaccaaatgctaaacctctctgggccttatcttctgggtgtccttcaaatgctgatatcccatcatgtagctactgtagaggtccattatgctatgagtttcaggttggccaaatttctagttcatgaccacagtccatatttcattatactagttgctccctctgttctgaaacatagtctgttttagttttgcctttcaaacttctcgatatagttaggatcaaaaaaaggtttttacttacatatatgttctgttttccagttaatgccacaattgctttatttctttggtgtgggaaatcaaccagactcacttgattgggcaacaattgctgtctacacatgtcaagggtcatgtgaccaaagtgttagctacaaagaggaatttgcttgggttcagttgtaccctacaaccacgaggcggtaataatgtttacctattcctcggagtaactgctgtccagttctgcaggtttgaaacttcacctatttttgtgttgcaaactaatagtcactttctgtttgttataagtagttaggtctgtttacaggcttaacatgtgtcatcagcttgtaagacaaaggatgaaacatcaataaatcttcaagcaacaatttaggtgttaacaagtttgcagaaagtcagaaaaacaattcagtaataaatacacccatcggtagaattggagattgggatgctcagagcagtgagtagtgagagcttcgcgagtcccattgtacctatgtcttgacaatcatgggtaacgataccagcagacaatagttgcctagtgtagatattataagttccacttgtcctatattttaggtgcctgattttttgttgttgttcaggcaataggcaattttgttattgtttgactatagaaaaagttgtgaattctctcggttgtataagattgttgcctgctcaaaatttaggcctgtaatataacaattcccaaccatgtgcatttatgtgaagtggcttgtagcttcggaggaagaattaagtcaaaacggaatattgcactttaagttcttatacatagatctaagagttcatgactcctttgtccatcaaatgtgttggtcttggcaatgtaatggcttgtaattagtgttgagttggtgggctttatctgtggtattagtgaattgtgccgcatcaagtggaagtgcgagtcaagtaaaaaaagaatcatgaaatgtggatgagaagttcagaaaaattcccaagattaattgcctagtacatcacaagagaatttcaaaaccaaactttatagcttgtttgacttataaaatacaaatcttcggttgccttttcaatcctaggtgggccactctgtgattaagttgctttgggtggtttctcctttatggaagtactctcatgtgactctttcatgcccaggtgatagtttggttgtccatagggctgggagaaatcttgggtagtctgttcaatcctcagctagatcaaaatacaaatgtagtataaaacctttggccatgttgacctgcgttacaccatgaccaaatataaagccttgatattaaacctctaaccttgttgacctgcattaccaaagtgcatttactaacttctgttatgctttcttgtatggctagggagttgacaggaatcatctgcaagtacgtaccaccttttggtactataatttttgagataggggtagggttggcttcaatgtttccaggtctattggtcgtccggagttgagcatcttctgtccgtggtcccagacacccaatgcttggtgctcgttacattgcgtttggtccgtttaggcactaccccagggcccatgtagacgtgatggcaaatagttgcctatacttccatttttgtggtggccaccatgtgcggtttaatagcgttcacattctcacttaatatctttggggtttttttttcttctccatcaaaaaaaaaaaagatcattggtatgctctttttcggatgggtaaaaccaaatatttttgttcccttagtctcagaaggtgctcacatcacatgcatgtaaacctttctgacgatggttcattggccaaagttttgatatataggccttgtttagttcccaaaaaaattgggttcaggacattgtagcacttttgtttttatttaacaattatgtccaatcatggattaactaggtttaaaa

SEQ ID NO: 3968 - DNA, 8441 bp, Sorghum bicolor
ttatttcagctgaatatttaaaaaatcatactaaatcatataaaaatcatagaatggaaaatccatttttggtggactttagatgagtagatctacacattgaacatataatattttatactttagtataaagtttttgatgtaactttagatctatattttttgtaattaattggaataaattatagctacagtttctatgaaccaattgtggggcaatttatatggtgggctaattattgtatgattaagttataataaaaatttcatactcattagatcaagtattacttagttatagatttatttaggtttatgcttgttaaatctgaataaatctataactacgttatatatgatctaatgagtatgaaacttttaccacagtttaaacatacaacaattagcctaacataaagattcaccataattggatatagaaactgtagttatgaagtattctaattaattacagaaaaatatagatctaaagttacaacaaaaactttgtactataacatactatattatatgttcattgtgtagatctacttatctagggtccaacaaaattatattttttactttatgaatgtgatttttcaaagattcaaccgaaatatttaaaaaagaaaaagataaaattttcttcaaaatcgctcataaccatgtcagcaacataatatgtacggtttcaaaagttgaaggatgtattttatctaattttgatgtttagtgatgaaaacaaactttcgcaaaaattgaaggatccaaagtggacttttcctttgttttaaaaaggaaagacatgccatgttgaacgcttgataaaccataatagaaagtactgttgactgctttattgcgagaaaaacaatgttgaatattcgactataagtttaagcgaacaaagacagcatcaggtctaggcgtgaaatagtaacgcatccacagttccacaccagaacgtgagacccgttccgatcagctcagccgactcgcgtccccctttgctggaaccgttcgccgtctagtctgtctgataccaccgcagtttcgccggaatcgtgggggaaaacaccaggcttcgtcaggcccaccgctaggacctccaccagatttcccgagcgacaacacgtccttcaaattgttaggctgctgctccccccgtatatcaaagctacgagccaaacaagttgccacttgtgtttctgaactgcagcccccgtctgttcccggacaaactctctggcgtccctagcgctcgtttccctcctgcttctaggcacaaaaaccatgcactcttgacgtttccttgtgaatcgatgcaggaggctgactcctttctataaaattgggttgcaagcgcaactgaaccgtgtgcactggtctgttacgctggatgatgcaatgcaactgagagagttgagatccttactgatgctcagactcgacgatgatatatatacatgtagatgtagtgtactatggtgtgtttgtgcagggtggagaagcaggacacgtgagcgaccatccagtttccatcgctggctctccgctgcgggcgctgccgtgcgttggatcgtcgttgggtggtcgctcatgtgtccgtcctctccaccgagcaccggtacatccgacccgtttgtttctccgtcgatcggcccagcaccggcgcaaagcagggagcctccatcgcggtgtctgtggctgtgagtccaactgcaacagcatttcactcaccattgttcagctccaggtccaggtgtgccatggacgccagaaacgttccctgacgatctgttctctctctctcgggaaggcccagccgagccaaacaggatagcacagcccatgaactatcaagtcaagttcatttgcataggccacggcccgtgtaaaagaattacatggaccctgggtccaaagagatacgggtaagcccacggcccgcgtaaaaaagccacatcgctccgtactccctgtctccctccgtgtccctccagtcgcccaagctcgacgtccctacccagccgccgccgcctcctctcctgccgtccgtagagccgtcgcgatggcagcagcccctgccggtgcccccgcaatcaccgcctcatcctcctttcttgcttcgccgccgttcgctctcaagtagccgactccttcccttcttcccgtcgcagcatgcgtttcttttcccccgatggttacgtctaactgtgactcgcttccagggcatcgacgactagccaccgccgacctgcggggagagtctccgtcaacatccgctgcgtcagtagcccgccggccgtcgacacatgtactattggtttccatccagttctttgaaattcatgtttaagctctagactagttttcgttttaggcatccaatctaatgcttcagatgctatttcggaatatgcggcagtattcttggttgtgatacgctatagtaacttctaggtttttttagagttagagggcaggatcgcccgcgccctttcattttcataaaaggcctaaaacattctgttacagcactttaataactccaaaccccagcactcgccagcaccagggataactactcaacatccaaagtgaggaataaaaggagcagcaaaacagagtttcggaaaaagcaaactagcacaaaagcagaccaccctactcgagccagaaacaactcacactaccattacaccatctccaaagcagcgttaaacggccaccaccatggtcgtaaagacgacatttcgcccacctccatcttctcaggctgagcaacaccccattccatgtccctgatagcttcatcaccagagaacttcaagtgtcttccagtgctgcataagagatccagagcacagtcctcgccgcagccttgattttgttcaggaattccagcagccgctctttcttttctggcgcgcataaaaccacccagttctgaagaagcccacctatctggaagagtagcatttccatgcctctccattcagcattctgaaaacaaatttcatttccatgtttccaaatacaccaaagcaccccagaggtaataatatttagcaaaccatgtttcttactgctaagccaaaatttccctatttcaactaagttacctcccactttgatattgaaaatctcagaaatcattaacagcactgttttgcaagtacacattcaaaaaacagatgctgcacagattcttcttctgaacaaaacaacagtactgtacattgtaatttctaggggcgtaatcgagtggacggatattaccaatctcatatttcttttcatattttctttcggatttggactttggagtctgacatggatagctatggatatacaaatacgaatacggattgtcttgattactattacgaaaaagtgtgtatcgaatacgggacgagtcaggtgtgaataatgtcagtaataaatatttcttcagatattgggtaaaaacaacattcactgcactaatttgatcactccatcttttgcattttgcccaaaaattattgatacatagtaacatctttcttgtgtatttccatgtacaatgttcaatgttttctgatcggcttatcgtttctaatcggtctagtagcgatcaggactatcaggacgattaatcgatggtcaggacgattaatggacctctgatcagtctaatcgtctatataattgtccagcatatagcaggactatatcatatatgtatggtttatataccatcttcatgctccctcggatatatatcatgatatatatatgtatggtatatataccatataatcggtctcatcttcgtgctcccttggacccgcagcctccaggtggggaagagaggaggcgaccttgcagttggagcagaagggggagggggaagcaggcagcaaggaagagggaggaggaagcagcaagcagcagcaaacaagcagcaagcggcagcggactgcttggattggaactgggagggagtgagatgcacgctgcaggctcagctgctcagcagatgcacgagcagcaagctcagcagctgacggctgaagttgggagtggggactaaggagagagagtgggggtgaggtatataagagaaaccctaatgggcctggcccaaataaatatagcccaggccaaaagcagcccatctgccaatttagctctgatcggccaagaggcttgatcggacgattaatcacggctaatgaacgattaatcggacgatcaggtttctgatcgaatcttaggccctaatcgagtgctaactgctaagtaccaataaggatgattaatcgcgattaatcgggcgatcagaaaacattggcagtgttccttgattataatctaataaggggactaacaaaggattgagggattataatccatatctaatgtggggtccacagcaacagcatagggtgcaggaagcaacgcccaacgtctgagaattcaggatgggctgctcttttgtataattgtaactatttgtatgttagtcaacgtctgagaattcaggatgggctgctcttttgtataattgtaactatttgtatgttagtcctggtataatgtataatatttaagtctaaatgttagccggatattgatttgatatatctgactaagttgtcagatatcggatataggacggataatggttaaactgtactccctccatactaaaaaataaagtcgttttggacatcgacacggtctccaaagtacaaatttaacttcttattttataaaatatttatcgaaaagtgatatatgtatatttttatgaaagtattttttaagacaaatctattcatatggttttcacatttccaaactcaacaacttaaaggttattcatgatttatattcccaatgtttgacccaattgcccaaaacggcttcatttttttgtaaggagggagtatttgtatttggtatccacaataaataaccatatttgtatttgatatccaaagaaaattgctgatatccaaatactatcccaccattttcggatggatggtcagttgggaaatatccataccatttatacccctagtaacttcttgtttggtcgatgttgcattcgttaaggagttgcatgaagatgttgtaggaacagaaatatgaatattgtttgctaacattttctttctgctgtcttgaagcttacaagactaatgtcccgcgcaatgctaacatggccaagctccaagcaggatatctgtttcctgaggttacacatcattcccatcttttccttttgttactgatgctattctgttggagatttggcttctgatattatcaattcttgactattgagcagattgccaggagaagagcagctcatttgctgaagtatccagatgccaagataataagccttgggataggtgacactaccgagcccattccaaatgtcataacaaatgccatggcagaggtatcttcatgtcaaactactgtcctttcaatcatatatatattcaacccacaaaaacatccaagtgttccagtactttcagttttatggttgaaaaatcacttatgcatttgttgctgctgaatatctctcttacaattacattattttttatctgtctatttgtaaacacagagagcacttgccttgtcaacaattgatggctacagcggttatggagccgagcaaggtgaaaaggtaccttgtggtgttatcagcaattttcattgcattaacatgctaattcagatacttatttaacagctatactgtgtgaagctttacataaatatatttcatggagaaatttggatacaagattggttgccttttatttaaaaaatatttgaggcagattgacgatctgttgattaaaggataactgtttttatctccttactgttatgatatctgattctctaattcataatgtattaatttttagtttaaagaccaatcacataaaatccctctgattaattgttgtttccttagacttatccttccaaatgcttgcatagttgcacatttgaattactttgcttacatgaattaatttttaagttttcaatcatatttgtagttttctctttgctctgttcttgtataagatccttcagcgtcataaaatgtcgtgctgattgctaatgcagaaactcagagcagcaattgctgcaacctactatgcggaccttggtattgaagattcagatatttttgtctctgatggtgccaagtgtgacatatctcgcttgcaggtaccaaaaagatttgactcttcccttcttaagtttacaattcattttaaattgtttgttaataattttcctgattcaatattacaggtcctttttggatctaatgtgacaattgcggtccaagatccctcataccctgtaagagaactcttgaattaattataactctcagttacttacactttcatattaatgattctaaacttatgtgtgatgattgtaattgtgatatgttgttttgtcatattacttatggattaacttctaccattttacatattgtctattgaaattaaagcaggcctttcattttgacaggcatatgttgattcaagtgttatcatgggccaaactgacttatatcagcaagatgttcagaagtacggaaacattcaatacatgagatgcagtccagaaaatggatttttccctgatctgtcaactatccctcggacagatattattttcttttgttcacccaacaatcctactggtgctgctgcatctcgggaccaactgaccaaattagtaaaatttgcaaaggacaatgggtccatcattgtctatgattctgcttatgcaatgtacatatcagatgacagcccaaagtctatctttgaaattcctggagcaaaggaggtaggcaatatgttccaatatcatactgcatattgcagtgtttaaaatgtcttggtcgcatggttatcctaaaaattacagtgccagtgctatgaacaccgtattcccctttgtaaataaaactgcacctttttcattgtggttttgtttatgtgcaggttgctcttgagacagcgtcattctcgaaatatgctgggttcactggtgtccgtctaggttggactgttgtccccaaggagctccttttctctgatggacatccagttgctaaagatttcaatcgcatagtctgcacttgcttcaatggtgcatcaaacatttcacaagctggtggtttagcttgcctctctccagagggtctgaaggtaggattcctggttcttggaattcgcatattgctcttctacattgtttgttttatccaattgttcctgtgcaggctatgcatgatgttgttggcttctacaaggagaacactgaaataattgttgacacatttacatcacttggattcaacgtgtatggtgcgaagaacgctccttacgtatgggtgcacttccctggccgcaattcgtgggacgtgtttgctgagatcctggagaaggcgaatgtggttactactcctggcagtggatttggaccgggtggcgaaggctttgtgagggtcagcgcattcggacacagagataacatcattgaagctgcaaggagattaaagcagctgtacaagtgagcaccgatgctgcttctgtgccctcgaaagatggtatcaataagaacacagcagcatttcggacaccaaaattcgctcgctgaagctgctagaagatgttagaagtgagaacatgatttttttgggagcatgattttcttttagtaggctttcgtgttgtgtactacattcaaaccatttccaactctagacaatgcttgttgtagtcctgagactcttcaatcactggcgaagtgtttatctcgtctgtgttcgtttttgtgccctgctgttgctgtttcttaatccatatcaaattatatgacgtttgaccactcgtcttatttaaaattttatgcagaatattacttcttttgtcatggttttgtttattaataaaagttcttcaaaaataatttaaatttaactatatttgtataaagtttttgaataaaatgagtggttaaacttgagataaaaaagacaaatatcttataatttggaatgggggagtaccgaatggagtcgacacgttatacacgcagagtacacgtaattgattaaaaatgtctcaaatcgtttctttgcatttaaataattattactggcggtggtacaccagtatctatggaagttgaccatctagagaagaggattcattggagtgagagccctaattacctcggcatggagagaagcgaatcgttgacctcgcaggatcagttttgtaattttcctgacacaggatgctgaagaatcatatagtttccagatccatatgcaattttctgcagcgatgttgttcacactacacggatgcgtaattctg

SEQ ID NO: 3969 - DNA, 8162 bp, Sorghum bicolor
cggaatccctgtactctgtaagattttccgttctgcctttcagaatcaatccacagtatctactttccggccatgtatttttggaaagcacttgcttaaattagaagtttaactcttgccacttttaaatcaggtttggtcctcagtctttttatgttaactctgcttttgctcttgtcaagtctggtattgtgcctatataggctgtcttgattatctgttgcctacagtggtagaagctggatgggtcatggccgtatctctcgcttgaaggcgaagagaaaataatgcccccatatctcccctccccccctggtcaaggtgaatgaggtgtatctgcccatagtatattgccagaatctgaggtgtcgaccctagtagtcgcaggcatgattgttgcacacgtatttcagtagtgggatggtaggtttcgtggcggccttttttctaatgaaatgggaggcgtgcaaccttctattcctactatttggccattatgggattgctgttggcttcgtggccctcaattagcctgttaggtttgtgtatgagtagctttgaagtcgatgaatgtgcgtgtagtgtgcccatgcgccatgcatttgcatgttcgttcgttgcgcgaccggtcggcaatgcagtaggatgaagcgtagctgtggtgctcgtagtcgtagactcctcgtaggttttggctttgcccgggtcccttttgctgggtgtgcgtctctgttgttggtgctcacccgtcacccgtgtaagctatgctactgtgctggtcttatctggttgttatagatggacggttgggttggcttgagtttttgttggggtttgtcgctggtcctggcgccgttgtgttgtggcgaaccaagcatcaaaatcttgtagccttgtgaatattgatcttgtcgtgtaatgcgcgggagagagcatgtgacgcatctttaatttttgccctggaggatttacctctcgacaagaggacaggttgggtaatctggattaatttgctgttgatacgtactgacggtagcacggtattaagagctttcgcatacgtaggggttccaagtaaatgccgcccagtactacgtcatggcgaagaagtgcatggtatcatcgggatcggtagctgtaactgctctcgggagtaggatgatgggagtactcctatatatataattaaaagaaaacagtgaggtgtgtctacgggagaacatagaaaacgcaagcagtttccatcagagagtaaacataagcagtttgttggctctattctcatccgtgacattggaaaggcgtatgcaaggtggcggaaaggctataaaaaaaagagcgcgatgatgtcgctgcaaaattgatgaagcgataatgactggtgccaaggctacggcaccctgatacatttctcatcactctaataatcagtaatcactcacgagaattaccttgcgattcgaatggagtccatccatttaataaccgatacacgggcacggcagtaaatgggcttcgttaaccagttcacatgcaccgcgccagagcatgaagaagaagcgccccccagtccccccggtagaccccaccccgcccctagtgggtcccgcttgacctcccagcccagggaggcagcacgaacataatcaaggcacaaaactaaacctccctcccctctccgagtctcccacccctccctatctctctgtctctgcttgctcatgtctttgtgtttgttgacgcgcctgcaagtacgagacagcgagcgggaggaagaagaaacaaaacgccggccctgatgcaaactcgccgcaagagcaccaccaccaccacctcgccaatctatttaggcggccggcttcgttagcgtagcggcggcggccaaagtgtaacggggccgtgcagtgcgctcctgccggaattggtggtcgcgtggtcgggcaaaaagctaccacggcaacgaggaggaggaggaggcgtctcgaggattgcgtggcgcaatgcccctgtcgcggcacacggtccggaacgagtacgcgctgggcggccgcgacctgtaccgcgcggcggaccagcacgacccggaggccgtcctcgatggcgtcgccatggccggactcgtcggcgtcctccgccagctcggcgacctcaccgagtacgtgcgccgcaccattccccgtccttcctgtttcgctctagctcctttgtccgccatgaacatggattctgctgttctcgtctttaattctgtggtggtttgcgctccggcccgttggttgcattcgattcgagcatcttcatttccctggacgagctgttgatgtcacgcatttcgaattgctgcgtcatggttcccggaccgatcgcatttgctttgatttcgggcgtagtagatcacctaatgcttttgttatgttatgttatgtcacgaacaaaacggtaggttttcgaatccctttctcctttttgacaaacggtaggtgattgatgtattcgacgtttgactttcaggccgttaactctgctgatggccttgtcctagctcagcagcacagaccactgtgctgtcattatatttctgttcctaataagtactacaattgtgaattgtcatcaagcacttctagctaccctgtaccgaaaaatagctgccctttctaaaggaaaaaaaaccattttttttctgatcgtcatttatgtgagaatgctctgattaatttctgatacctggagattgaaacaaataaaaaaaaatgaaaaaacaaaaccgaaattttttcttatcgtcatttatgcgagaatgctctgattaatttctgatacctgaagattgaagcaaagtttttttttttttggaaaaacaaaaccgaatttttttcttatcatcatttatacgagaatgctctggttaatttctgatacctgaagattgaagcaaagaaaaaaaaaattgcaacagaaagaccaaagtttgaccatgatgaatcgcaggaagctgcatttgcagaaaccagaattttagagaggaacaacccatgatgcaactgaattccccccattgtatggctgcagatttgctgcacaggtgttccacggactgtatgatgaggtgatgaccacgtctgcgcgagggcacggcctcatgctccgagtgcagcagctggaggcagagctgccactgctagagaaagactcctgccagagagactacctgtatattgcttcaaacaggggtgggttcagtatcaagtgcaaatttctcttctgttgcttatccttcattacttctcaattttcagaaaaaaaagatcagcctgcttttccccctcatgtgtaaaggtcataattaaatcccttttgcaggtgtcgattggcattcaaatccaagggtggaccatggggttgtcacaagaggtgacacgcctcgcttcatcatggactcaatcaagcagtgtcgcggaccacccaaactcttcatgctggacaagtatgatgacctatctctagtgtgtagcaactgaagagctgaatcatgatggttgcagcattgttcaacgtgcaggtatgatatcggtggcgagggggcgtgcttgaagagatacactgacccgtcattcttcaagacggattccgcttgttctaccttgctgcaggaaggaattcaaaatgaaagaagacctctgaaagccatggtaataaacacttcaaagttctcacaagttcatatggatatatatagatatattcagtagctgaagtgagaaccgttaactactctccaggaaatttgatagacccagtgtatgctggaaataaatagatttaatatttttttgtgccaattgctatacgttttttttatattgtgcacttaacaaaaatcagctccacaagagagaacaacttggttcgactgaacttaatgatgggagcattgcaggaaatcaggcctaaccttcagaatgctgagattttccgacccccaaatgcagccgacaatgtctccaagtacctttcttcttacactctttgaaatgtaccagtatgctattgttctgctaacttattctaaaaacgttactttgccatctctgtagactggagacagatttatctggtgaagctatggatgaagttcccacaaaccgaagacgactgaagtaccgccaactaaatggatctgtatttcaaagcttcagaccacttatgcagaatgtgtatgaaaagccttcatcagaggagaaactcgtcacaggtgaccactcaaaagtgaatatatctatgaatgattctcctgaatcagacaatgaagagagagacatcatggtagatacgtctgtcaacatggaaaaaggcaaggtcactgttcgcaagaacagatcaatttctgaagaagcactgtcacgttcttcagatgctcggtcagcaggaagcagcaagggctacaactctgaatttgatatctacatggatgcattaaccacgatggattctgatgtggagacagatttggaacacaggggccatggacaatgtatcttcgatcggatggattcagacaatagattctccaatgctcaaaacaccatggcatcgaggactagcaacttccagaagacagacaagtcagatgttgcctcaccaaacagagatatgagtaaccagtttgaaaaagccattgtctccacacaacacaccaaaccggttgttggtgaacatgagaggaccagctcattagaggaacagtttgacaaagaaaaaccagcttcttgggatcatgagaggactagctccttggaggaattgctcaccgaagatttcgatgctacagaatctggaataagagagcaagctactgaagaacagatctgcaatggcagtgtcaccagtgttgtatcaaatggcacacaagatattactaagaccaaggaagtcaaggagaattccaacatcgcaactatttccttcaagaaaatagcaagcaagaggtccaagtatgtcggcagcatggagctcattgcttcaaaagttggcattctgccgaggaaactctccaagaagcatgacgctttctctgattccctcaggtacatggcgaagcaactccttgaactgaagtatgatggcactcaagatagagacttatatgacttcgaagcaaacggtgtgggatgtgatgtcaagtaccaggaaacttatgaccctcctgctgaaattaaggacagtgatgtgcacaaaattccgtcagattcaccttatgatgatgtggattcaagaaaatgcctgcaggaagaagtgaaccatgagctggagcatgatgttccacctactgacagtccacacgattcagtccctgatgaagaaaatggatttcaggactccaacatggtctacttggcaggcatcattacatcttgcagttcccaagaggaagaaggatgtgcaagtactgcacttgatgagaatttatctacgggagtgatcaaacatgttttggagcatgctcaagagaagtttgaggaacatcttgacaaggaagtgaatgaggacattcatacagaagtcatttctgaaaatgcatctgataggtgtgaagacttgaaagaagtcagcatttacacggagcaggtgaatgtggaagatattgaggaaagcaataaatctgatgtatatgcattggatgatgaaactgccgagtatatagaagagcaagtttcagatgatgtagtttcagatggtatgatctcttcaccggtttcatccaagcaatcagatgatccttgccggataactccactcgctctcgcagatgaagatgatacagtggcatgtaagatcatcgatagccctgaagtggagcatattacattgtcagaagcatttacggatactgatctacctaatgtggtaactgagtcagtaatcaacagagaacttgccatgccagataatgaacagtactatttacatccaaaaactacttttggacaagatccgattcttggcagcaatgaaattgtagggaaaaatgggcaagcttcactatgcagctcaaccactgcggctataactccagaactaactgtaagcacagaggaaaagcatgagtttcatcaagttgtgtatcaggaaccatcgaattcattaaatagcagtactgaagattttggagatccactagctcctgactccagagatgttccaccgtctgtcatctcaagcttcgattggatgcttaatggtgcgatgcagcagtcattcaatgtccttccttctcatccaactaatggaaatgcacaagaaaatggttcttctgaagatgcgccaccgcttccacctcttccaccaatgcagtggcgaacaaacaagctacagacagggtcatcaccgttatctgcaaagatcggaagaccaccaaggccaaaacctccagtaaaacaacaagaaagtgaagctgcttgggttcttcaggaaatgagtctacacaaaggcttgagtttgcagaatgaagtagtgcaggcaactatttctagtgatcatgagataaatcaaacccttaacatggattgtcatgaaaatcaccaccaggagggagaggactatgatgcccaggattctaatccatttccctcgtcagaagttgaatgcttgtcagaagttgcttcagtaaaaagtgaaaatgtgcacacattgcagctacctgagcttatagttgttccggaagaggcatggtcagtgtttggtaatataaaattcatacaagaacaagaaggagaacaccaactaagcaatggactttctgtttgcaatgacatatacacttctgatttgtcagcacaaaagaccagccagaagcctgaaatttttgcagattataaggaaaaggaatttccagctgcaggtagtgacaaagttgcagattcagaagaaaacagaccaaatggtgctattaaacaggattgtatgctgaatcctgacttgccagcagaacagaaaaacgacgaacatgattgtgatgacaagacaagggagttttcttctgcattagaagaggaatcgtcaaaatcaccaactcatgcagtgccaaaaccacctagatatcctctacttcctgttacttctcatgacagaagcatggtattttggactctttcatatttcgttttaaatgattttattaatatcctcacctgaccatctctcttttacccttttatatagctaagagctccagctttggttcagccttcgagtcagctttcagatgaggacacacttttggaacagataaagaacaaggtaatccttgtagggtgcattaagccacatcaccgacattacaacattttttttctaatgaaagcaaatacaatcaaattaagctaaaaatgccttaaaccaatttgacttgtttcacagtctttcaacttgaagcctgttattgcaaagagaccaaatgtaatgggtggtccaaaaacgaacttgcaagtggtggccattctagagagagcccaagcgattcgccaggttacaagtcattccatttcttcctagctacaatttcagtcgatcatagctgtatcatctatgattaaacgataattatttcttttgaaacaggctgttgctgatgacgatgacgaggatagctggagtgagtagctggctctcccctcagagcaattcatttgggcttctgcttttttgcgtcgatccagacctttgtgtccctgttcttgcatggagcaaaatatagaatggagccaacttagcacagttggaccaggtgatgtccatggatgggcaggatagaagcaacgttgcaactgcaaacgtatgagtctctactgtactatctgtaacgagttgcgctgggcatcacatgtttactatacctttcgatgcgcctcctgaaaatttgatgtgcttggtgaggattgttagattgtatatgcctcctaggactagtttgatttttgtgactttgtgattgtacacaaagaagcatgcatgattgttctggacaaatctgaagctgctagagcaagcaacttgactgtacaggtctctgactctgaaacaggcaatgtgaatccaccatctaccatatacctcctttttttgtgtgtatatttgtgtatatcagatccgttcccttacga

SEQ ID NO: 3970 - DNA, 6009 bp, Sorghum bicolor
tacccttatttaactagctcgcgacaatttcaaagtgtgaaaatgtttaataaataaacatcgttatttaccaaaattacagtcgatccaataatcacaagccgtggggatagcacctcagaacaaccataggattataggtatcatacaggtacatataataacgctgtttttctgcatgatttgtggaaccttttatttttccgacgcaaaacaataacgtgttgatcctgaacctctttctcagtgaagataaaaagcacttggcaaaggccagcaagtgatatataggataggaacttgcacgctgctttaggccttgtttatatccaaaattttttggatttttgacactgtagcattttgtttttatttgacaaacattgtctaatcatggagtaactagacttaaaagatttgtctcacaatttacagacaaactgtgcaattagtttttgttttcatctatatttaatgctctatgcatgtgccggaagattcgatgtgacggagaatcttaaaaagtttttagtttttggtgggaactaaacaaggccttaatttgaaaaacgttgtttgcttccattcctaactgttccttttttttggagtaaataaatgaaaagcttctaccgatgaaaaattgaatagcgatagcaggtgcctgtggctcggcatcatttcatcaacgacaacatgccgcaacttgcctatcactagcacagtgcacagggacgggacggatggctcggagaagaaacaagaaacacggccaggacaggaaggagagccacacacaattacacatgcatgcacgcactccacggcaaaagcagcgctttggtgtgcgcgagtgcaactgcaacttgggctgctgccgtttctattttagcatcaccgtatattccaaagcgtacgtcgcttcgcttatagtaccttttccgctttcgtcgtcgtctttgtcgcgcccacgcaccgcccccggtcgccgtctctgatcccagtgttccgtagtgttcttgcaatggcaaatggagggcgcggttgttggtggccgatgggagcgccactgcacctcactcctttccgtatcctcctctgtagtctatattagggcgtccccaacactaataaaacagatagtctagaagaggttaattttattggttgattagaaggaagatcgaggacagtgctagcgaagaacaagagctagagttacatgcttactgaaaaaatttctattagtggccgctcagctctgtacttccatggcatttttttaatttttttttctaaagcttaagtcgccagcgatttcttttcttttgttgaggacgcccttacgtacactatgtgtggattgcgggtgcagacgtgcctcttcggttcaatcactcgatccaaccataactaacccacactagtgccgaagtgtcattgggcctcacgagtctatttctttctactcgcaataaaattgaacgggagtatcatttcaacgttccatttacattgttacaaatgctttattctagtgtcctacagtcctaggagtcgtaataatcctaatctgagagaacttacttttatcaaaatcataagagtactcacaaagtaacattcgcacagtacacatctcgcttttcagtgagccagtgaatttttagtttgactactagatttgtacatcaaatctgtttatactacaaaaacatattacatgattgatctaatagccgtcccgtctatgacccacaaacgagcccattaaagtactaagcccaaccaaaacgcaagccttgcaaagcccaggtagtacctcaagtccagagcgtgagaaagatttcagcccaccaaggcaccaaccaccacagcccagtaacccgtcttgcctggccgttccaaaaccagctagcccattttttcttcactaaaaaaaaaggctaccccattttctcggcctgcctcgcgcaacccgtcccagcacaccgccgtcgtcctcgctcagctcgtccgtcctcgtgagctccgcctgccctccctactggacagccacagccatcttcctcccccacctgcacacagttacaaagcttggcactcgcatgctcttcgccccctcgcgcctaccgcctcgcagcctccgcctcgctccgggctccccaatggcctccacgctcgccatcctcaggccctccgcgccggccccgctcgcgggccgccgggcgcgggctgccgcgccggcgaccgcgagggtggcgctgtcgtccagatctaggtattcgtcggccagggtgtcgctcggctccgaggttgcagtgggcgccgacgcgctcttcgccgactataagcccaccaccgctttcctcttccccggccaggtacggtgagggtgaggccctcttttttgcaagttgcgggccgtgtgcacgcgcgtgtggattatccacatgagtaaattctgtgaatggtcatcactatacgatggtttatgcaagtagaatagaatgtcttaacttcggaattgaagccgggcaatgaatggtcacctttttgctcgtttcagtaaacgtacatcaaaatttggccacagaagtttctgttgatttataatttcgtgctttagtgctggtgtaattgcatctacatgcctatctcctattctcctgtccatttattgcaggatgctttgatttcagggtgcccaaaccgttggaatgggggcagaagctcagagtgttccagcagctaccaaattgttcaaccaggcaaatgaaatccttgggtatctccaaacctctaatagtgtctgcgcgttttctcacatatttatagtccacggatgctcagtcgttcacattccaaggaaaataattgtagtgcacatgctaactctttcctttttactggttaatatagatatgacttgctggatctttgcaccaatgggccaaaagaaaagctggattcaacagtgatcagtcaggtatgtggatttcagggtcccaagtaatttgcaccagtgctgccatgcatggttgattcattttcttttccatacaacttatttgctcctgctaaatgtgtcccaccaaaataagtttcctgacccatatggtgtagttcgtagtttatatgcttggcttggaaatcccatattctaatgtgcagttcttgagctgtgccctcctctggtttggttaccaatacaagtacttgcattttgaagcttgcaattgtgatcaggatccccagaatttaatttgttagttttgttcaaaataagatatattgcatatttgtatgtatcagaaaggctgtaagggcatgtacaatgcaagatgcttagacatatgtgcttaaggagaaagaatgttgtcatactcctgagcatctgcttgttcctacaatgcaaataaatgcttaggtaggtttaacctccttgttaacacacattaagcattggtgctaacttaagcatcttatccacacctttgaagcattgggtgctatgattgctgaagaaaaagttttttttttgttaagcatctcctctaatcatctcttccattgtagctctaagactgcaaaggattattcctttgaattgcagtatttttgtagtcttgtcaattaagtgctatgttctgcctgctgaataagttctttttgcagccggctatatatgttaccagccttgcagcagtagaggtactacgtgcacgcgatggaggccaagatgtgattaactctgtagatgttacatgtggtctcagtttgggagaatataccgctcttgcatttgctggtgcttttaggtattcctttcttctatccagaagcacctgttagttctgtcaaaccatgtccatcatggaatgaacaaagcgtacatgataggcttgcttttgcagctgcaacttagatttgatagtttatcaactatgcacactaacacatcctatataaccatgcagctttgaggacggactgaagcttgtgaagctaagaggagaagctatgcaggtttgtctacagaaatactaagagataatttgtttgattttgtagattgaattctactattcgttatctatggtggatgtagtgatgctaatagattgtttgattttgttgattgatttcgaatgttcattatgtgtgtaggatgcttcagatgctgccaatagtgcaatggttagtgtgattggtctggattcagaaaaggtgcaagaactatgtgatgctgctaatgaggaagtagatgacagtgaaagagttcagatagcaaactttctgtgccctgtaagtgttttatctgatgctgtcagtaacatcgtatgctggctcttgattgatatgaaacgaagtacataaaaataattgcaggggaattatgcagtttctggtggtgtaaaaggtattgaagtagttgaagccaaagcaaagtccttcaaggccagaatgacggttagtgttccaaaaatgttttgcttgaatcatatttatggaaatattatctataattttatatggttaaacatattacagttttcagttattctgtctcccattgtactttttgtttcaatcttagtatgttaccaaaggaacttacatgcttaaccattctatttccaggttcgcctagctgttgctggtgctttccatactagcttcatgcaaccagctgtttcaagattggaatctgcgttggctgccactgagataagaacacctagaatcccagtcatctccaatgttgatgcgcagccccactcagatcctgacaccatcaagcagattttagcgcggcaggtgagttctataccaaacttaaactcttactgcaggctactaggcttgccactttctagggtgaagtgttttttgacggttgcatggctctgacctacctgcacaacaggtaacctctccggtgcagtgggaaaccactgttaagactcttatgggcaaggggcttgagaaaagttatgaactcggaccaggaaaggtaagggattagtttcctgtgttgtgatttatttattgtttagtaatgtttctcgatttaagcagtgaggtaaatttccaagttatagtatagcagtttgaaggattcttaataaccaaactcactagttagtaatgctcttgcattatcctttttttttggcatccaggttatagcaggtattctcaagagaatcaacaaaggcgctagcattgagaacatcggggcttgaagttcagggatctgaagaactcttgatggaactaagctacacaacagaggattagccccccatcaggggtgaatatgaacctacagccactattgtggaacgaagtttccactcatagagttagcgattttttgttacttttttttaacccttcgtggttgaattttgatcttgatgtaaaattgacaactggtctggtctaatgattatatgaacagtgtagttttcataatatttgaataacaagcacatgcgtttggtgaagttgtgtccagattcaatgtcgttgccatcccctaatccatcaccgcttctattctctcttctttcccagggcagaccggattggcgggattggtggttagcacgagcatctccaagaggctttttaaacctcaccttctaaatcattatttagagtcatttgcataaaaattgtttcttgtatcatttcactctctaacagttcttttatatcttattcgtgctctagagagctattctcgttctatttagagaagctgttagaggatagttttcactaaaatctctattcttagcatttaggaaattctagcaatggtctcagaaatagcaattctagcggtgatctcaaaaatagcctctaaatcagtgctcattccagattctctcttttctcattatctatgtgcattctatctatttcattcgacacaaattccccaataatgttactatttatttaaataactactactcaaatgtacaaattcaagtt

SEQ ID NO: 3971 - DNA, 7921 bp, Sorghum bicolor
actcaaacactccatgacactccaaaaccaacgtatttcacaaaaccatggtatttttctaagacttcaaaaatactttctatctaaacaggggtgaatagttaaaatggcacatctataaaatgtttatcctaaaaagtctgggattcaattattcaaaaaaagtccaagattccaaagagttaagagtttcaaaactgatctcaaaataaagaggtcctgaaatcacccccttcatcctcaaatctcaagggccttcctctgatctattaaggatctgtttggattatctcctttaaactttagacctataaacttaagagctaaagctataatcaggtggtctaaagttagttctaaactttagcccactcacaatagagttttagacctcaaaagtgatctaaagtttttagggctctaaactttagaggtgaggatccaaatagcccctaggccatttccacccactcccactcgatttgttctcctcgtcaagcttcttctccttttcaatgagcatctcccatatgacaatggaagacgagagaaaaggaaaagaggaaacacatgccactaatataaggccccgactgtttcataagaaagatggaatttgttggcattggaacaaaaattaagcatgggaaaaaatatttagaggtcattaaaatagcttttagaatttagatttaactaaaaaatctattttaaaagaaaacattctaatcaatgtataaacgtattttaaaactttccacaataaaatataagatgcaacacactatggcttatctctatttagaagaacactatgcaaatagaataacatgatggcttggatttgtatttagaaattcccgatctattttagttagactatttttctctccatctttaatgatcaacacagtatgtcaatagaaaaacatgattatgctaaataagagggtcatcctatgaatactaatcattataatgtagacctagcaggtatatataatttagacaaggtctaagagtccgataagattcgataagcacacacttagaatactaagattagaattcatcgtcctcttttacttcttggttagagcctagtatatattttatctataactatacttaacatctatctataacgtcaaaatagttttattagttttttcatagtatatacatcgatgatgtttatttgaacacgtatatgttaatatatataatttttaagatcttagttaaagtaaagagatttgacttaaggcgaaatttgaaacggaggagcacaaattataatgttctcctaagctcgcgcaccaaacaacgatcatcatcgcgcgaattagcgtgagaaacacgaacttggtaaatttcaccggtccaggtcagcctccgactccaattgaccagttgcatctttgctcagacatggatcgtgtccacccgacatgctctccacagaatcacaaccgtcgttgtcagcaagacaaaacgaacggctctgatcactcgaggccctccacctccggcagctcaacgcctcagccacgccacctgtaccgtatcggcgtatccaccgtcaccaccttgccgcaaaacccctctctcctctgcccgcccggccgccactgttgtatatgtacctccaatcctccatctcatcaggcatcagcttggcctccaagccgggaggaaggggcgacccgcggccgcgaccgctgcgcgaaccctagccgccactccgatcgccaccgctggtaagccgtactgcccctcgtcgagtcgaccgtttcgattattcgattcgtgttcccggccgccattcctggggttttgggtgcttttggtttttgattcgttttgatgttattgttgtgcggtgcaggggttttcgatatatatatgcctacgagttaggacgaagagagcggaggtctgcggtgacgctgtcgtgaagaaggctcggggtgggggaatcggcgtcggaggcggaagagatggtggccggggcggatgtgggcggcggcgggagcagcaatgggagcggggtggtggagatcgacgaggacctgcacagcaggcagctcgctgtgtacggaagggagacgatgcggcagctctttgcctccaacgtcctcatctccggccttaacgggctaggggccgagatcgggtgcgtgccccccgccgcccccgccacccccgccccccccctcctgttttttgtcgtacgtttaatgttttcctgtgtatccttatgggtttggcaatgcaatatgcaatagtatatatacaggctgaatgatgaattgcaaaatacttctgggattacatgtattggatatatgggcagcaactgggcaagcaaaaaggcttacggccttagaggcttagacatttatggctaaatgtttaatctgttaaagtttctggtgaacttagaaatgcatatggtgcggccatttttctgatttttatgtacatattttgtttactattctgttcaatggccatcctcattataagacatatggtggagtagtataactgcgcaagtcactgcctctcacttgtttacctgtatagtcattataattcggatcaacactcaacatgatgagctaattgtatcctgcccccaaaacaaggaaccttgttgtcagcacaggaacataatttttttcttttctcttgagccagccagtaattaatcatattgttaggtaactatcattttattttcaacgtgcatttgttcatattctaatgctataatgtcttataagcattaccttggcgaggtctttggaactaatatttcctttcaacagcaaagaatcttgctctggctggtgttaaatctgtcaccctacatgatatcggaaatgtggaaatgtgtgacctatcaggcaatttctttctatctgaggatgacatcggggagaacagggctgttgcttgtgttgcaaagcttcaagaacttaacaatgctgttctcatacatactctaacagaagaattgactactgagcacctttcaaagttccaggtctgttggttctctgcgtccactgtgctaattttttttacttctcattgttgtttgcattcaggatctgttttcatgtgtatgagatgatgtgttctatagtatgttcagtttaattctttgttttgatagtagcaagaaaatccatcttgcccttctatatgatcttgtattttttttctcctgctctccttttttttggctgagcatatgattgtgagtaacatgttctctcatatgagcacttgtgccaaatatttttcttttgtagggcctagttgaatttgttttcttgaattaaaaaaatgaaatatggaattaaattgaatgtagtgcgaatctgtgtgtgtcactgtatctctttgccaattgcagtgtagggtttgcatatgcctcagataatatctcatagtatcatgtacatccatgatctatttccaacctacttatgggaaaagggctggttgttccttctactgcagaaccccttaactttctacactggtatcttgctctgtgagcctgtgtctggtcattatatgcagaatagctgatagtattgataacattccatattcagccaacttagagctctttaagttaccatggttaaactgctgattagtaacatcatatgattgaagcctttggctttcatatgattgaagcctattggcttagttaagtgtaaagaaaatgataatgttatgcttgatagcatcactgaatatactgctgcagtgttcttttttttcttttctttttttttaaaaaaaaatggcacgaattgtcaacttggtaaactcaccagctattatatagtgatcatacttatagttgtttcatttttcaggtggttgttttcactgacattagtttggacaaggcatttgagtttgatgattattgtcgtaaccaccagcctccaatttcctttatcaagacagaagtctgtggtctttttggtagtgtgttttgcgactttggacctgaattcactgttcttgatgttgatggtgaagatccacgtactggcataattgcatccatcaccatcagcagtgacagtgacaatcatacaatagtgtcctgtgttgatgatgagcgccttgattttcaggatggtgatcttgttgttttctcagaggttcagggtatgacagaactgaatgatggcaagccaaggacagtaatgtgcacaggaccattttccttttgcatcgaggatacaagtaactttggcacttatacaaaaggtggaattgttacacaagtgaaagaacggaagatcttaaagtttaagagtttgagagattcgattagagaacctggggatttccctctgtgtgatttttcaaagtttacccgccctcctctgcttcattttgcatttatagccttggataaatttaggaaagagtttggacgcttccctggtgttgcttgtggtctggatgcccaaaggtttgtggagttcactgcttctatcaatgaagccacaattgactacaagatagaaggcgagcttgatgagaatttgttgcggctttttgcgagtggttctaaagctgtcctgaacccaatggctactatgtttggtggaattgtcggtcaagaagttgtgaaggcatgttctgggaagtttcatccactgtaccaggtaattgtcattacttgcatgatattttagggttgtctagtatgttgttactatctgatagtttgtctttatcagttcttctacttcgattcggtcgaatctctgcctactcaccaactggaccctaaagacttgaagccattgaatagtcgctatgatgctcagatttctgtttttggctctaagcttcaaaaaaaactgcgggatgccaatgtctttgttgtgggatctggtgctcttggatgtgaattcttaaagaacctagctttaatgggagtgtcttgcagccgtagagggaaaattactataacagatgatgatgtcattgagaaaagtaacttgagccgccagtttctgttccgtgattggaatattggacagcctaaatctacagtagctgccacagctgctagtgctatcaattcctgcctgcacattgatgctctccagaaccgtgcctgtctagagaccgagcatgtcttccatgatgcattctgggagggccttgatgttgtcattaatgcacttgataatgttaatgctaggatgtacatggacatgagatgtttgtacttccagaaaccactcctggaatctggaacactgggtacaaaatgtaacacgcaagtggtaattcctcaccttactgaaaattatggggcttcacgagaccctcctgagaagcaggtacccatgtgcacagtccattcatttccacacaatatcgaccattgtgtaacatgggctcgctcagagtttgagggtttgctcgagaaaactccaaaggaagtcaactcttttctgtctaatccttctcaatatgctgctgccatgaaaatggcaggtgatgctcaggccagggagttgcttgatcgtgtatgtgaatgccttgagaaggagtgttgtgagacatttgacgattgcataacttgggcaagactgaagtatgatttatctccccattttgttcattctttatcaacattataattttgggaataaatcctttctatcttagagcttgactgattttactgagtatcattgaagaaaataggactagggatggtactcattttagatgctgtctaattcccccctcctccttttgtccccagatttgaagattacttctccaatcgtgtgaagcagctaacattcacgtttcctgaagatgctgccactagcatgggaactcctttctggtctgccccaaagcgtttccctcacccactggaattttcagctgctgattcatcacacattcatttcataatgtctgcttccatattgagggcagtgtcttttggaatctctatacctgattgggcaaaggacactgataatctggctgatgcagtgagtaaagttgcagtacctgaatttaagccaaagagcggggtgaagattgagacagatgagaagaccaaaaacatctccactagtgcctcagttgacgatgctgccattatcgaagatcttttaaccaagctggaagcttgtgccaagaaactacctccgagattccaaatgaaacctattcagtttgacaaggttagccttatttaaatattctctctgttattttaaggctaagacattatgttttaaattttttcctgctgttgtttttactctcttgaaaatattttgaatcttggagaacttcacattcttttaaacacaaatcaatggatatgtcctggcctgataagcataaagattaacataggtcatgttccttcatgctttagactggattacaggagttagttgcctctgactccttgctagtagtaatccattatttacattacacggctccagcgagataaaagtcagttagctcttttcacttgaactctcatgtttgtttcctgtctaatttgtgcaatgcttctggttcattatccagctgagaaaaaacaaaattacgtattgcggtttctgttaaaacatgaaatattgaagaggagtgctatagtagtatatgagcattttttgtttaaatttgaactgttgaacattctgtataaaaataaaagtgatagaaactttaacagtcgatcctttttgttatcttaattaacagcatttttcattccgttgcaggatgatgatacaaacttccacatggacttaattgctggtcttgcaaatatgcgtgccaggaactatggcatcccagaggttgacaagctgaaggcaaaatttattgcaggaaggatcatcccagccattgcaacttcaactgccatggccacaggacttgtgtgccttgagctttacaaggttctggccagagggcacccaattgaagactaccacaatacatttgctaacctggccctaccgatgctcaccatatctgaacctcttccccccactgtgatcaagcatcaagatatgaggtggaccgtatgggatcggtggtcgatcaagggagacatcacagtcgcagagctcctgaattggttaagcgacaagggcctgagtgcatacagtgtctcctgcggcacatcgttgctctacaacacaatgttcccaaggcacaaggatcgactgagcaagaagatcgcagatgttaccaaggaagtgacaaaggtggacattccagaatacaggaagcatctggatgtcgtcgttgcttgtgaggatgacaacgggaatgatgtcgacatccctcttatctccatttacttccgctaggttgcactgcgaaaagagatgatgaatgggagaaaaaaaaggtccccgtgaaaaagagatttgagtagattgataagttctgttaatattttcactcttgttagttgttaatatgccgtcggtagcagaaatgaccacagctgaagttgcttgtagtgcatcttcttacggttctgtacgggtgcttgggccctgctgttgcatgccaaatatttgcaggtgtgcaatgtgatctggatattttgataaatgaatgcttcatagctacagagttctattcacgttgcacctcactgcaatatttattttttttgaacagctgtctttcagttaagtaaaaagagtcgatccaatttataagataaaccaggcctgaaaacattacacttgcatggttagttaaaggaaaaccagcagaaaaacactaacatcgacagcatagccaaaatgaaacccaaaacgacacagcatgtcgcaagtcatcgttgcacctcacagca

SEQ ID NO: 3972 - DNA, 5857 bp, Sorghum bicolor
aaacggtggctccatcttgtgtaccactgacaacgaaattccatggcgaacgtctgatcaagcaccgcccaaaaagtttcacaccagaaaaaaaaaaaggttgatgtcgacgcgcacgccgccccgatttccaaacgggtagccgtcctgtcctgcgtgctgcgctagctgcaacgccaatggccggagtaaaactcactttcaccgtggcaagtatgaggttgccttcactgacgcaataatgttccggtgtaacgtttcctcagccaagaaaagtggcgtcacgatgtacggacgctttggcagcttctgtgcctgaatcaaactagtacagattatttatgaatatgaatatcctccatcacccttgagatgtgtcggtcattattaactgttggtggtttcagatgaattgttaaccaggacaagatggtgaacagcgtgtaaatagacacgtttgtcggaatctccaagcagaaacactggagacactagcacaaatttacgagttcatgttattttatataaaaaaaatcaaaggtataatagttcttgcggtggattctcacaatcatagctcaaactcaaggaagcgacatgtatcctgtgcaactcatccagcgtgattttaatatagattggacccaaatgattgcaaatttgcaatgatcactcactggtacaacttcagtatctacagtttggcgatagctccgcacatttatgtgtgacactgccgatgcatctttaatcacagtgtcagatatgccttcaggagctccatacatgaaagatgatgaagcatcttccatggttcatgcaccatagatcaaatatctggcaattttgtcaatcaattccaaaggaaaaaaaaatagtgggaacatgtggaactgcgtaaatgctaaatcaatgaactccttcatcaatgtgtcaacaattccctatacatcagggaacttcttgctataaattaggacctctgcaccatgttacagagggaaacttcttgctgtcagctctgtttacgcagttcttctttctgtgttgccacctccgacaacagtttcagaaccttaatatgtagggacaccaatccatgttgccatttccccccataaacagattgacagtgacatgggttgttttttccaataccaaatggaaagctctaattgattcttcagatttccaccctcaaagcaatgaactttcataaatcagaatgattgtttcagcaaggtttgctaactgcaataactatagtccagaaattatagacattacttatacaacacgtgaactgaaacaaacaacctgaaagaatgtagcatcttcatgtgttcaagaagtaaacacacagaatttaacccttttattctctgttttggccggctttccctttatttctttttcttcctatatgatataaaacttttacttgcctgttattagcaaaaggtgtccctcgctctggctggtaaaggagctctatctgaactacttttacacaacttgaggcagaagaaagcttaaaatcagggtttgcagtcagaattaataaaaaattggaaccaagaaagcaacataatctctgagaaatgatacagactaaaaaacaatgaaaaacaagagagaaaaaggagacaccatactagttttcatcttttccagaacagaatagcaattcaacagctagagctaaaatctcaaaagcacctgctaaagtaacataaattcaacttgaatccaagaataaaacaagggtgattcgattgagatgatcgatttggcacacaggaaaaatgagaaaacaatgcaagtattgactgcattttactttagggaagttccacagacaagtcagctaccccatagcaatcactttaaggacaagtaattagcccagcaacagctcccaccaaactcaatgcttgacccattcttgcttgcacatttgtaagtttctctagccaaggcttcaaacaatgatacgacacctcacttacaaaacatcacctttaatgctaccgctatatgagtgaggaggtaggagacatatatagtgagaggaacccataccaccatactgtaacctcgtctcctctgatgagaaagagatgatgagagagggtgatgcatgtgttacgcttctaagaagcaagctccatggtctggtcgaaaggaaccgtgctctggaagaggagaacaagcaattgagacaccaagtgagccgattaaaaggtcagatctcctctcttgaaggccaggatactgataagaagatgctatggaagaagctggagaattctgcaaccagcatcagctactccaaggaaaagcagtttgtccaaagcaatgatgatgcaaaggaagccatggatctcaacagctcattgtgtcacagaaggcagcaattctccagggcaacactagtgagatcaagggcgccaagggttccaaatccaccgcccaatccgacatgcacccaaccaaagacaactgtcagaaaggaaggatgcatggcccctcctcctcctccaccacctccactaccttccaagttgcagaggagcacaaaggcgatacaaagggtaccagaggtagtcgagttgtaccggtcgttggtgcggcgtgaaggaaaaaatgatgcaaagtctggatctgtaggaattccagcagcaacgaacagcagagagatgattggggagattgagaacagatcagcttatgttttagctgtaagtacatattttttctatcatgttcaagcatattgaggtgtaacatattgttctatttatctgctgattcctcctgttcttttattatttttccttttaataaacactttcaataaatggttgggacaatatttttctccaaggcattagctagcagttctttgttggattacagacatcggagaaggatcgtcaccaataaattaatttctgatatccaaagggaaatttgtttcgtgtataacatgctccctcatggttcaaagcctgctcatcagaatatatctatattctctgtccatccatgtgttacttgagagcagccaacttttttttttaggaaaaacatttggtttgtttcagaatgaggttctcgtggatagtcttggccacaaccattttagctgttgattcacagatagactagcgatacccctgccttgtccatcttggtagctaacatatagttttcagagaatttttaagttaacacttcactacagagaccatatataaatatatctatgtacataatgtctgtgatttttttaaaaaagaatcttaacaacaatttttttaaaaaaaacttttgtgatgttactatatagttgacaactctttagttgtataactactagcaaaattgtaatgatggatcatggttcgtacaaatggtgtagaacttaagccatgctttaatgttctctatatgtccccattaataaaaagaacattttgaatgtgtgcagtaaaaccttagttttttttgcccttaagggcacatgctcctactcttcccactcattggattcgcattgagaagtgtgcaaaccctcatatcaatgcaattttgcattgagatgtgcgtttgcatacttctcaatgcgaatccaatgagtggaagagtaggagcatgtgcccttaagggcacaaaaacattaccataaacctttgctatgtgtcttaataaaaatctgggttatatgtgtgcatatttgtatagaaagtatttttacaatacttagctgtactggttccataacatgttagaatagaaagtagtggtccaagctgtttacagggtactctccgtcctggaatagagtgaactttgacatttgagaggtatctccaaatatagtgtattcaggaaaaaagaagaagataatatttacttacataaaaatacggagatgaaagtagttgagtgcttaccatattttctataaaaaaaacttagattacaccttttaatcatgcggaatatgatcagatttcaacaaattagaagttaagtgagagctacatgcgtctattgcccaaaatagccacaatgcattgtattctaggacggacggagtaccacgtcaatacccaagccatcacttatttgtgagttgtgactgttgggagtgtcagttatttcccctatcaaactcttctcagaactaagccaaatcaaccaccttatattatcaattttcaacagattaaatcagacgtagaaaatcaaggcaattttgtgaacttccttgcaagtgaagttcaaaatgcagcatacaaagagatagctgatgttgaagagtttgtgaaatggcttgatggggaattgtcataccttgtggatgaaagagcagtgctgaaacacttccctaactggcctgagaagaaagcagatgccatgagagaagcagcattcaactatcgagatctgaagaacctagagtcagaagcatcatccttccatgatgacagaagagtggctacacctatggctctcaagcgcatgcaagctctgcaggataagtgagtagatgactgaaatctatttaacagaacaaaaattgttgactacctgcttcttttaaattctatatgcaatgatactaaatcaatacatcaacattcacctaattacactttccctttttgtagaattgaacaaggtattcataacactgaacgagtaagggacagtgcaagcggaagatataaggatcttaagataccatgggaatggatgctcgactctggagtcataagccaagtatgatcctaaactccttgtatgttctgtcgcaactcacaataaagaagaggcactttgtcacaaagtatggagtccaaatataataatagacatatctgcatgcccatcctacattattaaacagctaaagaaggcttccttgaagcttgcaaaagagtacatgaaccgcattgtcaacacactgaagtcagatccatttgcgaatgacgaggagctacttctgcaaggtgtccgctttgccttccgcatacatcaggtaacttgttccgaaccacaaattactttgcaatgacatttgcataaactaattaactgattgcaccgaaacaaatttgcagcttgctggtggctttgacgaaggatgcagaaaagcatttcaagaactaaaaacttatgcaagcaagtcagagtgatcagaattcaagtgcgtccaaataaagttgagatcacacatagattatatgagacacatagattattaagttttgccgaggttggctcaaaggggactccaccaaatcttgaggacaacgctcaattttataaagtttaatttatttggcatcaggttgctgatctcttggatacaagttgaggatctgaaaatttctaaacgaatcgtacaaataagcacacacctacttggctacttatttgcctgttgcgtaccgtctagaaacaaaaaaaactaatccaccaacatacccttgagaattgagatcattaagtcctggtcgatcatagaatcatccaaaaaaaaagggcgagcgcgaagcatgacaaaaacaaagcaatgcgaattggtttctaagggggtgtttggttgagagtgttagagtttaacagtagcattttcgttttatttggcgattattttttaatcataggctaattaggcttagaagattcatctcacaaattatttttaatttcgtaaatagtttatatttagggtctatttgttagtcactttagtatctaaacttctaaacacctcgactcaaaaggagctaaaatagtttagtctcattagtcatccaagagtagctaaaatatttttaac

SEQ ID NO: 3973 - DNA, 5374 bp, Sorghum bicolor
tatataaatatatctatctttctgtacataacaaggcctgactagccactttaggaatattttctccatatagatagccgcaatatgaaaattaaaatgatcagtgcaaagttgtatcatttgagctcatcgattaactggatatgaatgtttagcttttagattctaaattcttatagtatatgtagatactatacgtggagagagatacacgtaatcttctctatagtgtagcaggtctcgggggtttgacactctagtctgttatgtctgcggaaaaatttctcgcgaagtttatagcttagcggctggccgaaagcctacaaacacactttgcggcaagcgatgcgggttagcggccggccgtgaacccgcctgcaacttgatgtacaactagtctataactagtggtttcttaaaaaaaaaatagtccataactagtgaattaattattagtttatttatttggatctttagtctttaaattaatcaactgactgttagtcccacaaattaaatagagctttaaccatatccacgtgccgtgtgagcctagaacaagaccccgagtcgccttcccaggtctaatcccggcccaagtatccacgctatacgggccccgcacgaggtccatgtgcattcgtgtaacgtgttgtccaggctcccatagaagcgtgtccaagcttgccaggctcgctgatgcgtttgctttgcacccgaaaatggtagcagcagaacatatatagtactgactactgaggccttgtttagttcccaaataaatttgtaaaatttttcagaccttcattatattaaaatagagtattaaatatagataaaaaaataattattttacatgtaatttgcgagacgaatcttttaaatctagttagttcatgaatgaacaatatttgttaaataaaaacgaaaatactataatatctattttgcaatttttttggaattaaacaaggcctgagaagtgagaagtgattgcaaatgtaccataccagtacgatacagaatgagatcgtcctatctcatttttgttttggtggatgcaggggcggagctaagactgtataggggtaatttatgttggctacattggtgctaaaatatttgaatttagctttttccaaatactatttgtcttactgaaaatacaagtatcagtaatgctccattgtctcagaagggatgccgcaacctaagcagcatctgctctagctccgcccctgaatggagaagcgccgagctcaaccacagaggagccatgccttccaagagggatgaagccatctcctctattggaacagatgagatgacttgcaactataaaagggtataacatacatgtccgctcctgaatgaaatattctctaagacttgggaacatgggaaatattctctgcctgtcaaaatgaattaacccctataaagtccctgcacaatccctaaaaagtccctgcattcgaaacatgccctaaaatgagatcgatccatcttatccctcatcgtcactccttgagctaaacacattttaataacaatcagatgaaaggaagctagccttcatggatctaacaaccggggaaatatggtcacattataattctaaaataggcaacggaagtgctcatagtcatatactacatcaaaagaaattgacatgtattcatccaggagcaaactgacaaggcaaaatataacaagtggagtcccttattttcttcacacctctttccgaggcaaatcatgctacacactcatctatgtgaaacaaagacgagcgtccgtctcaagtccagtatgtattctatctcaggtgaacatctctgacgaccgtaaagaagctaaccagcaaaaatgccggcacgctgcggacatcatagccagagcggcacggtcgatttgggcctcgttacgtggcgacacgagcgcatgtgccccgacgccgaggaatacgggattcggcggtaggtggtgcacccctccctagaaatggcagccggctcctgcagcctgcgcgtactgctccccgccactcgcaagtgggcccacgctccgggcctctgtaccgtcacgcaggtggcggaccgcacaagcggaagcggaagcggaaacgctgacgcatctctgagcctggcgccgattcctatataaccagcgccgctagtttccgggtccttcgctgttgagatgcggtaaaaaagtgaaagaagagcccgatccgctcctccacgccaaacccggtaaggccgccgccgccgctccccgaatggcctccacctcctcctcctcgcctcagccgccgccaccggcggcgtcgccaggggcggcttccccgtccgaggagcgccgcgcaggcggaggcggccggccaccggtcccgccctacgtcaaggcggcggcggggtccctgggcggcgttatggaggcgtgctgcctgcagcccatcgacgtcgtcaagacgaggctgcagctcgaccgcacgggggcgtaccgcggcatcgcgcactgcggcgccaccgtggcccgcgccgagggcgtgcgcgcgctctggaaggggctcacgcccttcgccacgcacctcacgctcaagtacgcgctccggctcggctccaacgccgtgctgcagtccgcgttcaaggaccccgacacgggcaaggtctccgcgcacggccgcctcgcctccggctttggcgccggcgtcatcgaggcgctcctcatcgttacccccttcgaggcaagattgaacatccctctgttcctcagccgctctttgtactctcttttgccctgcctgcactgctctgcatgctatagcttacactgatcgcacaagaactgtttgccgtttagacacaaatcgtgtattctatactagatgtttcctgttgaataaactactagcttccttttacctgaaaaaaaacccgacgtgagagagcttacgttcagattacctatgtaaaagcggcatctttactgtatagaaaaagaatggtttatattgtttattcttgtctcttagtggtgttggatgcatttttgccagcttgggattaaagaaatgacagctatgtactttgcagccaaattggagtttgctagaaccacgaccaggcagtgattgggcaattgggacattaaaaaaaaatggagcaattgggaaatactgtatgtttaaactctgatgcagtcaaaacacatttggccaagaagttgctgccaatcacctgtttctcctctagtgttaacttgattgtgactgaggatgaagtaatttattttcttaccatagtcatgttgtccgtttgttcaatggaaacactatttttaaaattattacctctctggtccttgctaacatacaccatagttttgcttaacatgacaaaagcagggtcatcaatctatgtgaggaaaacaaaggctagatacaaatgggagcaatgggatagtactaggatcacaattttgtatgcttcagtctgaactaatattagttcgaagaaaaacaaagtctcaactaacatgctctgttccagtcgtggatcaggagattaataacacaactacattttgccatttcgaataccagcttggagcttactgtttagtttttatgttgtcccaagcgggcatagataatgtgcagcttctccctattcacagtgattaaggggtacctaataattagaggttgctggaaaaacacattacatttcttttgttataaattgatctggatgtacaatgttctgtgaaatatttacatcagtaccatctggaaatggaatcaccccaagccaaccgagcatcgtatgtactttcatattctttgaggtaaagtcgggatcttagaaccagtaatattttgcataaacttcagcagctttttgtgtgttttgttgttccacttgtggttggcaagcgattttcatttttgtgagtgacgcttctgcttattacaaaactatgctgagagaattttgtaacttgtaatgtttctttgtcatggatgcaggtggtaaagattagattgcaacaacaaaaagggctaagcccagacttgcttagatataaaggtcccatacactgcgcaagaactatagttcgagaggaaggcatatttggtctttggtctggagcattgccaactgtcatgcgcaatggcacaaatcaagcggcaatgttctcagccaagaacacatttgatattgttctatggaagaagcatgaaggggacgggaaggtgctcctgccatggcagtcaatgatctctgggttccttgcaggaacagcaggccctgtctgcacaggaccctttgatgtcgtgaagactaggttgatggctcaagggagaactggtgacatcaaatacaatggcatggtgcatgccatacgaacaatatattccgaagaggggttgcgagcactgtggaaaggcttgcttccccggctcatgaggattccacctggacaggctataatgtgggcagtggctgatcaggtgatgggcctctatgagcgaacttatctgcagccagttcatatttgaccatcctacttcagtgctgcactgaaattttttggttggttctcatgattttgaatcggtggttagacgtggaagccgtccattaagtgtaaactgttccagtgcctggatattcatttgttcattgcctagagttgggtattgatggaagcaatgaactcttgtactactattttgttgtcaataatcatgaaactccctatttggagtgggaggatatttccgttgtggtgactattatggttataaactgcagtagccagtagcatctgtttgtatgattgaatctactcctatgttcatctggaaagctgaaggttctctttatgatcggccgggccatcaataggataccatttttacctgggctagaagtgatattgcagcccatgagcaagatcgaagcatggcctttctcgtacactgttcgtcctgctactcgcgcaattcctttttctttggtacgaacatcttttgaagacaatatgaaaggcaacaaacaggccgtagatgactacggctttggaacgtgagattttataggaaacttagagtaattatatatataagataagaaataaaaattgataaacaacactaggttgttttagccgccatcgacacatgatttttggcgggttcaatttgcgccctcgcccgccatcttcttccttgcccgtgcccgctatcatctttcctagttccagcgcggcggctagggttttggtcatccctcttcctcaactggcgggcttaagcaggccaacggtgaggatagcatccgagcagttcggagccttggcggtg

SEQ ID NO: 3974 - DNA, 6650 bp, Sorghum bicolor
ctcattggagagccatcccatgaataatctctttataaatctctcgtgtctccaacacactttctaaatttcgttctctgtactccaatggcctataataattttatttatgtgaaaaaattcatggtagaactaccatatattgaatttagagagcaatataaactctccactagtggagagcgagaagggtggttttggagagcggaaaaatggagagtggtttagaaagtctgttggagcacgattttttggtttgtttctattttttttttgataaagagccatatagagggtctcttgaagatgctctagaaactgcataccagcttgcttatgaaccgaacaacacatattgcatgcacaagatggctaatcacttatcacccttgctgagcacatagattttgcatttcacaactagcaccaaattaataaaataatatagaaacgaggttcttttactgtagatgaaaacatacctgttcaacactgcctggtccaattaaaacaagagcaactccagcagcttgcatgacatcctgcacattagtggcaagccaagaaataagttcagaattcagattatggagggatcaacaaagagaagcctgcctgttctaaggtggcttaatctttcctctcgtatatatatgtcacaccctgtaaccattgtgttaatttgctaaagttgtttctaggaaaaacaacattactaaactaagaaaatgagaagattcacacatagcaaaactggaaaaggaattcttaaaccaactttgatttcaagtcattatctgtatccttcctcctcgcacctaaggcctgtttttgagagatcaatttaatatcaggtgggcattaaggaactcccccacctttgacaacattagaagatatatcatgcaaaaaatcgccctctgccaaactaccactaggcaaggtacaactagaaggtttagaaggaaaacttgttaaagcaccttgatgcaataagcaaagtggaaagtatttcaaattttgttactgcacactggcaactggcaaattttgatactacagaagaacagcacgagaaatcagccatggaacctgctttgcggctagaaggtccgccctctttcggcacaacacgcatctgcaaacaggcagaggcatgcatgccaacatatcagccacaacagtcactcataaatcaacgaataactcccagataacggtgaaccgacccgaaatggcgggcaaacgcaaccactgccttcctttccttccacagatcaacgatggacaccgccttgccgttcaggtcgaacacttcgactccctgcagcttctgcacgagcccctccgccggcgcggcctccgcggtgctccctgaaaatcgcgtcgaacacagcacgtgacagagagtgagcgtcggcgcgcgaggcttcttcagagaaccgaactgacaatatcgaagcgacagaggggattggggtaccgaccaatcgctccgaacttggcgtcagggaggaggcggcggaccgggtgcgctgtccgctggtcgaagaagaggccgctgacagcccccctcgcgcggagacactgcgcgggctggcgcggggccacggttgccgcagccgggagcgggccggcgctagcggcggcgcgcgccatgacgagcggtgcgcgcgcggccatgcggcgggcactgggctactcctgcctggtcagtggcggcgagccggcgagctctggcagtccgggtagttacgtgggatctcggtggccaggatgcggttatgcggctgtcgccacttggtgggctcgagccttggaagaagagtgcggctgcgcctgcgcctaaggtgtggcccacgcgtcagccagagtacgcgcgcacccaggcacgcctcgaggccgcggacggcgcggagccagacggacctcgcattcgctgagaagccgaaggccgtagagcacacgagttgtaggcttccagagcacggcggggcagcatgaggggcttccgctttgcgctggtccgtgcagcgcggtcgcggtcgcgggcggagctccagaccgtgcagcgccgcccgccgtcggatctcgcccaacgtttttcgcactcggcgtcagcgccggcgaggccatccttcggcatcgcgttcgacatcgatggggtcatcctgcgcggccgaagcccgatcgggggcgcgccgcgggccatccgccgcctctattccgaagaaggtaacgcccttgcgcttctcgtgctctgctgcattccattgaagcagcttgtagtttcatcaggaggactcagagagtgtctcgctcctgtgtttgtaacggcgaagtggactcagatgtctggccatgcctgccggctgccgcattcgtgtcttttgagcatttcgtcgaacgggtccaagtcgttaggcattgtgtcttgtgtattacaccattattaaatggttaaatcgtatttggacctaaaattgaatattttaggctgcatcatttactcgtttctggagcgcaaacctatgagagtaatttattttgccaatgttgctattcgtatttgcaaatttatgcctataggttctactagggttaaagattagggcactcccaatgcaaaactatcatggtttctatagacattaattatagtgccacctaagcattttgctgatgtggcaatgtagttattaaagagagagaacaaaaatcatagaaagttagaaaccatgtctacacgaaatccaaggcataaagtgatattattggctgagaatggagagagaatgaatctaattggataaacaaatattccatagaaactatcgattgggactatagtttctatgtatagtgtctataaaaattaatagatatagaaactatgtgtagtttctagcattgggagtgcccttatggatcacattatttgttccttttcaggtagcctgaagattccgtttctgtttttaactaacggtaagtaatccactataccatttgcacaccctgttttcctatcattgttgcatactagctccctgtttttgggatatttctaaaaagttcctactatacatcaagcaatgcattcgatgaaacctgttcttcgatagacattgttcttaactatactgccaaattctatggcatttactagtggtgcatttgattatttgactaatattgaattatcttcattcaacgcaatctgttctttgaattactatctaagaggcaatcttgttctggaaaggttgattgtcaacttcttaatgctgtagataattgttgtatgaacagtgaacagtccatcctattataagtttttgttatagcttttacatggccatcagtaatcacagctaagggttgtacaaaggcaccatggcatggagtgtggaatttttaattgtgttgctgatttttttattgaggttattaaggtttaccaatttgttggtaggaggaggtgttccagagcatagaagggcccttgagctaagccaacttttaggagtcaacatttctccagcacaggtacttctacagtactcatgagtcattgcttaatgggaccttcaagctaactaataaatccctatagaaaggagagaaaattagtgcatctcttttctttatcttctcaaccattggctatgttaaatttccatctatgattttttctgatgcgtgtaggttgtgcatggccattctccttacagagagctggtgaagcggtgtgcctttcaagtactacatcaatgctttcttgtttcttgattgacttgtagcacctgaatggaacccctatttgaactctgcagtttcaaagatgaccttattgttgctgttggaaaaggagagcctgcagtagtgatgtctgagtacggatttaggtaattcttcatgttcctatcatgggtcaaatttattgtgtgaatttctcacgagtcatctgtgtctacagaaaagttctgtccatagatgaatatgcatcatattataaagatattgaccccctggctcctttcaagacttggaaagttgggcaaacagacagttacatgtttgcgaaagtgcacccatcatatgatgtttactcagagcgagttaaaggagtgtttgttgtcagcgatcctgttgactggggaagagatctacaggtactaatagaaaaccttcttgtgctgcatttgtttcattttcacataatatcttattgagtgatccataaacatcttttcctctaagagcatctgttcacatgaaattgtgattacttccttttcagattggctacataagttcaataatctgttttttttttatattccatatgaaaggtactctgtgacatcttgtctactggtggacttcctgggactgaaaaaggggatcaacctcctttgtattttgcagctgatgatcttgaataccaggtaagatgataggtcaagaatggtgctacactgtgaacaccctacaggccacaatttcccttatttccatccaggttcaatgctagtaagataaccattgcactggaagaaacttagttttgagatcctatggcaggctgcatttccttctgagcggcttggcatgggtgccttcaggatagctttggaaagcatcttcaatcagtaagctatttttatatttatgagacattgtacttcaaatttataagcatggatgtgcggccagattaatcattttctgctcacttaaattgcagaataaatgatcatccactgaagtatacatcttatgggaaacctaatccatttgtgttcaagaatgcagcaaacatacttggaaaacttattataagtatgtatcctaattcacagacatcaatggaagtaaaagactgtcagttttcaactatctacatggttggcgataatcctaaagtggatatcaatggagctatgaaggttattctttgatacattttatcatttatataaaagaatattcactgcatggagtggttgatggtacaaggatgctgtacaggtttcaatatctgtttccttgatgagatcaacactgcctatcactacaatatatatgtttgcagagttgaacagctagcttgtagtccagcaaaaaaacaggctacctgatgcattggaaaacagcattaccctattgaataacataccatccactttcaacatttttctttttctatgttgctcttctattacatttaattgaggccattgcttcctatcaagagatatttaacctgtgtaatttgaacttcccaggctggccacccatggtcatctgttcttacaaggacaggtgtttttagaggaaaagataacgacccacagtttcctgcagatgcggtatatcttatgaccaaaaacttccgttccaccctgtgactgttaagttatctggtaacacatgtttggcaagaaaatatatgtatatgttacagatgtttgagtcttaaattaagaataaccatgagctacttgcccatcttataatgaacctcattgtctcagtgctattagccttgttagcgttctcagtagtagagcagctcacacagttagagagtttgatctgcatggggtcaaatctcgactctcgagtaatgagtaatgacctgaaaaaagtgcacgatgtcgtgttataacttatattgcgagtcctttcacaccacaacgccagaaaatatatgaatttaatgttaaaaaaaagaaaatatatgaactaacctggttcagctgggtgattggtgtgggcttacaatttgggtatctttctttttcttataagaaaacaataacctagttcattttttgttaacataatatgttatattcatgtttcactggcagctaatttttttaatttgttatttatgttccttggattgtgattctcgtggatgttctcatagcaggtttcctgcttaactgaaatttgttgactcaacactatcgatctgttgtgataaaatatctaggatgaaaacagaaacattggttatcctggatttatcatcataattggcttgctgttctgataaaagttgtgtttgcctttcaggttgttgatactgttgaagatgccatcaactatattctggagaaggaatgtgtacagtgatgatactgttgaagatgccattaactatatgctcccttgatcattgtcatttggcatgcttgataagataagatgtacagccctttttttttgtctagtaaatttataatccgtggctggaagtcgatctcttatttcttatttattctaccaacaaatacatgttagagacagcagactatattttcttgcacttttttttgggtgctgaagaggctaaatttgttacaatctttatgtagtacaaaggtcaaaaggctccatgcagtggaaccgaaacagaaatgctgctggattcttttgatgttgtgtgtactattataggtataatttggtacaataatattcaaagaaattcatgagctaacctttttttcgcataaaaagatttaggccttttttaagaccagtgatgatagcttacgtactgagccaaggcttaagccgagccactgagcagtcggccccacataatctaaattttccgtagaccaagtcca

SEQ ID NO: 3975 - DNA, 4723 bp, Sorghum bicolor
gtggtggctgaggacaatggcataatggtatgaggcagggggttaatatggaacttacatagagagattttttgcatgttggaggaaggagacaatacgtcaaccttcatatgttgatttgatagacaaaacatcttccatactcatatatagtatgcaattttatatcaaaaaaatatgaagaatacaagatataaaatactagcactaactatttgaagcaattgcattgcatacaattatttgtctacaatgcagttatatacacatgtataatatttttgcatagtgttaggtatagcttagagtatacatcttttagattgagttgtctaatccacgtctttgtttatttctttctttttgtgagaagagggagatgggaagaaggagaaaggagaaagtgatataggtgaagtaggtcgcgacaatctataccatgtttgtgcattgctagagcgcgaaagtggtttgccacagccacacgcttggtgcatgagctcatcaccaccaacttccattgtcatctctagccacattttcgctcgattttctcgtgtagccgtcccaagatgaagtgttgacaaccagagccctgccaaggggtgtgcaaacagtgtgagggaacatgacctctaattactagggcccccaatttttgttttattttctagctaccaaccatcattccatcgttagttctgatcaccaggtgtgagcaaactgctagtggctgccatcagctataggcctagctaggggataaattcaagcccatgccgttaacttttgtgatgagtcaggaaacccctatgccatttcaatcttttccttggatttgaatttactatcgttcatatcattatatgaacttttttcagtcaaacatcatacgaacaattaactatcctttgtatggttacgactagtgttctaaggttaagacatatataaatatgtatgtaagataattattacggtcatatttatcaaagaataagcctcattttatagtttggtatagggccttaaattttaccggcacagcccggttgacagcctaggcgacgctctatatggtcccccaaccccttgacaactttggatccagagcaagaacttgtttttgatcctgacatctccttattccatcctggtgtctcctctgtgaattttttgtgaagtacccttcagtatagaagtagctagtaacactgctttagtagcagtgcaggacttctatgtcctagttttttttttttggagaatttctatgtcctagttttgattatctatggagtcccttactgcaaagcgtggggaggccatgcctttaggtggtcgagtttttttttctatattttttttttcaaatggggaataatctgtggtaaatttatttattatagaaagacaaaagcacaatggagggagattagcttaaggccggtgatcggcggcgggggatgcagagactgtggagaacattctctctctttttttaacatgaaagattctccattgctcatgttaaagttaaaccagtactacacgagtacaatttgaaacgctgtccgggagaagcatcgagactgtggccttatttacttaccaaaaattttacaaaatttttaaagatttctcgttatatcgaaccttgcggcatatacatagaacattaaatataaataaaaaataattgattatataatttatctataatttacgaaatgaattttttaagcttaattagtctataattcggcaatatttatcatatataaataaaatgctacagtgtttattttgaaaaaaaattcaactaaacaaggcctgtggagaacaatctcgtcgcctggtcactgtcacaacaccgagcgatccaagctttgcagcagcggcacagggtgtgggcaggcccgcatggacgactcggattacgtgggctcgctggacgggctacatgggctagtcgtgcgggtcgatccagcgggttagcggcaaagcccatcccacaccgctctggttctgacgaacccctttgccgccgccgccgccgccgccgcagtctttgcttttccggtgaaaggttttttgcttaggggaccatggaggagtacggagggggagacctcctgagcgaggctatgggatctgcggcgcgggtggtggtggtagaggactgcgtggaggcaccaggggccttcgtcctccacctcctcctcaagcgcgcgctcgccagcggcggcgcggctgccttcctcgccctcgcgcagcccttctcccattacgaccgcgtcctgcgcaagatggttcggctcgccccctcttcacctcactggcatctcgtcgaacacgttttgtgcttaccggcttcatgcctgactgtctgtgttagtctcactgctacagtagcgtgcatattgtgtctgcttaactgctcagtgcatctttgtccatgtcataatgagtatggtcaactagggattagagtagacccaagttggtaggatcatatttgatctggctttaaaagaatggggtttctaggctcttgttcttatgctattggtcacgtgtgtaatcaggcatcttacaccaacattttaaaatgttagattcttggtgcatgatgcgatattattagattacatgtataaatgatcctcattcttcctttatggcttttggaattgttgtcaagttgcctcttgatattagcagcgcacactaaatagcctaaattttggccaccttcagttgtgcacagtggtcttcaaaaccagcgcgatgtggtataattttcagttgcactctgttcatttggtactggtataatagctcatgtgctggctgaggcatgcaatatagactacagtgagctgaggtgcatgctgatcttttgtagaactctgataaaatgcactagttttatatttgtgtcagtagttcggcacaatggggtttgggactgcttccaagagattattctaatttgttcactgtatcggaaaatgcatgctggatttctctagctaaaatctacacagttgcattatatatatctttttggtctttggaaatttgccagggttgtaacctttccctgcataggaggaacgagaggcttcatttctttgaattgctaggattcccaggcaagccgtcattttattaccatgtgtatttccatataatgttgggtgattcctaattagggaggtgccattcactatgtttctttactgcaggtggagcaagggaaggcacaattgctgataggtttgttcaattgtacaatgaaattcaaagactggtggaggcaaacaggactggagaaaatgcaggccagttcaccgtcattatagatgacgcttccctgttggaaattgtggcccttggttctgtaaatgatgtactggatttcttgcactattgttttgcactcacgtctgagatggtaaaatattgatcaatcaaaacattacagtactgctggtgattgttaagtcatggtcatgtcttttaccctttatcatgtcctgacagaattgcacactagtggttctcatccacgaggatatatatgcagacgaagagaacattggtctccttttacatctgcgctacattgctgatcttgtgattaaagcagcacctttgagcactggtttggctgctgatgttcatggacaggttaggctcctgatccttcatatttgtttaagtttgagctgtaccatgatgcattatggcttagttggattcgttgacctggtagttcgataaactcacattatttggtcttattttgatgtttcacaactttcattttaccctctgataaatcttttctgaagcggtagaaatgtttctgcagctgtcggtggtgaacaagggtacattcggcgagcaaagggcaaaagcacagaaagtttggaacttccatttcaaagtgaaggaaaacggtgctgatttcttctatccagggactagacattagggagtacttaggccgtgtttacttcctcaaccaaaacatttcgttacactgtagctttttcgtttgtttgtggtaattattgtccaaccatggactaattaggctcaaaagattcgtcttgtcaatttcgaccaaactatgtaattagtctttatttttatctatatttaatactccatgcatacgtctaaagattcgatgtgacggggaatcttgaaaaattttagttttttgggaggaagtaaacaaggccttatattgcagtagaaacgacttggttgtgataacgggtgctgctatgtttcgtgtaccgtctgataagcacagcagcatttcagtaaagttccgtctcatcctttatttcacacatacgcttgcgttcaagtcatcatagctttatttcacaaatttgcttgcgttcaagtcatcgtagctttcaaagcgttcgtcacagccaagttcattgagtttgatctagcacaagagacctattttgcatctcacgctagtcacttttccttttcaaggaaacagagcagccaaacctctacttgtgttaatttggaacacgatcttcgaatgaatggatgaactacaacagaattccagctcaatcatattagtatgtatagtaatataataatagcaatgacgctgctgatttgctcctccttaagacacttggctaagaatatctctgcaaggaaaatgaagattgca

SEQ ID NO: 3976 - DNA, 8262 bp, Sorghum bicolor
gagcgatggggttcgcggttggggatgaccggatgaccaagtggagggagggacaaggacgagagtgttggggagcagctggaggcagggcacgagcggagcggagcgaagaggtggcggaaagcgacgccttcacgcggcatctcatctctcgtacgtccttgacttgaccaacgccctagcaggctcatggtgtgctcgccgaagattccctttgtttccaagcatatattcatccttcaattcttaccttcgaagacgatccaatatccccattcttcaacttgttatacgacgacaggtgcactgcgaagcatacaacatgtagaagtgaaggctacgtgtatacttacatgtgtttgagaatctagctgcgacgaccactgtgaacctgaagttcgaactgatttccgacagctacaaaaagtagcgtaaaaaactaacgctttctcaatgctagcttaacacataaccattagcttctttctgcatgtccaaacgatggttaaggagctaagatcaggaatagtcagacaccgatcattttcttgcaatcacaaaacatacacagagatactaattgattcaattgacagtaatatagttgtacgcacagttaacacgacaaattaataaactgactctgaggatgataaaataaatctcaatataatttgagttttgctcacacaacaaacatcaggttcggctagaaacaatcacacacacgtcgccacttgtgtacagtgctgagctatctgtaacctatttatattgctgatcttttgcatgagtttcgtgattggtttctccaagttctccaatcatatgcaaggggtatatatggaaacgactcacatataccggctgcaaatgtatggtgatgatttggacgtattttgcctaagtattgagcatttgaggtattcctacaaatgatacgtcaagaaaacgacctctttgtcacaggaagcgaatgcaactgaatctgtcttcatcaccaccttcatcgtcataacattattatcgttactagatagagtgccattcacaattctcttctggcagcaccttgttgtcatcctccaaaatccaaggccacaccataacatttccatcacaaggttagtgagcggccgatgtgctcgaaagcccaaccttttgtgacgtggcggcacctaataggctaagccaaaagtttttttttgttcatactactccctttcttccaaattataagtcattctaaaaattttgtagagtcaaaacattttcaagtttgaccaagattattgagagaaatactaagatttgtaacataaagtgagtgtactataaaaatataattaagaaagaatctaatgatacatagttggtatcataatatatatttattattttattatataaatttggtcaaacttgtgatattttgactcggcaagatttttagaataacttataatttgggatggagaaagtatatcatttaaatacttattctaggttcaaatctgtctgcaccataatgtgacatgtaattaaaccgataaatcaagatccatgttaactatattagctaatctaaatggatcaaatcttgccttagctaatttaaccgataaataacaaacgaatcaaattcagaagaaataatatgtttgataataacaacgtggctaaatggtgttcacttctatgtggcttagccgcagctgaaagatttatgtaggcaatgctgcagctatgaatggatcgaccgctgcggcggctgatcgagagctcaatggcaatactgtccaaatttctcgcgggcgcacgcattcgtaggccgcaccgcgccaccgggacgggaagagcacccctctgcattggcgcatttgctccgctcgcgtccccgcctcccgcgcacgacacgctctccgctttttttgtgtcgacgagttcgagggggaagaggcggggaagccgacgggcgacgacgaccgcggcgcaaggcgatgtcgtggctccgcagcgcggtgcaccgcgccgtggaggcgagcggcggtcgcagctccctcctcacccgcaccgtccgcacctcccttgacaccgtcgtcagtggcgtccaccacgccggccaggctgtcgcgggcggcgccaggctcatcaccgtaccgaccaccccctagctccgctctcatcaacggtcgccgcattgtccgtacgttcccggcgatcgttgatggctagggtttgcgcttgtgctctcgcaggggaaccggaactacaagagcgtgaaggtggcggcgaagaggttggaagatgcggcgctctcatacaaaggggacgagagggtgcagctgctgcgccggtggctcgtcgcgctcaaggagacccagcgcgcgaccacggcggtgcgggagccgcaacttggggacaatccggaccagaccgtgcccctgctggtcagcatcccttcctggctggctgttggcttggtttccagaattttttggatggaattgcgtgatcccgactcactaggcgcctaaccaccagtgcttgcgggcgttgcaggatctgtacatcgattacgagagcagcgcggagccgatgaactttttccatgtcttcctctacagccaggccatcgagtgtgttgttctctccttggtgagttgggtttgtggctgtgcaatttggtgttgcaatggtctcgttgtagccatgtaggcacctttgtctggtaatttcaatattttgactcgtcttctatgatcagattacggaagccccaactgaggaagaagtttcactgatctcagaagtttttgggcaagttattcaaccatttgatgtcttgttacttggttcttgaaaattttctattcatgtatgattgttttttattcttggccttgtttagttcctcaaaaattttgcaaaatttttcagattccccgtcacatcgaatctttagacgtatgcatgaagtattaaatatagatgaaaataaaaactaattacccagtttggtcggaattgaggagacgaatcttttaagccttgttagtccataattgaacaatatttgtcaaatacaaacgaaattgctactattcctattttgcaaatttttttggaagtaaacaaggccttacataacaagtctcatgcccagtgtaaaaaaaagggctatgtatacatgatctcaaggttcactgttacggattcactttacaaatgtctgcccctgcactacatttagcacgttaatatgagttatatactcctttcaatttttccatcttacctctattcaagcaacatataacgctatgattcttcattacagaatgtgcctttcgggagggaaggatgtgcacaatgcactcttgagtagtttaaaggacctggcaagattattctcgagttatagtgatgaagtgttggtatgaatttccttcctgttttacatgttcccagcattaaaccatgtactcatgtataactacttttaatcgtagaacctcttagatctacctcaacatatgagttatttgatcattgagctatcttgcataaatcatgtaaaatgtactttctacctggtcttattagatgccagcaaaagcataaaatgcatcaactgtgatgttggcttatatgttctccctttccaggcaaaacgtgatgagctgcttgagtttgctcagggtgcggtctcagggctaaagataaatgctgacattgcaaggttctctcttttcacttgggcaggggtccatttttgcttgtccatgtttacatgctttaaaattttaaacctctattttctcaattccagattagataatgaaattactcagttgcaacagcagataaatttaatggatgctcttcgtgctacatcaaccggcaatcaggataaaaaatctcaaacaaccactgaggtaggcctaagtttaaagttattaagattgtacaactgtgggttatcctttctttcaattgataaaagggagcactgtcatgcaatgtatttgtaagattgatttatttcatctagatgcgaactactcaatccatcccaaattgtaagtcgtttgacttttttaatatcaagtttgaccactcgtcttattcaaagttttatacaaaatatcattttttttgttgtgtattggtttattaataaaagttcttcaagaatgacttaaatttgactatatttacacaaattttttgaataagacgagtggtcaaacttgggataaaaaaagtcaaacgacttacaatttgggatggagggagtaaatggtatggtaatgaatactgtgcctctgatttgtttaaaatgcatatttgtaaactaatctttgtgcaattgcacggaacatttatgaagtgtacattagatcgtttcttttctattccaaatacagacatgttatgttaggaaaaaataatttcaactgttagataggattttaaccattgtttagttcttttttttgaaatatgtcatgttttcctttttaaaaatgtgcattcagaaacctttttttcttgtatattccttgcatgctgtctttaggtatcagtagtggactgaggttttctttccccatcatattccggtatagttcaacttagtattcatcattgttaatatagttagtgtaagtagattcgatgtatttatgatactgtttgcagggtttcaaaaaggcagtttctgaggttcgactttgctctagaatggaagagcttctattgaagaagaaatcaatacatcctggtgattcattggagactcattttgagaaggcatgatgttcctattatttcaaaattaatttcacttctattttttgctgcatgcttcttcacttagcacttcaatttaatagagccgaagaatctaaagcgtttttgtttgctaaaacttatctaattgtcctcccttgtcaagtgaagtgatacatgggtgttatgttaatgtgcatttataaaactttgcaggttgataaactgaaggttttgtctgaatcccttgcaaattcatctgcaaaagcagaaaagcgtattatggaaaataggtttatatcttgatcattctttgtgttgtatatttagtctcagcaatttagcatgtatcaatcataagcatgcttgcatacttatatatatatcaattgaacacatatgttatgttgttaattcctctaatgcatatttttgagccactgatttatttggttcaaaaacatttgaaaagacactctctgcttaaagtgaattgattgtctatgctttacaatgcaggctacaaaaggaagaatctcttatcttccgggtcaccaaaacaaatgaagttagtggtatagaaaaggtattttttttgtgctactagcttgtgactgagtcatttgcaaaccaccatattgacagaaaaagccacaaccataatttcccaatgaaacaaaaggaagacattaacttcaaataccatatccatcaaagcagttgcaaaagaaaaagtatagcaggatatccaagctgttccaataattttttcaatccttagtccatgcaattggttttatgcttctgcgatctgtctgattgatgcttaatcaattaagttttataaaaggaattagttgctgagatctctggacttgaggagcaaaggaatcaacttgaagcagaactgaagaaggcaatattcttctttctttttccaccttcatgaagatctatcgttcaatatatttcttccaatattccaatatatttcaccaacttacatagtggccaaattgctgggttttttttgctaaacagttcagggtggagacaacctacaaattttggcattgacatgcatgttacctatatagtagataaatgtaattgttctttgataagccatcataagttcttcctcttaggacgtatagagacactagttatgtggtaatatgaatgctattattactatgacctgtgaatgtgatatcagtttctctgaaacgttattattaccatttgagaaaagaaatgttattattccctgcatctcaaatatatttaagttagtgtgacctgctttttggtgaagcagtctattaaaatctggcatacagttcttaatctttattgtttaggtttacttattcatagaggctaatgtttacatgagaggtttgtttttaagagtgattctgaaattcatattacaggttaatactaaattgaaagtagctacagtgaagcttaaaaaaactagagaggaacgcgaccaatttgatgaagccagcaatcagattgtgttgcacctaaaaacaaaggttaactttctgtttgttagtttctagtttaagaaatgaattatgctagcacagttcacttgtttattttctgacatttcaccaggaagatgaactttcaagatccatagcttcatgcaaagtagaagcaagcactgtcagtgcatggatcagctttttgaaagatacatggaaattgcagtccttgtttgaagagctaagggaaaagcaggccaagtaagtaggctctctccctgaacccctcaacaatacattgtgataactaataattattctcagaagttacgggctcaaaatatttgctgacatacattccttttatgttgactgcagtgaagaattggatagatgtggactctgctttgcaaaattgatgaagtatcatgtttctgcatgcgtggtacttaatttgacttttactttccgaagaagtgatacgctattgaggtcttctgtttacgagcttttgcacagcaatatagttgttgtactgaaattttcttttggaattctaggaagagctaagcacttctgttgactgtattaaaacctttgttgataacttgaaaatatttggtgacaggtatgattttcatttttttttcagtcttaatttgttcaaagcatcttccctgtggctgaacatttttagttgcatcactagatccgtgtcagcagaggatggagctaatggtccgtctaagcaatcaaaccctcgcaaataccttgaggaagaatatctccaaactgagaaaaaggtgattttgctgatgattatttaccctgctaactgatgataaaaatatacattactgatggaagagaacacgaaaatttttagttatagctggcatcatgaagcctgactcagaaagtatatttttgtgccacttataatattcaatatgtgtgcgtctatttcaggtcgtagctgcattcagtttggttgatagtctcagagcagtatattcttctaaccaggattactataaaacaaggtagttgcttttcaggatccctcttgtgctatctttcgagtccaggctacataatttgcatgccgtcctttacactgccagatctgtgcctatagtttgtgcagaagggaagatcctgaggtaaaaaatctgtttgccaccgttgacaagctgcgcatcgagttcgaatccgtgccacgtccagtgcttcaaattgagatcaaagaacaggcagagaaaaagaaacgatcccgttccttgatagtgtccgcgtcaccccatccgaggagcgactccccgatcgcggctcagctcaggacacggctgccgtcagagtccgaatcggagctggccaagttcgagctggaatacaaggccgacgagatcggcgggtgggagttcgatgacctcgaagacgagccaacacctggtggcttcctatgatctgggtaagatgtgaatgagatttatccggacatccagtagtcttcaatgtaaagcagtagagtcattaggacaaaatcattgggaaatgtagtatagcagagtgcaggtccgtgtttctttttctgtcacgtcccggtcgctctagatttttgctgggattgacctgcaaatatgacaagtgcaagcgaacggcgtacgtatatatgcaaacatttttcttgggtacaatgccatcgtgacgttgcacgggaaagtcaacctcctcttttaaccgtctgcattgttatcctttttattttgtttccctttgttcttttcctcagctttagttgacagcagaaagatcacagacgctaaaagaacgcaaaggaacaaaagaagctctcagccctttctctgcgcaaaggtgtttatcctacctttgtcaacctatacttttgttttttttaacaaactcattcgtgctctcatcttacaaacagtaaaaaaggtaacaa

SEQ ID NO: 3977 - DNA, 7561 bp, Sorghum bicolor
atcatatcatcaaagacataggccataagaggagccgttggttgtactatcggagtataatatgaggattctcgtggtcatctctctctgcagacctaacgccctcaacgaagacatcactttttgtttgctaaaatagaacgtgactttttaatatctagtttgttttatgcccatgtctagacccggtttgacatgcataatttttttctgttattatattttataaaattaattaattacaataactatgaaattcatataacatgaatgtgaaatttctccattccaaatagcccttatgaatgcatttgcgcaagtctttgactctaggaagctacatccctatacatgtatcgactctaggaagctacatctttctttgtcactaggaagtttgttcctaaatctaagtggttgtacatgtcctttggttttaaagaaacagggtgtcaccaggcaccgaacggtacagctgcatgcaagccataacccgatgatccagcatcgagcgcaacacaaaccaattgaaaatatggtactacgtttggcatagaaacaccaagaacaaaaaaagggagcaaactgcaacaaaggaatataatttacaagacaatgtacaactgctcttagtcttggtagtgttcatcgataacagtgtctcggcatatcagccactattttcaactgcttttggtccaatctcatattttcatctgaatggtttagagatatgtaaaatttataaagaaatttattttaactttgtcaaataaagaaatgaccaaaataaatattatatatcttgaaaagttatataactttgtagttaaaatcttttttgatttaaattcatttagtacttcaaaattcgttttttttgccgactatttttttagacactcggcaaaagaccttctttgccgagtgtttttttaacactgggcaaaaagcctctttgccgagttttttttggcacttgacaaaaagctaatttgccgagtgccttaaaaaaacattcggcaaaccaattaacactcggcgaagaatcggattgcaagtaacctccacatctccgtgacctaaatcctcaattaataggaatcttcctgtttggctcaaagacatacttgatcaaagggcccttgatggacagcttctcggggaactcggccttcaatttcgatgcgtccatctagttgttccttctaggtgcgactatgaccttggcctgctcttcgagtgtgaggttggtccattgaaatcaggattgatatatttcttgtacatctctagaatctcatcgtctactcatatggagtccagaaaattggattttttattttaagtttttatttactatgatttttttaaagattttcaaccaaaaaataaaaaagacaaaatgttcatagcaaaaattttatactaaaatatatcatattatatattcactatatatatctactcatgtagagttcaataaaattagtttttctatttcatgatgtttctgtaatttactatatttttttcaaagattggaccaaataaataataaaaaaagataaaaccttcatagcaaaaatattgtattaaaacatactatattatatgttcactatatgtatctactcatatggggtccaacaaaattagatttttgattttatgatatttctgtgatttactatgatttttcaaagattcagccaaaaagaaaaagacaaaaccaccatcactaagcaaaaccatctttcactttagtaaaactgtattaaactactctagagaggtaaaatacacggtttaaaaattgagataggtggtttattcggtttttgagttgaaagaaaaaaacaaactttgaaaattaggctattggatttgctacctgcagaagtcaccactgcgattgtagcaggtgggcccgtaaccggtttagggcccaggggcgtgtttgggcccgaagaccctcctgctgcccccgccaggcgcgcaggccgccgccgccgccaactgcacacacacccgacggccggcctcggtgcctcgcccgataggtcgccggcccgcctctcgccacgctcccaccctcctgcccccgcgcgccacgaccagccgcctccagcagcagcgatgccgcccccgtccctcctgcacctccactcccgcgccccgcttcagccccgccccttcaggatgaactcccgggcagctccgagcagggtcgtcgtctgctccgttgcgtccgccgaggggttcatctccgcagcgccgatcctccttcccgacggtccttggaagcaggtgactggcgaaatagcaaggcttccaggcgcgggtatcagtgagtgggctttggttgggcttaagactaaacttggttgcttgttggtgtgaaatgcaggtagaaggcggcgttactgctgcgaaggggttcaaggcagcgggcatctatggtgggttgcgtgccaagggcgagaagcctgacttggcactggtcacctgcgacgtcgacgcaactgtagcaggtatgagtgattcttatgagcttctatggtcactgactcactggcatgtggcgtgcttcaagtagcaagatgttatttcaatccctgaatgccactttggcacgctaggtgtctagtctatgctcaggccttgtttacttccacccaaaacccaaaattttttcaagattctctgtcacatcgaatgtttagacgtatacatagagtattaaatatagacaaaaataaaaactaattacacagtttggtcgaaatttatgagacgattcttttgagcctagttagtctatagttggataataattaccacaaacaaacgaaaatgctaaagtgtcacgaaattttttcacccagaaactaaacacggtttcatttggatttggatgaactgaacaactacatatgctattgttgcttatgttgcagggcgtattgtcttctgaatttacttgctatgctttatacgattggtaatatattagttaggcccagttcttatgctgaactcctttcaggaacatttacaacaaacgtcgttgccgctgcacctgttttgtattgcaagcatgcccttagtacatcgaaaacagtaagctaaccctgcctctcatctgccttcaaactgaagcacttcgctgatcaatttgggctaatcactcgttaattttttgtccttttgcaacactttattgcatagggtcgtgctgtgttaattaatgctgggcaagcaaatgctgcaactgtaagtgtttataagtaccatatctgtcatactcatcagtagcagttatgaactgtatattggaactcagtgactgatattgagctattgtctcaattgattggctatcagggtgatcttggctatcaggatgcagtggatagtgcagatgctgttgccaaggtaggtacctgccctttagagggcctgtatggtttccttctcaggtagcctgcttcgcatctagccagccaggcctcccctggctaggttgtggccatgctggcaacaggccattgttgtggttgcctttatctgcagcgccaggatgcatagagcagctgtttggttgccttgatctgcgctcgcacctgcatcgtcgcgcgcgcatgctcacgctgcctgtgcaagccaggccacctggaaactgattcccgcgagccaggctgcggggcgctggctgcacacgcctgggcagcccaggaaggattgcaggcaactaaacggcctgaacatgcatcccagggtctaggccaggctatatccagacaaccaaacatgccctaggtgtttgtttgcaagtaaagtcattttactgctatgctaactcctaaccactgctgcagcttctcaatgtgagcacagataacatattgattcagtctactggtgtcattggtcaaaggataaaaaaggtacactatgatacgcccaatatgactgggctatttgtttcacattagcccactgatgctagtatgatataatagtagagtgcctatctgatatctgggctttggcattgtaggaggcacttttaaattcgctacctagacttgtgggctcgctgtcttcttcagttcaggggtaataatattcagtatcatgagtagcgtatctcaagccttcaaattgtaaaatcatcatgataatcattgatataattttaatggtacttattgttgctcacctaatataccttcttcaatagagcgaattctgctgctgtggccattacaactacagaccttgttagcaagagcattgctgtccagactgaggtttgaatctctttgtttacttgtagtgttctccccttggattttattgtcatcaattcttgttcaaaactagattggtggagtggctatcagaataggtggaatggctaaaggttctggaatgattcacccaaatatggcaacaatgctcggtgtatgttcccgccctctgtttctccctccctctattgaggcatgtagcaaagattgatggtcattttttctattacaggttttaaccacagatgctcaagtcagcaatgatgtctggagagaaatggtccggacgtcagtgagtagaagtttcaaccaaattacagtgggtctctgctcttgtatattgttttgatcacgtgtaagcaatcacataacatgggtaggaaattttggcatcatcaattatttatatagaaggaaacggcatggcacattcacataaatcccagatggttattaggggtgggggacaccacaattttgttcttgaacataatcaatatatttggagtatgctgttcatatcttcaacctaacaaatactactatgagttatacactgctaatttaaagaattgatattgcaataggtagtgtgcatattagataatggagtacctttttcctggaaacgagatttaattttcttgctaatgtggcaatctaacagacaggaacttgacctaggtccattattttgcagtactgttatggattgtatgttcttcatatagttggcgtacaaaccaataattgttttgtgcaataattctgaaggtggatggtgatactagtaccaatgactgtgttattgctatggcaagtgggttgtctggtttatctagaattcaaagtcttgatagcattgaggctcaacagttccaagcttgcctagatgcagtaagtattactccatgttccttaatattttcatgtatgtcagcaagcgcttatgttcagatgcactttaatgcggcacaatcattattaagttatttttcgctcacatttctgcaccttagtttttgccccctaagcagatattgtttacctgttaagttcctatgctgacttattccttccatgtaggtaatgcaaggtcttgcgaaatctatagcatgggatggtgagggtgcaacatgcctaattgaggttaagtgacataatcctttgatgctatttattttaaacatgataattgggcttctaggttttaacaaacaattttgcttatctggaaagttaaaactggacttatctgaaaagttaaaactttagggcacactatatatctccttctaggttttcagggatatgacacaatgttttactgtcttctcctgtgcaggttactgtaagtggcgccaacaatgaggcagaagctgctaaaattgctcgttcagtagcatcttcttctctggttaaagtatgttaatagttttgtaccaacttctgcaattcagtagtatatcagccaaagcagtcttcttttctcatcccccagaaggccagaataattatattatttgtgacaggccgctgtgtttggaagagacccaaattggggacgaattgcttgctcagttggctattcaggcattcaatttgatgcaaatcgacttgatatttctctgggagttattccactaatgaaaaatggccaaccactcccctttgacaggttagagaaagttttattgcatagtcaatccatgtttcgttgttttggtcattgtaaatagattatttagctcttcaattaggatctaaatgcttatcctctttctttagatccgctgctagcaggtatctcaaagatgctggagatgcccatggtacagtgaacattgatatatcagttggtaagctttcagcttctttattgccgaatgaagattatcagttaatgtggtgtttatttatctttgtaactgttcaaaacatctggttcgtcagtgggaccctttgcatccggcatagatttgttgttcctgcatttgatttgcggtggcatttctcttgttcatcggtagtttggctgatcctatgttatcacagtggccaggcagactaaactggcatcctatgagttcaacaaatgcttgcagcaaacacttggattttgtcatttattacccatcattttgtaccagactatttggtgctccatctcaactaccttaccaaattcttactaaaaagctaccttacgaaattgctatttgttattatgaattatgtcgattgtgttattgacagggagtggaggaggaaatggaaaggcatggggctgtgatctgagctacaaatatgttgaaataaatgctgaatatacgacgtgaaaattatatttgccatgaagggaaaaaatgtcttcttggaatgaatgagtgcaactgccatcaggagaatgtagtttctattgcaatggcagccttgccttaacaagatgctgtggatgtattatttcctgtgagatcaatcagatcaatgttttctaagtgtaataatgtgatgaataacggtgggcacagtaacaacactgaccaccttgttcgcttctgaatttctgatgacgggaaagcattggtctgacaaacaattttttgaaatttggtatacaaatcttattgctggtcatgcgtgtcaaactgaagttccacttatatttgaaagttggactgaaatggtgtcaatttcaccgtcgatccctaaatcaattggatcccctgtatgcaagtttgtcaattggattccttgacggttttccagctgccattctcttgttttaacattttagccgtacaaacagaacgtgatgttgacgtagttggcaactactccctctatcccaaattataagtcgtttgatttttttaattttaagtttgaccactcttctttttcaaaaaatttgtgcaaacatagttacatttaagtcattcttgtagtacttttattaataaaccaaactacatcaaaagaagtgatattttgtacaaatttttgaataaaacgaatggtcaaacttggtgtcaaaaaagtcaaatgtcttatagtttaggatggattgagtagtttgtgacgtttcatgttagaaataatattaatacgatgttgtaggttgttgtaggtttattattttctttgaacttaaagtgtactacatggctttatatgaatctcagtaagtcatatttgatttggaaaagccaacatttctagatttatgaatagttagtttagtt

SEQ ID NO: 3978 - DNA, 3220 bp, Sorghum bicolor
tctattctccggattagccagaaatctgaaagaatagatttctaggatatatggtccccactgctcgcctcgtattcatcgtggcatccaagacgcacacgcctcgtctctctctccttaatttagtggtggacagttggctggatgagtaaatgacgtgaacagctcgtagcccaaagcagtgattcctgtgcatcttaatggtgaaactcatattaattaagggtaacttggtcatttggcagctatgctaatctgtcttaaacttgctataaatctattatttcagggacggagggagtaattgcaactttattcccacaataatcaccaattcagcttcgcccaatgacgaataatttcagcagtttttcagtaaaatttgtgttcgcttgagcgtatcagctaagcaaacatatattgtttggcgtggttttcgaactcaacagatggtccacttgtgatttcttacagctatcgttcggcgcttgcagtgtgatctgtgatggttctaacttctaactacgttcggcgctggaatttgacggttccgtttttcatagctgtccttaactaggccatctggcatttgccagacttggttacctggctgctaaggccttgtttagtttgcaactcaaaattttttcatccatcacatcgaatgtttggacatatgtatgaaacattaaatgtacataaaaaaaataaactaattacacagtttggttgaaaatcgcgagacgaatctttttagcctagttacttcaatgattagccttaaatgctacagtaacccacatatgctaatgacagattaattatgcttaatagatttatcttacagtttgctgacgaggtatgtaatttgtttttttattcgtttctaaaacctctcccgacatccttccgacacatccaatataacatccaaaatttttttatcagcaatctaaacagggccagttagccttgccgcaattttttgtggtaaggaaatatctaacctcgtagacaattaagtagggaaactgaccaacaagttagactagccttgtttagatgcctttaaaatttcaaaagtttacaagatttttcgtcacatcgaatctttagactcatacatgaatattaaatataaataaaaaagtaactaattacactaatcttttgagcctagttagttcataattaaacactaattgacaaatacaaacgaaaatactatagtacccaaatccaaaaagtttttttttatctaaacaaggtctaagttatgccaacaactaagcgctaccacaaaaacagtggttatctaaaattagctacggtgaacttaggttgcaatccaaacaatctatccctcttgctgtaaaatgatgatgtttgataaccatggggttggcagtaggccggaaaaacatgcggtgaaaactacctatttagtggaaacatgtaaagtattttttttcaaaaaataaaatttcataactaaaaaactttacaagttggtattaacaattatttcatagaaaaagtttgcaaaaaagggctattctacattttggattttgactcaaaaggtaaaaaaaagaaagctcaaaagagacttaaaggccctaatgatgatgataaattctgcattttaaatagaactaaacataactttaaaaatttaacattttatattttattatttcgaagtacttgacattttgtgttatatattttatagaaaactaaacacactggatgaaaaagaaataatcccatctgctttcagccatgggcgggagatcggaggcgcaagttttcggcgctcccaaagtctgctcgtatctgattggcggcgcgacccctcccacggatcgtgctcgacgagtccatcgcagccgtccgcgccccttcagatccgaccgctcgttccctcgcacgcggatcgacgggcccactagtctccacgtttaactacccggcaccgcctgctgtcgccgatcatctcgcactctcacattcctccgatctcccaagacctcctctgacccgagaagctactcgtagcgcagccgtggccatggactccacaggcgccggagcgggagggaaggtgaagaagggagcgggcgggcgcaaggccggcggcgggccgaggaagaagtcggtgtcgaggtccgttaaggccgggctccagttccccgtcggccgcatcgggcgctaccttaagaagggccggtacgcgcagcgcgtcggcaccggcgctcccgtctacctcgccgccgtcctcgagtacctcgccgctgaggtaaacgacatcacgcgtctgcaattagaccattgtactgaatctaatctcgcaacgtcgtatcaattctggggttctgaatcgctttgcttcctttgtgtgaccaggttctggagctcgccgggaacgccgccagggacaacaagaagacgcgcatcatcccccgccacgtgctgctcgcgatccgcaacgacgaggagctcgggaagctgctgtccggtgtcaccatcgcccacggcggtgtgttgcccaacatcaacccggttctgctgcccaagaagacggcggagaaggcgtccagcggcgggagcaaggagcccaagtcgcccaagaaggccgccaagtcccccaagaaggcatagattgtccagacagcttagcactaccttgttaccagtgatgcgttaagttgtagatgggatgaatgtggttggatgtgtacctgtgtttgcaagttctgatttataatggaaagaaatgccgtgtttcttaagtcgcaatgtctaatgcctgatttcatttctgcactgctgcgatgtgtggttttcaacctggtcagtatggggtttttgagatcctcttgataagaacttgccaaacttaatacgcaaatctggtagaacgctggattgtttacttaaatattggattgtaaatttttctcgatttattgtgagattccatgaatgcgttggagacattgtgtaattgatatttgtgatttaaggcatgattggttggctttcaaaatatggcaaactgaagatttggtaagtcatgatttttgactatcatttagtttgctaccataatttgctaacctcgtggcaaaatttttacccaagtacccaactttgtcatgccaaatccttggcatgtcaaattttggctgcaaaatccagcccttggaattgcgga

SEQ ID NO: 3979 - DNA, 4388 bp, Sorghum bicolor
  misc_feature (969)..(1111): n is a, c, g, or t
taaatcttgaccgcgactggaattgaataacattccgtgctttatcataaagaaaatgacatgccgtcattccggccatatatagggaaaaaagaaggattccagccatggtatgattagctattaaagacatttcaccattactcggattggtctctggtactatgcaatgtctatataccattctttcattctttttttagtctgttcattagaatgttgccattatattttttgcgcgatctgaaaaatgccattacaattttcctactattgctattataatttctactaatgcctgaaagctgccactttatatgtttcccatgaccccagacatacctatgtactcaatttattccaaattataagtcatttcaaaaatcttggagagtcaaaatatcctaagtttaattaaatttatataataataataataacattcatgatatcaagtaaatatttttcatagtacatctattgatatgctttgactttctaagattcttaaaatgacttacaatttagaatggatgaatctcatgggatgaagaagattaattacatgggtatttttgtccataggtgtttatatataccaagttagaactatttggagtagagctcctctgagtccgcttttgattctccggagaagtggttacgtggctgaaagtgttaaaaaaaatgcatgaagctaggaagtgctatgtggaaattggatgagaatactttgcttatttcacatgctcaatatgcatccaacgatagtgtacatgggagtatttattttagccctacatttttgctcatttgaatcgcttcacaactacataactatgacctcgttttggcacaacccaatttcatttttgaagttgtttttataagcaaccttttagttgaagctgagctatttaaaaaaatgtttcacaaaacacaatcatcaatagcttcataaatagatgnnnnnnnnnnnnnnnnnnnnnnnnnnnnnnnnnnnnnnnnnnnnnnnnnnnnnnnnnnnnnnnnnnnnnnnnnnnnnnnnnnnnnnnnnnnnnnnnnnnnnnnnnnnnnnnnnnnnnnnnnnnnnnnnnnnnnnnnnnnnnnnaggcaaactgtgtaattaggtttaatttttgtctatatttagtgattcatgcatgtaccggcaagattcgatgtgatggggaatcttgaaaactttttggattttggtgggaactaaacaaggccttagcgtcatcccatttcatgtcttcgtaagaggagaatatataaaacaacttcatatatgaagcttcaattcatagatgactcatgtctttgtgagtgtttggcaaaaaaaaaaaaaacagcttacaacacttcatgaatctatttatgagttatgccaaacaggctctaatataatgcacatcaactcctaacgctgtgaagcgtttctctataaaatatcgattggcattgcgcttctgcagttctgcgtcgtcctctgctttagtatcctgctaaatcaggtcagccttagcaattaagcaacttttaataagctctatcccccacatctccctttatctcttcattctcaagtagaccccacaagaaagtaataaatactagaaatacaaaagacaacaattactactcataaaaggagcatagataaattcatgcttttgcccttgctttctctttccagctttctcctttctctctcctccagtcctccttcatcctctttctctctctctcattgctgcctgctagtactctctccatcgacttggtggtgggatgtgattctccaccacctccgagcgagcttgccagaggtctctccacctctttcttcctcgcatgcttccttttctttccaaacacaaatccgcagcaaagaaagtgcaaattataaagaaaagatcggaattcaaagcagccggaaagctgactagctagaagagcgaaaagagagagaagtatatctcagcagggcctccatggtgttcccttcaccttcagtgccggtctacctagatccacatccacctaattggaataaccaggtactgcagcagcatgagcttcatctccctctagctagcttctatgtttaacaaggccatctagctacgtacatacctagctagccttgaatctatagctagattggtccgtgcatacacactagcttgttcttcgttcatcatggcaaattaaaggacttaatttggcacaaagatatctgttctcatctcaatgaagaatattcagtggcaattctggcttcctttttccttctcttttgatgatatgtaacatcgatcgtcgtctaacatatgcttgttatgtgtagcagcagcaaggtcagcagccgagggcgagcgggggagccgatgcaccgctgctgcccgtgggtccggcggctgccacagccgcggctccggagcccagtggcttgccgagaagctcatcggcggccagtgccgccgtggccgcgcacgcgaggcccaactcgatggcggagcgcgcgcggctggcgcggatgccgcagccggagccggcgctcaagtgcccgcgctgcgagtccaccaacaccaagttctgctactacaacaactactccctctcccagccccgccacttctgcaagacgtgccgccgctactggacgcgcggcggatccctccgcaacgtccccgtcggcggaggctgccgccgcaacaagcgttcgtccaagtcctcctccgccgccgccgccgggtcttcctcctcctccaagacgtcctcctcgggcaggctgctcggtggtccgtcagctacgccgtccactactccgggcgtaaccggtgcgatcatcactccgggtctcagctctttctctcaccaccacttgccgttcttgggctcgatgcacccgccggggcccaacctagggttagcgttctccgccggactgccgctgctcggcatgcagcacctggacacggtggatcagttcccggtggcaagcggcggcggcaccaccatcggtgcatctctggagcagtggagagtgcagcagcagcagcagcggcagttcccgttcatgactgggggaatactggaccttccacagccgccgacgtaccaactgggtttggaagctaaccgaggaggcggcggcggctcagctgcggcggcgttcactttagggcagcccacgacgaccagtgctactgctaccacgggaaggcaggaagggtcgccaaagaagatggaggacagtaaaggacaagacatgagcttacagaggcagtacatggcggctctacgccacggatcaggagcacacggtggctgggatgggaatgctgctggtggcagtggcagcgacggtggtggcactggcagtgccggttcaacttggccgatgaacattattcctggattccattcttcgtccaccactggtggcaatggcggtggctcgttgtagacttggtaatacactccggctgggccaatgtcaagaagatattttcgagatgcatgcatggttgagtttgagcaaatgctagcagctagctatagctaggacgatggaggaacaggagatggtcaatccgccggtctgttcatcaactgctattcttcatcagcaactgtagaagcacactgctagctcatgatggtcacaggtaggagtttaaagtaaagttgctctttggttaacccttttttctgccatttggttttgaacttaaaggtgttcgtcctgcattgtgtccatagcgccacttttctacttttcaacactattgttcacagggattaattaatcaaaattggtgcacggggtatatatatactatctggtaaggtatatttgacatggagactgattagtagtgtcatcactactcctattgtgtggagtttgcatgaaatgaatgtatgtatggtttgtttgccaagttacttccatatatatgtttttgcttctatatattttatcctgtattcagggcatttgattaaagacaacgtacgattaaagtagtgcaaggttgcaagcacgtacgtacgtatgaagtatatatataggacctgtaaagatcttgatcacatgctcctggtattgataagtactctctccattccaaagcttttctagttatattgattttgctatatatgcacttagacatatatattatgtctagatatatgataaaaacttttatctagaaaatccaaaatagcttacaacttggtgctgtagggtgatattcatataaatactaggttcatgatttttttttgtcaaacattgataacaccgcaactacatagttttacttaacccaataataaaaaagagtgtttgaattaaaataatgttgtat

SEQ ID NO: 3980 - DNA, 3449 bp, Sorghum bicolor
taacaatcaacccaaaaacattggacagaccacgatatccgatgttcagtctaaatgcatctgaattaatgaaagaatattgatagttatatcgtcggacacaacattggatgtaaaatcatcaccttcaatccttgtttttctcttcgcaaccatcgacgctaaagattgatgatccggagaaattgtcttttgttgggagtgcccataaacacctctcctctataggtaatcactgcaaattgatcgtttgctgatgaaatcgacacttgtaacggtgatctcaacgttgcaatcacataagtcattctaggtaacaaaatcttaataaaaaatcatcaaattttgcgatagatttatttagattaaaccctaatcgctggcttcaaacgtcctcaaccgagctatgatgtgtacctagtaaaagtaataataaccacaattattacagaaagaaggagaagaaagaggaggaagaaaggggggaaaacatcttcaacaaaaacaatctgtgtgcgtaatcaccggacatgagcttgagacaattcttacaaaggtgaaacagtaaattttaacaactaaacaagcgctgcccaccatgccaagaagacaccgccacaatggcctcaccaccggtggcggagcctgtgaacaaattccagcaggggggcaatgaaaataattaaatcagaacaaagagcaaaatcttataaaatattacaaagtacagtttaattctatagaatatttagtgaggcactaaagcaaaataagatcataagaccccgactctccatcagaaaaatcagatactaaagtttggtatcttcgaacgacgctagatattatgtacgtactacatagccagcacctcgatggatcctcccaaaacaatgtcttcagaagaaaatgacatttggagagtccgccatagcaccaccagctaaatccgaagcaaaagcaagttacaccagtttcagatcctattatagcgtacataatcaaatggattggtcaatgataattgaaaatgtttgtgttaagattattacgatcgaatagtgaaatgtcctaaatcggcagaattacgtttcaggggaaacactttgattgcttctgatcttagaagcaccatccactacatcatcttccgcggcatgacgccctccctcctgcgacgacccaattgcctccaagaacacgtgactaaggtcttctctagttgcactcaaaatctaaatttttttaaagattttttatcacattaaatcttacagtacatacatggagcattaaatatatataaaaaataactaattatataatttatctgtaatttacgagacgaatcttttaaacctatataatcaataattataaaatacaaataaaaatgctacactgtcccaatctaaaaaaacaatagatctaaacaaggcctgaactacggactgctgagaaataaatgccagagagaaacaaattacagagaaaaaagtgcattacctctgagatgaaacgtacgtcttcctattaccaaagaataaaatctagacagaaacaagtatctaatagaatcttaataagatgaggaccaataacacttggctacaacaaagtctagcgtacaaaagaagaagcaaccaacgacaggattcacaaatgattgaaaaatctgaccagagaaccttggaagcgatcatgctgcaaactggctggaaattattttctggaccacgcacaaaaataaagctagcaaatgcataacgggatacagattccagcgagcgctgagcagagcagcgtaggaaggccagtccaactcagcccacccgatgcatggaggctgccgcgctgaagaaaacggtccaggtctgaggtctcggtccatcccctccccaccccacgccctcctccttctcccaggtccgtcacagtctcacggcctcactcccgttataaatagcgctcggattcctcacgcccccacacctatctctctctctctccagcgcactcttcctcctcactacccacctcagcagcctcagcgaagaaggccggccggagaagcgcatcgatccatggagttctacgtggacgagaagtggaagttctccaagaagagccggaacaacgggagccggcgcgtgccgggagccggaggagccggcggcggggactctctgctcaagagatcgtcaagcatgagggacgtcccggcgatcggccggcgcgggagcggtgccgccggcgccgcggcggcggcggcggcggcgggcgggtgcgcgccgcagccgtcgttctcgagccggtgcgcggggctggtgaaggagcagcgcgcgcgcttctacatcatgcgccgctgcgtcaccatgctcgtctgctggaaagactgctcgtagccgcggtagttccagggccggccgccggcgaagaagctccacccctcgcagtttctccgcctgccaggatcagagagtcagtcatggtgctggttgctgaagcaagccgagggacacgggggaaggaagaaggcagattaggtgatgtgtgtatagatcagtcttgattaggagtcctctttctctccttttttacctcccatttctgggacgttttcttggttattactagtactcgattaggtaagtagtagtagtaattagcacagtacttagtagctctgcgaggtagatgtggaatcgtggacagttttgggatccccttcttcaaggggaatggggatctgggttcttttacagctgcagtgctgcaaaggagctagcaccgcagggcgcaggcaggcagctcgcagctgaatgaaatctagtggatcttcttctgttgtaccacgaccacgaccacgaccacggtgaaaacaaggttgtcactgcccatgtatagctaaagaaatcagacgcaacagcatgttaagatgtcaccgcgtatttatttactttcttttattttaatctttctttctgttttgtttctccttgtcatttctctctctctgggtgtgggtggcatccaacaaggatgctgctgattgacaaaagggacattgctggctgggtgctgattgacaaaacacgaaagggagatgcaaatgaaacagccacaaagtggagtttcgggatcagggagacggggagtctggagatgagagctgtgactgtgagcagagcaaatgcctggctccgatgcaaggcagacggatgaggaagagagggaggagcaggcaggcaggaggccagagccggggcagtaaatggggatggtgactgtgatggcaaccccttttttcctttgtcctcacccttttgggactgccatttccggcgtggccatctgacgacctccattattgcacttggtgctcccctcctcttcttcgatctccatccaccacctcagcttggagctctctctgccctctgctcagc

SEQ ID NO: 3981 - DNA, 8110 bp, Sorghum bicolor
  misc_feature (176)..(275): n is a, c, g, or t
tgccattggctgctcctgtttgaatgtttcatgggtcttgatgcttggtagcgctagtgtcagcacaatcttttaaattttaaatttttataactttttaaataagctccaaattagataaataatatatctattttgattgtcataagcgaggtcttcgcaatagtacactccannnnnnnnnnnnnnnnnnnnnnnnnnnnnnnnnnnnnnnnnnnnnnnnnnnnnnnnnnnnnnnnnnnnnnnnnnnnnnnnnnnnnnnnnnnnnnnnnnnnactttcgcgtatgcaagtcatggactaaagtggcacaggcggacaagtacagtgtgtcattttttccgggtttgcaagttcatggaccaaagtggcacagactgaaaagttaaagggccgccagtgtattttactcaaaaatcaattatcatcaactcccaactatatatgctccctcctagaaatctaatggaatcattccatcagaaaatcaaggaggagagctaaagaaagagcagagctctactcaatggagcctacgaatgaaccctcaaagaacaagcatagttattaggaccggaccggagattgaaccggcgaggctatcggttcactggttcactggtccaaccgtttagaaccggttgaaccgtcggttcgattattttagaccggttaaatcgaaccggccactaatatattgaaccggtatatatatatatatatatatatatatatatatatatatagtgtatatatataaataaatagtacaagcttaaagtaacacatagagatacaattatacaaatacatgaaatgttcttaaattcaaacacatcaagtgtgtgaacaatctcgttgtgataattcaaagtggaatgactagaatagtaattaaaatattcaccattgcaaaataatcttgaatgctaaaatggagtgtactattgcgaagacctcgttatgacaatcaaaatagatatattatttatctaatttggagcttatttaaaaagttataaaaatttaaaatttaaaagattgtgctgacgctagcgctaccaagcatcacgacccatgaaacattcaaacaggagcagccaatggcaggtgcatgcagtcaatccagccatgcactccacccgtaacattcaaaaaaatgaggagcagctagggggcccattgatgccacgtgcatgcactccactgaccaacaccacgcaacacaggaaaactgcagttgaaatagcaagccccattacggaccgggacggttcgactggaaccggccggttcaccggttcccaaaaaaaccggccggttcaaccgtttttaccggttcgattgctcaaacggtcttttaagtgaaccgcaccggtttaagctctggttcggtcttttagcggtccaaccgccggtccggtccggtcctaataactatggtcgtcatgtatgacacactcttgcatgggatgtagcatcatgtacctaatgctcttgcgtgggctgttgcatcatgtacttgacctcaccaaggctatcgttgttagcagcatcaacagtggtgggtcgattcctcatagattaaaacataatttagtattttaaatgtttattttttaaaaatatttagacatttttttaaaaacaattaggataatttttgataaagtccaattaacccctagattgtcatgaaagttcgacttacctctcctattgctgacgtggaagttcaaaacaatctgattttttaggaaggaatctgattttctaattgggagagataaatcaaactttttgccatagtttttttaattaactttcacgatagttaaagaccgatgtttttttttttctaaaagaaatgagtaaaagagaaaccggcccaataggcccactagcgcgtggagagaagttgctgtaagcagcaccggaagttcttctcccgttcactagcgtacactagggtttatggtttagggcgaccgcaatccaggtgctggatccacgcgccgccgcatctccagcctccgcgtcccagccgcaaaaccaggtgcttacccgcgcgcttcttggcacgcctggcagccctatccgtgccagggttcggttctggatttggagacatggcggaagtggaggacaagctcaaggactacgagatcaagaaggagggagaggcagagatcctcttgcacaagaagaacgccgtcttctataatcccgtgcaggtccgttctcttccatttttcttgtttttttctccttttttttttaaaaaaaaaacgggggtgttgttctatcggttccttatctgcgttagcttacagtctgcacgctttgaatttgctcgtagcgatttgctgtaatgacttgttgacttccagttgataatttatctttatcgctcgtagagctgctttgcggtattctggaggattccaaattgagtgttgggtggtgattggtgtgggattgggtctgtaggcttcaagtttatctagttctattgctatcacagttcatttgcacttactagtgcttcacatagaccggtagtggttaagcttgctattccacagagaccaaacagtgaactgtgttttgtgtatgtgtcttgtttattttgctgtcaactgggtttctgtggaaatcaattagtgatcaagttgtccactccaagattacctcattctaccagtttgtccagctaaatgaatttttccattctacctatttgcttgtcatagtggatgggaacagtgtaagtttcaaattgcttagatctattgcaaactcgaaacagtagattgagcttctgcatgtcatattctggtattagattatgcacctggcaaaaaaaaagtctagtggtttcacatcaccaaaatttattatagcttcattgaagaagataacagtttcaaattgtgatgtaactccctgattttttgccataacagatacatagctataaacatttttttcctcaaatgaaagtagttactgtttgttgatagtcaaatttgttattgttttaaagttgatacgttgaggaaaaatcacatacaactccgaagttagggataatttcccagttataccatcataaagatttctgaaaattgtgtttactgctttgattaggttcacaacagagatatgtccattgctgttttaaggacctttgttgccaagcgcaaggaagaacatgaagcgctggtggacaagaggaatacatcacatgaaaaaaacaaacagagtgaaacatcgagtcaaactggagaggatgcgtcaactggccagcaagatgaaatggatgttgtttgtgaaaaggagctaaataaagctgaagatcaaattgatgatctgccaaaagaagcaacaaaaccttcctggaaagtaaccagggagcttaagccaccacttgtcctcgaggtgagacttctcataataatatggatggatcgaatacgaacaaatatatatggatatgaatacagatatttttttaatcaaattcagattcgtacacaaatattatcaggtgtgttggatacagatactaacggataattttggtcaagggatagtcagacaataataaaatacgacatatctgtatcatatacccaactttgaatatccatctgaaagggatattgaatatccgggcttggttacaggcggatttaaatccttcagaaggatggacagattggaatatccttcccatattttatccctaatggaaatgcaatttctgtatacttcattaacattaaatgatatctagttttatttatttattttttcaaatatctagtttccttctcataattaatatctaggtttgtggattgcaccgctaattttctctccaggctttggctgctactgggttgcgatctctccggtatgcccgtgaagttgagggcttaggaaaggtagttgctctggataatgataaaggtaatgctacagtttactaaacttgcttatgttctttgctattgacgcctccgcgtttgatttccctaattcactatggttcttgtttcttcagcatctgtcgaagattgcaagcgaaacataaagttcaatggcgcttccgctgctagtaaggtggaagcttacttggttgatgctcgaattcacatgctgatgcatccaaaagaatttgatgtggtaaggcattcgagaaaaatatttctaaatatgttctttctaagataagatgaaagcataatatagattcaacgttgttgtatacattagcttttttattggaatgatgcacttgtgtgtgtcagggtgtcgggggttaccatttatatggttatgtctctggttactgattctaaatctgaagtttctggtatttattatgcaagggtgaatcttgttcttggtacaagtcaatggactgaaaagtcacatgtaaatatgccatgaaataattgcactaaatgataatggttgtttctataaacattgcaaattattttattatgattttacaccatattttcttctgattgttcttaggttgatcttgacccttatggatcaccatctatatttctcgactcagctgtacaggctgttgctgatggtggtttattaatgtgcactgccactgatatggcagttctttgtggtaccaatggagaagtttgttactcgaagtatgttgatagttttgtactacgtgttcaaggaatgttccatctatagtgtaataatcaattatgttttgtaggtatggttcattcccaaccaagggcaagtattgccacgaaatggctttgaggatcctccttgccagtattgaggtacataggtgatttacaaattgcaatatatatactgaggactataaactgcttccatttcagtcttttgctatatctatatgatgtatcaagttaatctgcactttacatgctttattctttggttatcttagtttctcatgcccttgacccctcttttcttacaccagagccacgcaaatcggtacaagcgatatattgtgcctgttctctctgtgttcatggatttttatatccgtgtttttgttcgagtattcacgtgagtttcccccctctagtgcctagtttgttccatatttggttaaagtcctcttttctaatgtggcattgtatttggattccacgtgcagttctgcaagtgaaataaagaatacacctcttaaactttcttacatatatcagtgtgttggctgtgactctttccatcttcagtgtcttgcaaggactgttccgaaggtttattttccataccatttaactctttgatacaacattctctctgttatgtattgacactcttgactttccttttgtttcttcttcctgtataagcagaagaataatggtgtgaagcatgcacctgctattggacctgttgttcctcaagaatgcagtgattgtggaaagaaatttaatataggtgggccaatatggtcagctcctattcatgaccaagactgggtagtttctactttgacaggtgttaagtcaatgaaggatagatatcctgcatatgataaaattacttcagttctaactactgtgtcagaggtatcccccagccccctccatcaatttttaggtgtgttttggtaggggaaaagtgttccgtagtagttttttacccttaatttctcttgcaatttatgtcaattgccataaaatccatataatcctaaaggcactttgaatacaaatttattgatgcaactttgaatgactaaacattcatataatttgtcgaattattgtttcaaaattaaatttgactttccctactcatgccttgaattgatgcctatggagtatcaaaatggttattctcgtgactgttaaaggcctattgatttctgatattattttgtatcgccaactccagattttttacgctttagtatatacagtagtttaattaaaaggtaatgcttggaagagttttgaaagcaaggtcaatgttttgataacctattaatcatggtttattgctccagtcaaagaaacaatgtaggggattccaaattatagtttattttgtctttgtcttaggttaaacttatagcttgtttttgacccgactgttagaaaaatatattaacatttatagttcaaataaatgcattatcaaaacatatttcatggagaattttaatatagtaattagatatcgtatatatgtatttttctgtaaaattgtcactgttagagaagttagacttaggacaaaaccaaagtatatataagctatatatctgggaatggagatatacaatctagatgtataggccattaagtcaagaattaggttatctactagtcaataggttacccaagtgcaactaataaaccatttctgggccttgttttcattccccttgtgcatgataaaaaattgaatcattgcagctaagttttgggaggatttgcagaaagtttgactaatagcttttgtcttttggcaagctgttctttttttagagtgactaactgtttgcaattcatgaagtattttgtatactctctaaacactcaacttcatttgagtttttcttctgatgcaggagttacatgacattccattgtttttcagtctccataacatagctggcactgttaagtgcacatctccatctttggttatgtttcgatctgcagttctaaatgcagggtatcagatctcaagcacccatgttaacccacttggcattaagtctgatgccccttgggatgttatttgggacatcatgcgctgctgggtaagtttgtattgttcctcagcgtctcgtgtctagtatgaattggtggatgtcttgcctacatgaacttctaaattgccttacaaaattgattgcaaacttcaacacaggtgaagaatcatcctattaaggaacagccccgtgattcaccgggcacggcgatcctttcaaaatcgccaaagctagaagtatgtggtctataattattgcgcctatgatgttcctttatgtttttctttttctatgcaggctgcaaactgtattatttgatttattatttttcctctttatgtttttttataggcaaatttttcaagagcagttgctgccctcagcaaggctcaggcgaagaagattaaacgattccttccaaacccagaacggcactggggtccaaaggtcagagcaggcaggaagatcacgagcaaacatatctctctgttgggccctgacgctatcaatggcgctctgaatggtggtgactgccacgaagaaggaaacggtgctggtctagataatacagccccagaacccgaggggatcaaagacgttgagaatgaaccctcaaacaaacgccaaaaaaccagcgacggcgaaccagcaagcgaaccttgatttgtttgaaatctttcgtgtggttcctttgtgtctgtgctttgctagtttgtggccgatgggttatttatatcacctgttgaattttgatggaacaaatttgcgccaagtttttgtcatcttttgctgcatgtgtgatgctcctgtttaacagagggaaagccctattaaagcgtaatatacatagcttttgcaatgtcgagatgttagtattgcttgagctggctatattgtggacgccgttggattttgagaagggaaccatcgtggaaattagcccttgtcgtataagcaaactacagcaaacaatcaccagatcaaacaaaatttgatcactgagaggctatcatattactgtcgtataatcttcgatgcttgtattaacattggacgcatggactccagctacaatgcgaacaatccttctccaagaacctacgacttctgaggtcagtcatcctgcaggctgcagcatctgcgagcagagcagcgtgcgtgggtgtgcgcgcggtcagtcgtcagaaacaatcaaaaccaccaactctttgcagccggttgtcacccgaatcatgagatcggtgaccacgttgcagtcccgcacggagctcctattggtatcctcatcattcacacgcgcgcatggatccaaacggcggcgctacgtacgtgcgcatcccagtcccag

SEQ ID NO: 3982 - DNA, 4143 bp, Sorghum bicolor
tgaatgaatcactaatatgtaaatattctgttagtactggtatttgcatttgaacaagtaaatttcattcaagtttcatgctccaagaaagaattatatttaacgtgcagttacttgcatatgttcatacctggaggaactcatgttcctgagaaaggcattcctctcattccaattataatgatattaaccagcaagaatcaaaggtaaatctgttctaagtttatagtaaatgctctctccattccaaattataagtcattccaagaatcttggagagtcaaagcattttcaagtttaaccaaaattatagagagaaatactaagatttgtaacataaaataagtatattatgaaaatataattaaggaagacataaaataagtatattataaaaatataattaaggaagaatctaataatacttagttggtatcataattattattattttatcatataaatttgatcaaacttaagatattttgactcttcaaaattcttaaaatgacttataatttaggatggagaaaatacaaaacatatggcctgtaattaccgcataccgttttcttctccatttctcaaacaactaccacacaaatgagcatatcaaatcaaacaatttgaaagccgcacttggaactttaatttgtgtgcccatagtgaggctggggtagcatgcctgacaagatagaagctagtgtagccaagttaagaaatatatgttgaagggaaatctcaaatggaagatacaacattcgcacacaggcatacataataatcctagtgttaaaaaggttagaacacatcgtatccaaggacgcaaaccaaattgacgatgacttggggaagcaaagcatttccgtgctaagatgaagactctaggcacacttacattgtggtgtggtcaaaaaaggggcagctcctgtttcttccttttgcaagtgacgacgctcgggtggtttccatgtgacagcttttggtggagcctcttttggctccttccgccaagccgtcaacaacgacgccgcactgatgggcttgggcagcagctagcagcacgtaacgttccgccggtccgggcgcaccgcgcagccgcgcagcttggaggcatgcatgagcgttgagctagcgatgagttgatgacgacgcgattacgcgaagcatgctagctagctactgtacgtgatttggttcagttgacggacgacggctcctgggcaggctgcgctcgaatcggattgcacgatcgagtagcttcaggacaacaggtgcaggacgacgacgacggaaaagagtctttttctttggttccagactggtgaaatctgtgtagacgccctctttttccaaagtgcacttaagtgagaaagcgacggccataaccataagtcgtgacctggagtgaggcgacatgttcggacgcgctccgcggcgccatgcgccatccccagcgacgtgttctggacgtggatcggacatgttccagcgagacgaggaaaatagtgtcgcggtcggcgaagacttgggctgcggatctcagtcagtctccggccgcgtcagctccatcacttctttattaatccataagtgtgctgcatgtagcgctctcccccgcgcgcctgcatgcggttgaagaaccggccggcgccccgctgccggtgcccacatggctcgtggctgctactgattcggccaaagcgtggccgactttgcctctccctctagacgcaggcacccgcccgcatggcaccctcgcactgccaagtgccgactgcaggtcgactgcccttctccctcagtcatcctgtgtagcttgcttgcttagctctgctctttgctgttacaaacgcgttgttgccgttgcgtccacgtaagaattcctgactcgtctcgtacgtatcatctcacgcgatctagcttcttatcgaactggtattaaacatgagctgccgcagctgttgttgtttgtatttctgaggtcaaccgcgcgcgtacaaagagtcgcttgtttgttactattagttagtttctttagtttcctacgtacaagggactgcttagcttctcggctatgccggtcaggacatggctcgccgacctgcgctcgaagctcgtcgtcggcgttggcccccgggaccacggcgggcttggcatcctcgccttcgaggcagcagccaccatgtcgcggctcgtgtccctccaccggacggtgtcggacgtcgaggtcaggaggctccgcggcgacgtcttgcgcgccgagggcgtcgcgcggctaacgtccgcggaccaggctctcctgctccgtctcgcgtgcggcgagctcctggcggacctggaccgcgccgccgacagcgtggcgcgcctcggtgcgcggtgctgcgccggcgccggcgacacgccggcgccgctcctgcgggacttcgaccggatctacgccgaggcgaagcgtagccgcctcgcgcagctggacgccacggtcgggttctccaggggcgccacgaagcggttcagggagatggagcgccacgtggtcgtggcggcgaagctgtacgcggagatggacgcgctcagcgagctggaagcgtcgcagcggcggatggagcagtggaagcagcacagcgggcccatcccggcgcagtctttggggacgggcaagaggtcgtcagcgggcgagcccggagagaagctgatgagcaagctcagggcgcagcggcacaaggtgcgacggctcaccgagggatcactctggaacgtcgccgccggcaaggcggcgaggctgatggccaagtccgtcctcgccgtgctcgcacgcatctcccttgctttcagcgcgtccgttccaggcctccccccttggacggtaggacgcgcgtgggcgctgggtcactcgtcaggcccgttgcaccggtcggcgacgcccgcggcgctccggcactcggctcccatcttcggccagaaagacgccgcctctccactgttggaatcgatcaaaccatcggtgagcatggtcggcggctcgagcatggagctgcgatacgcgaacgtgatcttgaccgccgagacgttgctcgcggcgctgaggccgccggcggcaggtgacagcgaggaagtgcaggaagggatgatcgacctgtcgacgagagacgcgctgtacaagatgctgcccgtcagcatccgcgaggccatgaacacgaagctgagagagagatggggtaaaggacaacccgtggacgaggtggctgcggcggaatcgagggatgcggtggagcgtctgctgcgatggttgagcccgatggcgcacgacactctgcggtggaacgacgagcggagtatggagcgggcgcagcggttcggcatgcagccgcgcgcgctcatggtgcagacgctgcactttgccgaccggcagaagacggatgctgctattgttgatgtgctcatcgacctcagctgcatatgctggtacgacgatgagcggcgacggctggagtctcatgactgggacgccgagtagcacctacagatttagctgtgattgtatcgtgtgtgaatatcatggtatggagtaactgcaagtcacaggtacatagagcaaggtcttgtttggtttggagagttaaactttaactctcatcatatcaaatgttagactatttacgaaattaaaaacatagctaaagagtaactaggcttagaagattcgtctcgcgatttataggcaaactgagcaactagtttttgttttcatctatatttaatactccatgcatatgtaattcgatgtaacgggaaatcttgaaatcctccatgagtcgagtttttttaactcaaaatgctatatttggtttaacaaatttggttttgttacgtgggtcgagttttttttactcaaaatgctatatttggtttgaaaaattggttttggtatgatccatcctaggctctttatttcaatgtagtagcttatttgttttttcataagtgactttagcgtacccttagcaaccatgttctcgtttccattttcgaaaccggaacaggaacaagaacttggaaatggaaacattcctatttttcagaatgtggatacagttatgcaattggaatttgtcatttgttggagtttgccaagtccctaaa

SEQ ID NO: 3983 - DNA, 5296 bp, Sorghum bicolor
tattagcttgtgcacttactaaatatcgagaactagggatacatgtatccatcttataaccatattgaatggtcggatgtagcagtatcgatcacaaccattatgtcgcgacacaaactaaacacatgttattacttctatgaggccacgttgaatgctacaccctagcatacaaccctagcttccacgtcagcacaaatagtccatatcaaccaaaacattagccctacagcatgacatagactcctgcagaagaaacaaccgctttgcctaacaaaataaccaagtcacatctcaaacacacattgtggcagaaaagcaacaatattcatgtgttttcttctgagtaaaactgacaaggaggtaggcgtgtcagtagagcaaagccatcacctggcagtattcgtgttgtgactttaaatgctcaagtaatgctttatctatgtgaagatcattataagctcgcgtacttactaaacatcgagaactagtgatggaggtagccatctcataactgaagttgcttcaattttagacttggacgattcgtaggtaatgatcagatgtagcagtatcgatcacaaccattatgtcgcgacacaaactaaacacatgttattacttctgctcaggccacgtcaaacactacacccctaacatacagccccaacttccacgtcagcacaaatagtccatatcaaccaaaacattacccctgtagcatggtatagactcctgcagaagaaacaaccgcttcgcctaacaaaacaaccaagccacaactcaaacgcgcgctgtggcagaaaagcaacagtacttgtgttttttattctaagtaaaactgataaagaggtagacgtgacaatagagcaaagacatcagccatggcagtactcgtattgtgagtttaaggccttgtttagttcccaaagaaaaaaattcgcgactctgtagcactttcgtttgtttgtggtaattattgtctaatcatagactaactaggctcaaaagatttgtctcgtcaatttcgaccaaactgtgcaattagtttttattttcgtctatatttaatactccatgcatgcgtctaaagattcgatgtgacggaaaattttgaaaaattttggagttttaggtggaagtaaaggaggcctaaatgctcgagtagtgcttcgcctacgtgtaagtgcctctaagataaagccacaagaaactggtagactgcattatccttgcccctcaagcaatatcacactgttagcttcgacttaattttatgtatattccgtgcctatttttagttggtaaacatagaagacaagacatgtcacataatactaaatgggtagtatagcacagatatagaccaaggccttgtttagttccgaaaaaaatcggattttgctactgtagcattttcgtttttatttgacacatattgtctaatcataaactaactaggatcaaaagattcgtctcacgatttacagataaactgtgtaattagtttttattttcgtatatatttaatgcttcatacatgtaccgcaagattcgatgtgacggaaaatcttaaaaactttttggatttctctgaactaggccccaacctgagaatggagtacggggtacggttatcaataggccctcaattaaaaagaaaaatatccatggctccaagccccacttgtcaggcggggcgggcgcgtcgcgccgtcgcctattgctggtcatccactgctccccgtgcccagtgacgcgggtggccgctcccctcgcgcagccgcacaccgcccggagaaaaggctccaccgtctacctcgctccgaccggaacccctaaattcccccaaccctccctttccccttcctccttccgtccaccacaccaccacaccccgggctccaccccgtgcaaatccgctggcggcagcaagagagggcgaggagggaaacagatcgggtggcggcaatcggtagccggttggttcggctggcacgatgggcggcgaggccgagggcggggagcggcggctggggcgggtgctgagctttgggatcccggacacggcgctggggctagtgatggggtacgtggaggacccctgggaccgcgacgccatctcgctggtgtgccgccactggtgccgcgtcgacgcgctgagccgcaagcacgtcaccgtggccatggcctactccacgacacccgagcgcctgttccgccgcttcccgtgcctcgagtcactcaagctcaaagcaaagccccgcgcggccatgttcaacctcatctccgaggactggggcgggtctgcttcgccgtggatccaacagctctcggccaccttccacttcctcaagaagctccacctgcgcaggatgatagtatgcgacgacgatatcaacatcctcgtccgcgccaaggcgcacatgctcgtcgcgctgaagctcgaccgctgctccggcttctccacggcctccatcgcactcatcgcccgctcctgcaagtaaaatcccgtctctccttctgtaattaactaattactaaggctcatctaggtttcctgttattctccccaaaagcacggaagtaatttaaggtttaattagctcatctaggtttcctgctattatttctccccaaaagtttgtaagtaatttaaggtttaattaggtcacggatttatgatgggatgtttcctgaagggtgggtggataatgttctttcccgtcccaagaaaagggaaacggttcgtttaatgtgtgtcttgtttatgattctaaacattgaaacatgcatgaatcactgctagatgattctagctttgcagcaggaattaggaaatgatgagcttttaattccatctgtcatggctttctatatttcacatctttgctaggtggagcttataagtgtgatagaaatagacaatgtcacaaggactgtagattttattaggagaacctacattctagatttgggctctgcatttaccctgccatgtctcttgtcatgtgcaggaaactggaaacacttttcctggaagaaagcacgattgatgagagagacaatgatgaatggatccgtgagcttgctacgagcaattctgttcttgagacactgaatttctttctgacagatctcagggcatccccagagtatcttaccctccttgtgcgcaactgtcaaaggctgaaaaccctgaagattagtgaatgtttcatgcctgatctggttagtttgttccgaactgcacaaacactacaagagtttgctggtggttcctttgaagagcagggtcaacctgtggcaagtagaaattatgagaactactattttcctccttcgctgcaccgcttgagtttgctgtacatgggaacaaatgagatgcagatactgtttccatatgctgctgcacttaagaagttagaccttcagtttacattcctttccacagaggagcactgtcagatagttcagcgctgccccaatctggaaaccttagaggtattgtggaacattcttgcagatgcctttatcttccctgttatataataagttgcaaactgcattgacgttctttttttctgttgggaaaagcaggtgagggatgtcataggggatcgtggactacaagttgttgcgcagacctgcaagaaactgcagaggctcagagtagagagaggagatgatgatcaaggaggtcttgaggatgaacaaggtaggatttcacaggttgggttgatggctatagcccaaggctgccctgagttgacatactgggcaatacatgtatcggacattacaaatgcagctctagaggcggttggtacatgcagcaaaaatcttaatgatttccgccttgtccttcttgatagagaagcacatataactgaattgccactggacaatggggttcgtgctttgcttagaggttgcaccaaactccggaggtttgcattttatgtgagacctggggccctatctgatgttggtcttggctatgttggagaatttagcaagagcattcgttatatgttgcttggtaatgttggtgaatctgataatggaattatacaattatcaaaaggctgcccaagcttgcaaaaactggagctgaggggttgtttctttagtgagcatgctttagctatggctgcactagagctcaagtcactgaggtatctgtgggtgcaaggattcaggacatctccaactggaactgatcttatggcaatggtacgccccttctggaacattgagtatattgttcccgaccaagatgaaccttgcccagagcatcagaaacagattctggcatactactcccttgctggaaggaggacagattgtcctccatcggtaactctgctttacccggcattttgagtgtagatacttgctttttgccagacttgaatctcatggtaccaagttccattgctcccattatccgtgaagtcaatggttcctgttctaccaattgatgaagacatgcagacgttccattgcaaagaaccccaaagctaagctttaagcaggacggccagctctgaactgaggctagctgagaacaatcatgaatacctgaaggcagcacttatggatcagcttgccctagctgtccagtatggacatgtaaactttaccattttgaatagttttggagaaacaattttgtaagaacctgtttagtgtatattatcgattttcattttcttaagctatatgctgttgtattgctttattgaacaattatgtcaattagttaatctagtctgacttgctgtggtacgattaataacgtttatgtcacccacaatatggattttccttgctgctcgagagtctggcatacagttttggatccccaggactaaactttagtcccggtcagattggatgtttagatgtcaattaggaggactaaacataagataattataaaactaattacataagttgtggttaatttgcaagacaaatttattaagtctaattaatgcatgattagctcatgtgatgctacagtaaacttgtacttgtccataaatactgctatttctactagcatattcagtccaccagcccatttaattcttctcggaacttccgtggtccaccagcccatttaattttttctagagagtagtactttggcgcatgttaattgtttgagtcggtttagttggcattaaatgcagctcgttggaaccagagaaccatggcttaacgtgcatgattaaatggtgaaacccaaattaattgagggtagaatagtcttttgtttgccacacta

SEQ ID NO: 3984 - DNA, 4407 bp, Sorghum bicolor
tccccttgtagccatctcgacgtccagaacactgccttgcgcccattacccagctcgaccttggttgctgcattgaagagctgcatgtcttcactgtcaaccggaatctgtaggccctcccatggccgttccctgctatcccatgcgaaccacggccatcgaagccgaagcgatctgctgaagcattccaggtcttttattcctagcccaccattctccactggcctgcagactatttgccatgccaccttgcatttgccaccagtaaggtcaccgtgtcccgcccacaagaagcgtctcctgagcttgtcaatttccttaatgaatctttttggaggtttgatacatgtcattaggtatactggctgagcggtgatcactgatttaattagttctctccttcctgctatgctaatcaaacgcccctgccaaccttctactttcccctttgccctgtcctggatatactgtagatgcaccattcttaatctccttagagtcagcggtaatccaaggtacttgaccgggaatttaacacgtgctcctggaaaatcagagagcacctcatccaggtccaccgagtcgcacctgataggtgcaactgtgctcttgtccatatttattctcaagcctgtggcctcaccaaaggcctccatgatttgcataatgcatctaatgtcctccttttttgggttcgtgaagatgaccgcatcatctgcatacaaggaaagctgcaaacgcgcctgtcggcctttaagtgggcttaggaagccatcttcagttgcaatgtcaaacagccgattgagcacatcaatggcaaggatgaacaagtaaggagacagcggatcgccctgccgcagtcctcggcggtgtgaaatgctttgccaaattcatcatcaaatctatcagctaactccattggtttagggatagattccaaattttcatcgtgtctaccctgtacttgtttttttttttttgtctttggagacacaggttttgggcccgagaggctgggtctgcctctgagatgtggcgagttgccttgtggccactgaacaatttgctacggaacaggaaacaagatttactcaactgtctccagtcttcacctgaacagctgacctaagttcgtaaactagcttcaactctcacaggagtcgggtgcaatgttccaatcgttctagagtgctcaagagaccaaaatttagataatgtgcagctgttggggactaagctctacggttgcgaagtcatctcttgatgatccagcacgacactcaaaccgcgcgcttcagtttgttctggcttctataacatttgagtatgcaggataggtgcaaatacatggactcgcacgcaagcatgtggtcaaatctcaatatctcatgtattctattagttgttcggtgaacctttattaacacatgaaggcagaagtgcaaaaagataacgcgtaaatctagtctcatgtgagcatgcataccagcatcatcatgctagtagacgccaaagcagagagccagagacgtaggtcagagggctccgaaaatacagccgcccagccacttgtgcagccagccagtgcccctcctgcgatggcaactctgtgaccctgcaagctagatgaccctgtcatcactcatcagcagtgtgagatccgcatctcgccaccaacctacaattaaacaggcaaaatatttagttcagatgtatgtacattgccacaatggtacaggcaaaatattttttctaggtgctgttgccgtatagctttgcttcaacttcaagagctgcgcaaatgaccataacgttcgtgtgatcctgtcccagtaagatgcgcggccgaaacttccacggcccaagtacgcagctccccaattccatatcctcaccaagcacatgctctgcttgctcacacacacgtccaagtccaaccactccaagcttgtataaatgaccctgccgccggctgcgcccaccggaaagagaccaaatatttcgcgctctgccagtctgctgcctatccatttctttcccggacaccacacacgcccgccgagacgcgcaaaacgatcgaacaccagaggatggcatccgttctcgccttctcccggtgttcgtcgctgcttctcctcctgctggcgacggcgtcacaggccctcaacgtcggcgacctgctcgggacagcgccttcggtaaggaccagagtggcgatggcgaaccgagtctgaacttttgtaagtgcttttgtttcgagctgatcggttccgattccgaccaccatgcatggacttgttgttttccacaggggagcaaggattgtagccggacgtgcgaatcatcgttctgcataggtaagcaacctctgccatcagctgttcttcaggaaagcaaaactgaactgaaaggtcggattgctttgctgagttccatttgctatgagacgactgcggacagagcttgcgtagcctacaatttttctggcggacaagcttaagccggttgcttttcagctttcagtcgggtacgcaccggcaaagggtactgattcgcttctttttttttttcttgtccaccctgtccatgaaaacgaaagtcccgccgctgctgaggtacgggaagtactgcgggatcctgtacagcggctgccccggcgagaagccctgcgacgccctcgacgcctgctgcatggtccacgaccactgcgtcgccacccacaacagtacgcgcaactctcccaagtcccaactctgcattttcgatcaattcctcgttcagtcattcttcttctgaaaccgaaagcccagagcaggactagctaaacggaacgatggttaggtccccggtcgcacggcaggtcttcgcgagctgacacgccacctaacacgatcagaacacaatctgaaaccagtacaagtctaccagataagattagactaagcacaagctagctgcggtgcaccgtgcaccggcacgcccttgtcagttgtcacgcctaactaaacgtgcatgttcccgcgcaaggccaacccgttgcgtcggcgcgtcgaggccaaccgacatgtgcgcgcccgcgcccgcgccgcgcgcacggcgcgccaggagcacgtcgcgtccttgccggcgcggcacggtggcgtcgcttgcacgcgtcggtgcgcatgattgccccgggccggccgtcgacttcgactggtgcgcactcgagcgcaccgaacgagtgtccaacgagtggtggttgcggcatacatgtgtcgccacgacgcctcgccgtctcgtctcgcttgtgcgagttctgtttttttgccgttgactgcccgctgctgatcgacttttttcccccgcatgcagatgactacctgaacacgcggtgcaacgagaacctgctgagctgcctcgacagggtgagcccagcggggccgacgttcccggggaacgagtgcggcgtcggccagacggcgtccgtcatacgtggggtcatcgagtcggcagtgctcgcgggcaagatccttcacaagcgcgacgacggcccgtagccggcgttcttggaaggagcgcgcgcggttggtactaggaacacacgttacacgtacgtagttgttgcaagcagaggaataaaagccgcacgcgcgcgcgtgggcgcgcggcgcccgtccgtggcgatgcggcgaagcagcatgtgctggattggaaggtcatggacggccggaccaccgtggcatgtgactgccttcagtgtatgcgcatactacatatatacatattgattattggtagtgtttgattgctggaattccgagcgaaatggcaaagattgtaagttgtaataaagttattgtacattcctttagtaattactggtagcagtggacagaatacaacagcattcggtcatttatacagttcaatttccgtgctgtccggcgtcaaagtgcaagacttggactggatgctgtacgtcgattttgttgtgtactcaccgcttgcgcggtcctcttcaagcgatggagtcgtcttcatcaatgagtttcacattcttaatagacccccaagttgaacaaattctgccatctgttgttcatcatccatcctccaaaggcctctcgtctagctttgctttagcaattgagacttaagggcagtgtcaactggtgcaccaccattcaaccatgggtcctgccaaaacttcgccttatcttcttacatagtcttgggctctttttggttccccttactaaattttagctaactaaaattattttagttattcttggatgactaatggaactaaactattttagctctttttagtcaatatgtttagaactttagctactaaaatgactaaagtttagctagctaaaatttagcaaaggaaaccaaacaggacgccctggcatcata

SEQ ID NO: 3985 - DNA, 16541 bp, Sorghum bicolor
catttttctgagtattagtttaacctgctttgtttcattcttttttgagtgaaatatacagctggggaggcccccactgtgaattttattaaaaccgctttgtttcatattcttgacaggtatcatcttcacagtcccctgagaatgtcggtcaactcaaggtctgccgatgtgggtcgggagactctaactttcagatcactaataaatctgacgctggtgaaaattcaccgacatgtccaaactgtcaggtctgttggattttcttgcagttaaaaaaatgtgttttcacaaagctgtgcttggttgtacataaaaacaaagatgcaaagggcattctcccaatggcctttcaatgttctattactagaagataccccgcgctgttcctgatgtggatatcttgcaattaagaggctggaaattaattggatgacatggctattagtgggagatgatgtggatagttagtggaggatgatgtggatggtttgcatgttgagatagacttgcagtgccaaagggcctctatctagtccagttggttagaggaacccagcggcactccttaggtgctgggttcgactccccttgggagcaaatttcaggctgggtttaaaaaatcccctcgtcatgccaaagcacaggtcgaggcccggtcgtggtcgttctcacatgggctacaatgccgcggtgtatgggtggggcaggggttcgggggttttctcgatctgtgtgagaaggtcttcttcttaatgcaatgcctagggttgtcttacccccgagttttttttgtaatcctctgagctacaggcccaccccgtctccactggatctcttcccgtggatggtttgcatgttgagatagacttgcagctccaaagggcctgtagtccagttggttagaggaaccgagcagcactccttaggtcctgggttcgactcccttgggagcaaatttcaggttgggtttaaaaaaatcccctcgtcatgccaaagcacaggtctaaggcccggtcgtggttgttctcacatgggctacaatgccgcggtgtatgggtggggcaggggttcgagggttttctcgacctgtgtgagaaggtcttcttcttaatgcaatgcccagggttgtcttatccctgagttttttttggagtgcagattagctttataatatatcacttacttcagatttactgttcctaagtctcagttgcacttcaaccagcatttagtcatattggataaaactacaactgcataaacactattaattcagaatccacatattcttttactgcaggttcttaagagtggaaatttactgctctcatctaaaggtattatttcctgctgatactatgcataaattctgttttcacatggctacattaacttgtggtaacattttcatatgtatatgacatagaatgattatccttctgatggtctaaaattagaccaacataaccttctaacttctgaatttaccaatggtcgagctttcaagtacagaagacagaaaaacgtacatcttgtgaagtcatagcagtaatctcaatatcttatgtgtatcagaatacagattttggaaccatggcaaactgtattgtgatggatgtgtacttatatatgcatgatttttagatgatatgatatcagccagcagagtggattatatatgaaaggtagataacacgagtaaaattcatggctggtccttgaactcggcaagtggtttcatccgggtctctgtactccgaaaatattatattgtctccctaaacttggtttcggatctcatctgggtccaaaagtggctcaacccactccatgtgtttattctttttcttccattttctctctccttctgtatcttcaagcgtgtctaccgcgagtgccattggcaaggccactgcaggcgttgtgagcggggatgctgcctgcgctgcaattggggccaccacagacgaagtgccactggtgggggcgaggcgaggatggccgcgggcgccgctggtggatccattgtggacgctgcggatagggcgaggctgaccgtgggcgccacgccgaggcaagctgggcctccggctggctggcgctgcaatgactgagaatgggtccatgctgccactgagcgaggctcccatgcggccgagggcccacatgtcaggtcagggctggtcggctggacgtgggagagaaaaggagagaagagaaaaattaaaatagaaatatattccactgatggatgggtcccacatgagaggaattgtggacatgacatgtggacacacagcatagagagcgggttaggccctgtttggtcgcggatgagacccggaagcaagtctaaggacccaaaagtagcattttgagagtatagggaccaggtgacagcccccctgccaagtttgaggatcgcccatgaattttactcatcattttgagtggcatcttctgagttagagtagaccatgttataatctacttgctctaaacagcatggccaagaaacatacgatatctgtttataattcttataaaatcatatgcttaaaaattttggcgcaaggtcgaacaagctttggtcaagtctcagctgttggcgttggggtgtatgtgtgtgtgttgtctttgtatttttgtactatactcttccaggggtgaagctagcagcaaatccaccctggtgtatcactaaaagtgtatatatgttttatagagatatgtggtaaatcttaggatctttagtagcaaaattatatttaccctgatgcatcaacatcaggagagctgaaacccctgtactcttcttcttaatgaaatgatacacaagcacaaccctcttgcgtattcgagaaaagtggtggagtgtctataggatagttgtccatgttgcttacacctatacttagcccaacatataacaataagaatttcccatattttaactacatttagcatgggaggtttctttgcagtttaattaggtgggtcaggatatttctgctttcacatgttcctttctaatgtggaccttttatagaagcttggttgcttcattctgtcatctttacacctgatcacttctgtttcaacatgaagttttacatatttctgtctactctacgcttcccatttcattaattggatagattacagggattggctggacagtatggaaaaagcgttggtttattcttacaaggacatcattagtgttcttcaggagcgatcctgtaagatgaattgttatcattccttctatactgtttcccttttctttaactaattagtctaataccattttgtagaaaatgtactctgttgtgtctctttgcttcagttacaatgctctgaataatttaaattgctgtttggactagaataaaatttgttgtaataaagcacactccaaggtgaagtgtattctgaaagaagacattaggtagatacctttatccagtggggttagaccccttgatacctatactatatgtccaacagttcaactaagggtaggatgccggctggggaagctacaaactgtacctcgtctatacccaatgggccctcgcaccctgatcagatctcgtttgatcttttctgttctgatgttttgttagccttatgaaacttagtatataaattcaacaaatttgttttgaggaagaataagtatatgaatccaactcttagcatctttacctaaactctacagaatatttttaacaagaagtttgtgttgctcactatccccatctgcttgcttagatttacctgagctgtaatcaagtaaagcaagttatacccactgttagcacttagcaccctagcagatgaactacaaactagcatcctgatttgatctaggtcattgtatcattattcactatacctacatagtgtaacaggaaagctgaatgaacctataactataagtgaagtggtcctatagtttgattctgtgcaaaaaacaaaatgataattctactaatggctgtgtatgtaaccattttcaagagctaaacatgattgcagttacatgtaaaactggtgaaatgttaggttatgcactcattgcaaatatccccaatttctgatttacctgcagagtgttccccctcccaaaggaagtgaaccaattgttacacttggtggaattgacttgaataacactgcaaggtatgaatttaatgctgatatttgttgaagtataaatctccttcaataatttcttataagcttatatcttgtgcatgtttcagtatgatagtcaaagaagaaaggaaagttataacggtcgtctttcctgatggccgtgatgggcgcactttcacccttaaggttggttgtgtaccacggttcagtttcttagttactataggagggttggcatttgggagtgtgtgagtgcgcgcgcgtgtgtgtgtggtgttgtttgggctcttgccctgtactctcttcttaatataatgaggcgcagctctcctgcattttcgagaaaaaaagagtgtgtaacgatgttactgctgcagtgactagtggggcaacaggtgcgtcagtgggtttggggttgcaatgtgggtgtccaacaataattaataaggctcatggtatcaatgacagggatttaatggtgtgatttttcatcaagcaggcagaaactacagaagacctaaatgagtggagaagtgcattggagaatgctctggctcaggcacccagtgttgcaaatacagcgggacaacatccgatagtcagtactgacataatagaacctgttgaggctgctgttgaacaatgtaagctatgtttactttatcataagttgcatgtatgactcttttttacttactaataagtcataatttctagaccaaaagaaattcgacttttttgggtaaacaataggctactcaaaatttcaatggatatatcaattcctaacagaaattgatagctcttggctcctccctttgtactttttatctcctttcttaatgaaatgacacacagctctcctgattgttcgacaaaatagctattgactcctgtctttttcatctgatagctttgcctgtaaaagtgtggtgatactgttccaatttgtgttcagctaccttcgttttacatgtccttaatgtgttgttgatttagaagttctgtaacgcctggatgaaaatgacttatgctgcgaaaatgactctgttgcagataaacattctaattctttgtttgattctgtttgtttgtgcttgtacctagaaaccagagttttctaggacactaacttaatcaagttgcatgctccctacaagggcttggccaaccatttgttagtcaatatacatgaagtaccttacatatttcatcaaaatcactgcatctagtcatctcaagagttgaaaagagaatggaggatatctacagttgcaccagtcatccattatccatgagtatatataaatataaatagattttgggcctcatgaaccaagacagatacacacaccaagctaccatggatacatataatacaggtggcatagaaaaaatgaaaatttgcatcaaatgttagataatgcagtatattaacatcagagacttctcacaatggagcttgagactacaatatttggaatagtttttttcgtcaatttcattcttactgtgattcagtggggagggactgaatcttatcatggagttggaatacaaataagcaaattcgatccattgcagcagatgataagtctgtaatcggcagaccagcagaatttgcacttgtcgatgctgatggcaatacagcatttctggagaaggccttaaaattcattgaagattatggtaaatcttttttcatgttttaataattcaatacacaaatttgcctggaatttcctgtagttacgaatttgtgaaataaatatcctggtgaacatcaaatagcatccaagtacaggtctatatatatttaccaagttgatgttcaataacaagtgggtccctccctctttctaggtgtcaaggttgaaggaattctccgtcagtctgctgatgttgaagaagtcaaacgcagggttcaggattatgaaaagggtgatttcttgtactttgaccattttaccttttaagtaaagataactaggtttgacacttctcagtgtcttaccaagagcttattgtatgtagttctagtaagttatttttctttttattatatccatacatattttcatgaaactagtttgggaggatgtaagtttggatagcccacgagttgtatttgctctggcttatttgcttgctatgtgtttaaaatcacatctttcaatatgaatttgtaggaaagaacgagttctccccagaagaggatgcacatgttatcggtgactgtattaaggtatgtacttgacaagcatttactatgatctacaataggaataaacggttctattcttttagtaatgtttgttgattctcattcactgcagtgcattcttcgagagatgccatcttttccaattccggcaccatgttgcactgccctggttagagcttaccgtaagactgacttgaaacttacttgtttttttttcagaaatctgccccatcttgattttcagtgcccaactacctttcatggagtacataccaaaataccagcttaatcccttatctactaacaattgtgttatgctaaaaattataaactgatcaaaacaaatggttgtacaggaactgacaagacgaaaagacttgatgctatgaataaagtgatatatgaagtattcccagaaccaaatcgtcaattgttgcagaggtatgtacctataatggtttgtttccaatgtgtcatcaaccaaattgtagactgcacaagtaatgttcatggtgtcatgatccctactgtctatgttcattcttgaagaatatgtacatgattttttttcatatttaatagtttcctttagactgtatggtaaactgataatcgcagaaatccatgagactcattgcttttcttttaggattctcaaaatgatgcagattgttggatcacacaaagctgtaaataggatgtctccatctgctttggcagcttgcatggcaccgcttcttcttcgtcctcttcttcttggtgaatgtgaaattgatagtgaattcagtatggctggggatggttcattccagttgcttcaagctgctgctgctgccaaccatgctcaagctattgttattattatgcttgaggaatatgatcagatatttgatgtacctgcttttccctgcacatacttttctttgcaagctcgttccatttgaatccgtactgcattgttatggattttaatccaacaaatacctgtttaggatattgaagatggttcgtactcttcagatgcttataccgagtctgacattgacaaggaatattcaacagacaatgacatccctgaagacgatggttcctatggttctggtgaagatgttgaagaagatttaaatgatgatactgaagactcttcaggcatgagggttgaatgtgatagtaacattaggattgataatgcagatgctaaggtacttcatctaatcactgggtccttttctaatattatccaaaggaggatatctcttttcctgtaaatctttatgatcgatatcttgtttttatcatgctattcattgtcttgcttttagcattcagagcttatcttcctaaacgtaaccattcagtgttcacagacctggtaaaacattttccgtttcaccaacttttttttcttgaacacgcaggagatctgcatatcattatattaagaagaaacattttcaccagcaatattttgttaaaaataaattctaaattatctacttgaaatgatgattatggattctggttttctgtcaaaagttcctccactggtcattaacttattatatgataaaaatcactttgaatcaacaaaaatttgtactaactttccctagaatgaattagcttttctcatattgtactctgttccatagcgtttttcatccacctcagacagtatccgaaggagaataaaaggagaagatgctttatgaactaactctgtggtggtctctggccctccctccagaaactaacagaaaattgctaaaagaaactaggaaaaaaatacgtcacctaacaaacacctcaaggcagaactttaaaaaaatccgacttgtaccaatagttcatattgcaacagctttgtgacctctatctagttgatatgttgctatctgattgggcttgttaaatttttcaaaagaagcagtaattttgttatggaacagaaattactgttctggacataagtccttattctagtccttatctaaagtaaatttaatgtgatcaaaagggcctcaatgattgaattcttacttgaccgtgtgtttttgtaggatcatttttagcagaatatgtcaataacaagtaatccttatacgaacaaagttatgctaattgattggttaaacaaaagcctttgcaaatatcctcactatgggctataaaaacttctccattgtacataacttaaaacttggatggtgcaaattgaacctggttggctgagtagcaactacctccacctgcgagtatatctcagggagactcaataaactgtctcttaagaagaactcttttttttttttgaacttatcttaagaagaactcaactagttatttgttgtatctgaactgacttaagattttatgctttcatattcaaccgatagcccaaaatcccattaattgtgttctggtgacacatgtcagcactcagcaattcattcagtatttgaaggtagcatataattgtaatgctaataagatacatctttatagactgctactatgtatttcattcagacagcaactgtataggatgcatgcagccatgagaaaatcactcgtgacatctgaaatgatgtgggtgattttttttattattttttgtaaaatactttttctagatcacactcttgaaaaattagtggttaataacattctttttactctgaaaagtcaaaaaaggcctttcttttcttgactgaaaagggattactctaggcatcttcttaagccatctaatttcattctaagatgagaaaaaccttggttgcagtaactcaatattcttggaaactatattgataagactaagattctatgcataacactgcatgaagtctgaaattactacgttacatttttaatttttaaaacatataaactttcctttctcattaaatgcccttgcaacctgtttgttgcccttacaatttctcattacccataggttaataacaatatcttgagcgacaatgataaagttgttcaacctcctgcaagggccatggatgatacatctaaaatgcagagcaacagttcatccgcagatcatatacaaaaacaaaatgctcattcgtcagtaagcaaaaggaactcatgggggcgtacttcagtaagtttaattgttactcacataattctatgtattagagttagtattatcctacaatctggatggaacactttatttacaggcaagaaaaggcttgtcaacagaggaggctggctgttgcagtgataccgacgagtaagtagccttctatgcaatgcaactgggtatgtgctatgtatcggaagagttatagacatctcctaaaagcagcaaattctttttcgtttgttatttggctagttctcctcagcaaccaagaactcatcacatgatgtcccaaagagactaactggaagagcccactgttaggatttagtaatgggaataaactatttctgctcttacatggttgcgcagttctattagttggtgtgattaaaaagaatgtgatggttgtctgctatggaccaaaccacttttagctaaaaaaggttatattcctttttccattcttctctcaactcccacttgtaggatgattagtgcatataaaatacaaacttgcttttcaattcatacagaaagtttttttttctttcactgcatataggttcatttgccctttgattctccaaaatttgtaggctttatgaacttggctaactattaacagtttcctgttgcctttcattctgaataaaaatatattaaaaaggacagatggaaacttataaagataaaaatacaagtcagatttagaatttacatctgttattattttgagctgccttttcttttctaattaagcttctgaactagggctcatattgcgaagcttgaaaacaagaagacccatctccaatctaaacttacagaggaggtacaaccttttccctaggatcacacgaaaatcatgtaacataacattcttccatgtaagatgattctatttttcaggtaaaagaaaatacagtcctccatgcaaatttagaaaggcgaaaagaagcactacatgagcgtcgtgtagcacttgaaaaagaagtaagagttcaaacttaaggcctggcttattattattattgttggtggtggtggtggtgctgctgctgttctggaaagagaatgctcctaccaggcagggtttgaacttaaattattaagaaagacataagatatcatgcattatgttgaaggtgagattgttctactagcagttatgctgcaagtactatccaaacatccaaacccaagcgatagcctaataagtttgagactcatgttttaagagtcaacaaatggactccctgccttttgctcgaggcatggtcatggtactcggtcagatagctgtttgttctttgtcattttggatgcccaggacaactgatatgcaatatcttaacgtgattcttcttcttctttttttttcctttctaaagcatgaatacattcaaaacaaacatcttcttgccgctcaaacttatccaatgcaatcattgttgtaggaatatctccctgataacaaactgaatgaagttctattggatgttctaatgtcattacgcagccaacttttttttgaacgtaagtggcaggagctctgcctttcaattaagaagaagagagttatatgtacagggaggggcaaaagcccaaaagacactggatgcatgcctcagcatgtgagagcacacaaacagtgaaactccgcactaagagaaacaaccagtaaggaggttgctggtggtgcacccttttatgtaggtctaggttttcctttgtagcaaactttttttactgcacattttatcaaaagcgtatggttctttacttgacttgggttatcaccatggtcagcaaaggatttgaacatggtgccgcagtgaagcattagtttatttcttccttcagataaaaatagcttctagcatggtaatgtttgggtacagaggcaggggtgagggcaatgccatttaataaacaattaataaaatgttaaaatgtcactttgtcataggctcatagccatgtatccatccggcactggaccatatagtctgcttctgtatacttttttttttgaaaacacaggagagctgcatttcatagtattaaagggtggtccccaacatgatcctcactcatacagggaccaaatatgggtgaggcaattacacaggctcaaaacttttccacatagctaacacacacaactcaattaactgccctaggttgcaaaagtaagtcctaaccccagcagtttcttcgcaccagccatgcatcataagccgtgctcatccttcagttcacacaaaattgtgttaactgaaggagaaaccccctcaaacacacaagcatttctatgcttccaaatagtccaggcgccgagaataattagtgttcactcctcttttctgctccttttttactcttcccatcgtcttgcgtcaccaatctgcagagctcctttcattttgacaggggactaaatctgttagctccaacggatggaacaatttgaaccacacttgtcttgccaccacgcacattgttaataagtgttgtatcgtctcatcctcttgatcacatagatggcatctatccggatgagggaggcccctcatagcaagcctatccactgtccaacatctgtttcagattgccaggcacagaaacattttgcatttagctggggcccaggtcttccataatcgacgccaaggctcgaaggtcacagcaccaaagaaataggctttataggcagatttggaggagtaacatctgctagcatcaagcctccaaatgtgacgatcctcttgatcagtcaaagcaatttttttgagagagtcaaagcaatttctatgaggcagtcccataactgtaagaattctctaatatcaacccaagacaagcctccttggatgtccctgggccattccccattgttgagagcttcagccaccatccgggtcttgtgtgttcttggagggacacatgcaaagactgttggcacaagactttcaattgagcaaccgtgcagccaacgatcaaagggctattgagttggtatgcgagggaagctcaaggtcagtccatggacgatcagctctggtcttcttaagccattgccatctgatttgtagtgcccaggccattacctccagattgggatgcctaagcctccaagatccaacggttgcataaccttctcccaagccactagacaacaacctccattagctttttccacctcttctaattttgtccaccgccttgatgaaccactttggaacgttgatggcaattaacaagtgaaccggcattgctgagagaacagcatgaactaaggtggcacgacctgccctgttcatgagagctgccttccagcatgggagcttgtcagcgattttctcaatccatggcataaggtccctcttctggagcttcttatttgacaaaggcaggcccaaatatttacacggaaactccgagattgaacaaaggtagaatatcttgaattgttgttaaagaatcctctgcacagttgatgggtataatattgcttttctgaatattggtttgcagccctgaagcctcaccaaacaccctgagaatgtgtctagtgatctgcagctttggtttttataaaagcaacattatcagcatataaagacactctttgtccagccatgcgttgagataaaggttgcagcagcccctcattccctgcctttgcaaacaagctattaagcacatccatcaccaaaataaagagcatgggggatatccccttgccgcagccctcgctgattctgcaagatttctcccggctcactattcactaaaatacaggttgaagaagttgatagcagattagagaccaagttgcaccatggcaagccaaagcccaaatgctgcagcacttctaggagaaatgaccacgacaccgagtcaaacgcttttgagatatcaagcttgagaaagaggctaggcaccttctgtcaatgtagcactttaactgtttgctgcactaggataaaattgtcatgtatgcatcttccacatataaatgcactctgattcatagataccaaggagtccaagaagggtgccaatagatttgccagaatcttggttattagtttagcgaagctatgcactaagctgatggggtgataatcttttgccgtcattgcatcaaccttcttcggaatcagagtgatgtaggctgcatttagcagtccaagcccccttgcatctccttgctgtaaagaaatggttgctgccatgccatgagatctgctttaatcacctgccaacacgccttgaaaaatctgcctgtatacccatctggacctggggctctatctgccggcagtgatctgattgtctcccaaacttcatcctctgtgatcaggctatcaaggattgatgaatccatactggccctatggaagaaatctagatccaaggttgcagatcggtttggggctgtgcctatcagattctcatacaaatcaaacaaaatcttgtgttgatcatcttgagaagttactatccgatcaccatccatgagtttgggtatataatttttcctttttctgaacgtagcctgcttgtgaaagaaggatgtatttgcatctccatcctttaggtaccttactcgggagcgtagtctggcaatagttctttcaagtgaagctaacttcaaacaaagacgcttcaattctcttctcagccagtcctcttccggtgacagtgatctccaaccttgagcgatttctaacctgtgcaacacttcacgtgccaaggataactgagtttttagatgacccactcctttcgtgctccaagactgcagatcgcgggtcagccgcttcagtttgaaggagatgttctcaagagggcatgatgtttgacttggctgatcccaggaactcttcactgtgtcaaggaagccaggaaggcatgtccagaagctttcaaagtggaaacatctctttcccttcaccccatctttgagaccaagcaccaacggacaatgatcagacatctctgtcacgtggctctgcaaaacacaatgaggatatatatcttcccagtccacagtacacaaggctctatccaacttgacaagggtgggggaatttctctcattcggccaagtataacgacgacccaatagaggtatctctttttagttccatctcattgacaaaacgatggaaccgtcccattagcaccctattcacattgtcattgcttttatctccggaagaatagatcatgttgaagtcccctgttagcatccaaggcccagcacagaaactccttacttctcgtaattcatcagggaaggccggtttgtttgcatcttcgtggggaccataaattccagagaaccaccatggttgctccccaacctcctgaaacttgatagttacagaatgtcggtgcactcgaaactatgctgcatttacatgcttctggaaattgtttgttgtgcttgcaatgttctgctttttcctctgctcaacaagaatactttgcacattcaacaggtggaaaatttacgagatcagctgcagaaggagagaaatctgagggcttcattggaatctgggctaatgaatatgcggagaggacaagtgtcccttccgtcaacgatagacaccaaggtaccctttctgaatctggctattgaggaagataatgtttttcgccatttgaagcttttttcttttctttgtgttgataatagactaaggctgatcttgaggaagttgctgctgctgaagctgatattatgaacttgaagcaaaaggtttctgatcttcggggacaactcaacaaccaagtcccattgagttccacctcgttatgtgaatcatgcaacagcaagcgatccataaatgcagacaagtttgtcgagtaaggttttactgctgagcattcaatattactttctcactgttcataaatttgcctccttttagaatccttggttgagacataattggcctccctttctgcagaggtgaacaaaatgccggcctagtcgaagcacaaccaattgtaggctctaattctgtacctgacatgttctgggctacaaaccaaatggttcagaagatgttgtattcgaaaggtgagattgggaaggacggccaagacggatcactaacatcaagatggaactttgcacagagaccgcactcaaatagtccagttacgagcagggttcaaggttcagatgcctattcaagtactaaaaccgaggtgatcacattctgctccgtaataaacactgattttactaccctgggtccccataatcacctttttctgtgtcttgataagattatgttaacgacgccactttgacttgaagttactaatgccactctattatcaggagtctggggccgcaccatcctttgcattagccaagctgactactcgactcaactttctgaaagaaagaagggccatgcttgccagtgagatgcaaaacttagatctgggtcgctcccaggcccagaagcagacagctcctctgaaaaatgagactccaactgagaagtagaatcgtgttactgcatctttgttaggccacaagcccacaaaagcattgtgccatcgaagtgggacaagtccagctgccacgatcgatgctgatgtaggactgcaaggcagtgacagaaacctttgattggacaatggacagactacctagctagagtaaacttgatttgtaaattgcacaggtatatcgtgtcttcaccatgatgattcatatgtcaagttttgtagcgacacccggtttgtattattatctccaaatacacaatactctgggataaagccaaagtgcgcttgcaaataactttatcgtgtctgtctgggtactctggtatgtacatcaacttcatttatgatcaagttcagtaaaaatacagtcccagtgctaaagagagcaactagtatacctgcgtgaacattgtgctccgttttgtttcgtccatttgcactttttttgaaaatcataatagattctgttgtttcatgtctgccattttctcaaga

SEQ ID NO: 3986 - DNA, 5841 bp, Sorghum bicolor
atggaaccaaacatatccttaaagtagataaataaaatagttattgtatgtgtcaggctataaacttggctattgataactttagcttggcaataactcaagaaaggaggggaaaacaaactgaatcccctaaactagcagtttttctttacatacaggatacggtgttgtctatcgtgcaacaattggaatttggagacaagcatagtacactacagtactccgcactttacaggtattcttcccttttcagttgggcatgccccgcatggagcaacctcgtcgtaggattggggccattttgttctctagagtcttgattcttagattcctcaagatctcagctcaagcactacgctttacttagcaaaagtgaaagtaaaggctaaagtgtcaatggaagcaaaggttctttttgtccatgtccaatgacttttcttttcatttgcttttatattttattttgacgtcaacttgtcactcactgtatgttacgcagacgctgactctttcaatgcctttgcggactcgctaggtttgggtagaacacacgacttggatagaaaaatgctcaaaacagatacaaaagcatgatcataaataaataattatttgaatacgaatcttatagccccggccggttttgtattataaaatcatgtgtggacaaaagtggttagtccaagcctttcgctggccccgcattcttcttcagcgagagatcgcacgttcatccgaaaggtgcagacctgcagccggttagcttttaactagtcgatgcattttcaaagaatcttactagatgcaaggagaaagtaaacttagaccttgtttagatccgaattttttttaattttgacattttagcactttcgtttttatttgacaaatattgtccaatcatagagtaactaggtctaaaagatttatctcgtgatttacagacaatctgtgtaattagtttttgtgctcatctatatttaatgctctatacatgtgtcgcaagattcgatatgatgaagaatcttgaaaagtttttggtttttgaggtgaactaaacaaggccttagacgccttgtaaaaatcaaaatcggcttattcatcattatagttcgtacattttttatccatagtgttgacttatatcaaatttcctaacctattataattttgtccaaataattaggacgtgttcttaacataaaaatataatgtcctgtatcagctcacaaattttgaaatataggatctatttggtagggatccagattcttgtagaaacattttaaattcaaattctctctagaaacgttttaaaatcaaactaaacattagtttaaagggttatatggacataggccaaacaaaattagcgtgagtagtctagacttttacctgccgattactaccttggttctttaataaattaattcctagagttgtatgtttgatcgattttctagaaaagagcacaaatatttatgacacaatataaaaaaaaatatatttatggtgtatatgattatactaattcggttttatactctttacacactttttttataaacttttgatttgatgattgtttttttataacaatgacaatgattgtactaagagtcttataaattttatcatgggccatgtaaatctcgggcctgcgtggaatcaaaggctcgccaagcaccagtcgcagagatccagccatgcgaaattcgccgtgacaactgacaaccttctcaccaatcgcacgtcggcccaccatctctctctctctctctcctctttattattgttaccacgcgaaaaaatcggtcccaaatgcagcgttagcagtaataaacaatctggagagacaatcgttatcgatttgatccaagaatttccgtatgtaattgctaccttttgacttcaaatctttttcttcctccctggttccttctctttcgtggcgcgttgagaagaggacagaagaaatggggttcatatcgggagtcataatggggatgatcgtcggcgtcgccctgatcgcgggctgggcgcgcgccatggctcgccgcgccgccaaacgcagcaacaaggtaggtgcagctgcatcattcctatagatttgatctacgcaatcttgaaaagttctgatcttcatatccccacctccagttaccgggtcttgatttttctctctgatagatttgacagtacggtgtatatcttcgatttggtgcaaacggtttaattgacacagcctatgtgttagtgttacattttcgtgtgttctctgttgttgatttgtgtgcagcatgcaaaatgtaccttgaaagtggacgccgcttcactgtaatttttgtttcatctgggtttatggaattaaatttgtgcgtcttagtttgggataaatttcaacatagtgacacattttggaacaggctgcggatgtcagtgcactaggatctctcaaccgtgaagacgtgaagaaaatatgtggagaaaatgttccccaatggatatcatttccagaatatgagcaggtgcaatgctacttgacttgatgtagctataatcatgaaactgtaaaaatgatgttgctgtattggctactgtgtaaatttgaccatttcctgtcccaagatatcaagctattgactatcgcacatgaatttttactgttgtaattgctagacaaaacttcgcaaagagagaactttttgcggcccacgtatgaacttcagaactcctcgatacataaaacctggaaaatgaaacatccactattcatattatgctgttgtttctcctagagtatgtccccttgatttgatacttgcatgcttcccttgatatatatttttcgttttcctttcaggtcaaatggctcaacaaacaattgagcaagctttggccctttgtggaagaggtaagatgatagctttggtttcttcagaaaacttcattatgaaggcaaacaatttagaacgaagctactcccattttaagaaacatacagatcttaccattttgctgccaacaaaaccgtccttattcacagttgcatccatttacaggcagcaaccatggtcatcagggattctgtcgaacctatactggatgattatcgaccaccagggatatcctcactgaagttcagcagactctcccttgggactgttccaccgaaaatagaaggttgctaagacaaaatggtgtcaatttaacagttttatggtctcataggatctcgctttgacatgctattatgtgctcaggcattcggattcagagttttaagaaagggcagattacaatggacatggacttccggtggggtggggatccaaatattattcttgcagtcgaaacacttgttgcttcgcttcccattcaggtttgcagatcgccacaggcccgtgaccaaaagggatatttggtttaatttcccacattttttttctataaacgcatgttaatttttgtcgtcaaagtacctacgcgtatataaaataatttaccacgtggaacgatgttggtagttacagcttaagcaaaccaagtaaaaatggatcctcttaattgtatccttttagactccattacaattgtttgcctgcagtataagatttcatgtttagacttcaatttttgttttcacatctttctaattattttaacaattcctgtgtttatttgtgtatatatatgtatacagtttaagaaccttcaagtgtacaccatcatccgtgttgtcttccaattgtcggacgagataccatgcatatctgctgttgtcgttgctcttatggcagaggtgtgcttcttttagctactgaaactcctctagtcctctgttatccaggctttgctttggcttttgaactctagtttgcaaacacttcgttgtcagagatgttgcatatgagagcattctttcttttgtttcaatgtcaaggagacatgctttatttctcttgatatatttgtttttgagacgcgtggattccctgcaattgcagccaaaaccgagaatcgactacatactcaaagccgtgggaggaagcctgaccgcagtgcctggcctttcagacatgattgacgtatatgaaatgaactttccttttttttcgcctttgttttattcctatatacagtacgaatctgagaaggaaaatataatgaaatttccccgttatgtttctgtaggatacagtggcgtcagtgatcactgacatgctccaatggccacacagaatcgttgttccactgggtggagtcgacgttgacgtcaggttaacacagtctgctctgcttcatcagaatcatgttcatgaagttagttgcttgatccgtcgacttgaaaaaattcttagaatgacagaaaggtgatgtgctctcttgtgcagtgatcttgagctgaagccacacgggaagctcacggtcactgtggtccgcgcggaatccctcaagaacaaggaactcatcggcaaatccgacccctacgtggtcctgttcatacgcccaatgttcaaggagaagaccagcgtcattgacgacaacctcaaccctcattggaacgaaacgttccatctgatcgcggaggacaaggagacgcagtccctagttcttgaggtgcacacgaactgataaacctcactgcctgttcccttccagggagtcatctgatgtgcttgtttctctggaccttcaggtgttcgatgaggacaacatgaagcaagacaagaggcttggcatcgcaaagctgccccttagcgacctggagatggagaccgtgcaggaggtgaacctgcagctgctgtcgtcgctggacacgaccaaggtcaaggacaagaaggacaggggcatgctcagcatcaaggcaggatcgatcagcctcgtcctttttcgtgttcagttggcagcagcaacaagtccccggttgcctgacgttcctttttgcaagctactattgcaggtggtgtaccaccagttcaccaacgcagaggcgcgggaggccctggagctggagaagcagaccgtggaggagcggcggaaggtgaagagcgagacggcggccgtcagcggcgccgcggacggggcaagcagcggcacggcgtccacggtcacccacgtggccggcacgggcgtcgcggcggccggcacgggtgactcccgtgccggctccagcggtgggatgggcatcggcgctgtgggctccggcattggcgcgttcggcagtggactccataaggccggcaagtcagccggcaagttcgtcggccggactgtcacgggacccttcagcagcgctaggcgcagcgccagcaacgtccccaacgtcgttgacgagtgacgaaactagcctagcagctgctagtttgttacattaattaattagaaattgtccacaactcctttgttatataggctttgcttcgatgtcacatgcagtcagacgtgtttaacacaacttttataacgtgcttctggtttagcttttgctttgtggttacgtaagacacagctggttcagggtagcaatgagataagacgaagcactgacaatgcttagcaacagaccacgaaacgactataacaagcagcgtaaatagcactctttattgacaatgaacgtagtgggaatgtttagccttcaatacagtgcttatttatatccaacatactacccaatcggcaactacttattagcatcatacaagggtgatatcaccccatatttgttgccagctaaccaaaaaaatcctctgcatagctaaggaaggaaaaatgatgctgttcgtcccatgcttaaacaaagggactgaggtttatgatccatcggagacaacagat

SEQ ID NO: 3987 - DNA, 4652 bp, Sorghum bicolor
ttcactgtcctaggtcatttgaaattttcaagttttaatatgtaattttacttcaatgcccatgtttagaggcggcactattcaatcacctctacaaatcgatttgtaggagtgactaaatctagagccatcctccaaaaataaaggcatttatcggggtggctagaaataccattcgtctcaacaaattgatttgtagatgtggctcattttggaaattatttttaaggcagttttagattgaaccacccctaaaaaaatagagacatctttagagcatatccatcaacactacctatccccaaaattggatagtggagggccaaaaatccactactagagactaatactagactatctaaatttgttggctacctaaatcccttcttccactgcccatatcagttgggccaacaactggctacccaaaatttttggctttccccaacactcggtcacgcagacaagaccccaaggtaaccggttgtagaagactccatgacgactccccagggctgccacctcgatgactctccggcgaaggcctgccccaatggtggcatgtggcttcctccgacacagtgcgaccatggactacccctgatgcaaccatggctttccccagtgatgcaaccttgacatccccgacatggcatgaccactgcctctcccagcgcggcacgaccatggcatcccccccccccccgcaccggagccacgcggccttcgcgacatgaccacggtcccccgcatgagaggtgcacgacctcccccagtgcgatcacaaccacgacatcctcgacacacaggtggtgcgcagccttccctagcgcgggcgatggccatctcctccctgttgtcgtagagatcaatagagagaggatgacatcacagccccatatgtcattcactgttagattgcatttagatgtttaggtgtcgctggagttaaaggcaaaaaatgagtagtataaaaataggttgctacccaaacaaacatttaggtgatctgctttggatagtattactagaaatgtttttataaatcaattttgcactagtggctcaaaataatatttttagttgttgctgctgatttgttgcgagagaaaacattgttccattgctctgaataagctcgaacaatgtgaaacaaagagctcctattcattttattccattccatttggttcccgttacacggttacatatagtagctgtacataatttccatggatatcatgatttagcgttgttcagtaatagtagtagctagagccaaagccatacgtgcggcagatttagattttacgctgatgcatgggatcgggatcgccggatggataaaagtaagcgcgaaatttgagaggctgcggaacttccagaacggataatatccatccatatgcatatcccaaatgaccaagcctggccacgaaacgcccgctctcccgatctcctcttcatcttttcttatccgcatgtaccaaccaaaagaaaaaacagcgacccttttcacggcagatttcgtgggcgcgcgtggacaaggcatgtcagtgcgacgactaagagagaaactgatcgagctctgttctgctagctgcttataataattcagtaattaacatttaactctggtgttaattgaaagctgataaccattgtgaccattttcctttccgaacggatgaatacttccccccataaggtttgacaactatgagtatatggtttacaagagaaatataactccccatttgcaccatgtcgtttacggttgacagtgaacaaagcatagctccatatggatgtcattttagctaggtcccaagcagccgaaaatgaagtgcacgctttcagatatgcagtgtctccgtctactgcacgattttttcagcctcgttggacccaacccaaccccccttttcataagaaaaatgaacgaagctttgccattttgctcaggcctgcagcggcggcagctgggagagcttgggagaccactgcccggcagccgcgaggaactcactcctgcaagatagcttcatatacagccatagccggagtacgtatatgtagctacgcaacctcagttcaggcgaggttagtctgatctgccttcattttgaagctcgattttgctgctgcatgcatatatgcgtcattgatcgtgtgcatttttttttctgagatctgtcgttcgcttttgcacagatcgtttttctttaaagttttctacacaaatatgacaaacttgagcaggcgtctgcatatgtaatttcttttcttgcctctgtccttcgatttaagcagatatttttattctcttcttggctcaaataacagaatcgttttgtggtttctattttggttcaaattaagtaatggatcatacatggataccatcatctacttgttcatttactttgtcatccgatccgtactgcttttctcacggtcaatgcatgaagattctgttgctgacaagaaacatattccgttttggagttctctcatcgaactagcacgcttcaacatacacgcacaaaataaaattgagtaacaccctgcacaaacgagcttatataacccaccaccaagctaagatcgagggcaatacacatacacacgggaggacatgcatataattcgatttaatttagttatgcggcaataattgggaaatttgtaacaccctaattattacgatatatagggtagcttcttcattcgatttgcatgctttgattattttgagaccaatttgtatgtttattctgaagataggtatgaaaaagcctctcgagaagtatatgcagcatgtgcatgatataatcattagcggagctagataagtaggcccccacgtctgcgctccgccacctatagcgactctcccctcctcatctcctgatccgtttgcactttgctagctgagagctaccgccggccagtcaccagaatttggatactgatttcgatactgacctgtttctcttcagaaatagtacgttcgaaacgttgcatgtattgtgacctgttattagccatttgctgcatacgtgggacacgttcagatcattcatttgcagcacgtaataacctaaattttctacatccatgcagctagctagccacaacgccgaccaggcgagaacgaagagaagcatcgatcgattgggtcacaagctcccagcaacttttaatccaaatccatggacaaccagccgctgccctactccaccggccagccccctgcccccggaggaaccccagtagtgccgggcgtgcccggcgcagccggccctccgccggtgccgcaccaccacctgctccagcagcagcaggcccagctgcaggcgttctgggcgtaccagcgccaggaggcggagcgcgcgtcggcgtcggacttcaagaaccaccagctgccgctggcccggatcaagaagatcatgaaggccgacgaggacgtgcgcatgatctccgccgaggcgcccgtgctgttcgccaaggcctgcgagctcttcatcctcgagctcaccatccggtcctggctgcacgccgaggagaacaagcgccgcaccctgcagcggaacgacgtcgccgcggccatcgcgcgcaccgacgtcttcgacttcctcgtcgacatcgtgccccgcgaggaggccaaggaggagcccggcagcgccctcggcttcgcggcgtccgggaccggcgtcgtcgggggtggcgccccgggcggggcgccggccgccgggatgccgtactactatccgccgatggggcagccggcgccgatgatgccggcctggcatgttccggcctgggacccggcctggcagcaaggggcagccgatgtcgatcacagcggcagcttcagcgaggaaggacaagcagggtttgctgcaggccatggcggccccgctagcttccctcctgcgcctccgagctccgagtgatcgccatgatgtgtacgtcacgcactcacgctgtgtgtatacactctactatagcaaacatggtaatggagctgcatacagaacgaataaggcgtgacgcgtgtcagacagtgagagtacgtagtaatttgtacatgcacgtgatgtgccaattaatcaaagattaacatgcagttaattaattaattaaattaattaatagctattcactcctcgtcccacggatgcctcaaatctctattcagaacatctccaaaaaaattagccaaaaatactagccaaatttactgatttagttactctctaaaatagatttgacaaaaagatattagacttctccaacagactctgcaaaaggatggctagtgaggtaggctatccaaaagtagagagcgaataaggtgggatgaagagctactaaatttgaagagtcatttacagagtctgttggagacgtttttcttcaacaataaccaaatatacctttagaaaataatttggctagtcttttggagatgctctcatcttttaatttatatatggagtccattcacacaatccataagaataaatctcttcggcaaggtttagagaggatttgggaaccttgagtttccatggctacgtactggccgtggagacacaaggggcatcaaaggtagattaaattcggatgccgcataaaaaaaatat

SEQ ID NO: 3988 - DNA, 7806 bp, Sorghum bicolor
atcaggccatatggtcctgggaataagaataccatatccatcgcaaaaggttatagcagtaatcatatgaagctccataattagtggtgttaatgatatcttagggggtgtttgagactacttcgctgtaatttttccagctttgtttcacgaacttcaccatggaggagctccatcgtgaagtttgtgaagcaggaggtactatttggcacgtagcactgctccaactccaggaataagttatttttatgtaaatggtccattatgcctccgatcaaaattgctcttgatattttttgatcagaatagaaattaaatgatgaaacattaagagaggccataataaaaatacaataattaatagggatgacgtgcaagtgaagagacaagaggcgacacacatagaaagaaatgaggtcgtggcatcgggagggaaagcgtttacgagaactaatccgtgattaataagtggcaaggtgggtaattacctcacaactccatatgagagtatcaaactcaaaaaaactagagtacctcttgaagtactttaggaaaaaacatggagttgacctctagctccactttttttgcggagcaaaattcgtggagctaaatatatttggcaatggagagttaaaaaaactaaagcaaagcagttccaaacagactcttttagggcaagtagatgtcgtctagtagacggtctcatatagtgccacattatgttaagacgactaatagagaccgcatactttaaattatcacgtagtaactcacaactttttcgtatatctaccataacaaatataaattgtacattagttatctcatagttttaaattttcaaaacaacttatttctcacattcctctctctccgtcttcacattcataaaaaattctccgtgatatactatataacgatctatgcgcaatgtcggtctgctaaagatttttccgaaaccagattaccaaaatattaggcacggcaaacttaggtatttttttagttccatctaaaatccaaaaacttttaaagatttatcgtcacatcaaatcttatagtacgtgtatgaaatatttaaataaaaaacaattaattatattgttatctataatttatgaaatgaatcttttaagcatacttaattcatatttaaacaataattattaattcatatttgaataataattatcaaatagaaattaaattgttggagtacccaaatcttaaaaaaattggatcgccttaggccgtgttttgtttttaaaggaaaaaatttcacgacaccatagtatttttgtttgtttgtggtaattattattcaatcatagagtaactagatttaggccttgtttagttccttcccgaaattttttcacgacactgtagcactttcgtttatttgtgataattattgcctaatcatagactaactaggtttaaaagattcgtctcgtaaatttcgaccaaactgtgcaattagtttttattttcgtttatatttaatactccatgtatgcgtctaaaaattcgatgtaacggggaatcttgaaaatttttggattttgtgtggaagtaaacaaggccttaaaagattcgtctcgtaaattttgactaaactgtgtaattagtttttttatttatatttaatatttcatgtatgcgtctaaagattcaatgtgatggagaattttgaaaaatttggattttgtgtggaaggctttaggtcttgtttagtttcgaaaactttttagtttttagtactgtagcacttttatttatatttgacaattattatccaatcatagattaactagactcaaaatatttatctcatgatttataaaaaaactatgtaaatagttttttatttttatttttatttaatactttatgtatatatcgtatgatttgatgtgacggagaattttgaatttttttttgtttttttggttgaactaaataaggcctgtgttccgtccgtctcctgggcctggccattctcaagtcacgcttgctcacagtcaagtccgctctatctctctcctctatccaagccagaaaccccccgaaaacatcccccggccatggcgaccgcagcccaggtcgccgccaccttcctctcgttcctctcctcctcctcctcctccactcaccaccccgccccctcctcctccgtctccctcgtgacgaaccctgtcctacctgtctcccttcgggccgctggcccacggctcgcctcccgcctccggggccgccgcgtcggcgccgccgtcgcccagctccccaccgcgtaagcagaaatgatgatactccaacctctcactgacgttaattagtcctgatcttgagctgttactttatttccttagtcttacatctcttggaagttagcatattgatatgctactactttgcttcgatttttttttctattattttactggataatttgatgatatccggaattattgtgtctttaggcatccggaagtagcttctggggagaagaagatcaggttaggtgactattctgtaggttcttgagggcgttagtgtctgtttgcgtctgacatgatgatcccccccagatggtcatcaagggcggtgcggtcttttgcgatggcggagctggaagcccggaagatgaggtaccctaccacaggcaccgaggggctgctcatgggcattcttgttgaaggtgaggcaagggatcttataagttacagaagtttgtttttttgctaaaaaaatagataaattatggagccatgtcataacttaagtgcactggactagctgtgaattgtgcgtgtctggaactcaaacaagtaaagatgatctatgagctacaaatcataaggtttgtagagcccaaacaaagtaaagatgatgggctacaaatcataagggtgtgaagattcagaatgtagctgcagtgatagttttaagcctagtgaacctgaatgcatcactaactacatatgattgttggaactggtttgtttttgaacatgcattttgtatatggtgttcatggctaaaattgtttctacaaaatggtaaagataaaaattgtgcagtacatctacatgcttcataaaaatacagtacagtgatcagtgactcgaatttagtgcataatacaaaaagtactatctctccctccagttccaaatgtaggtcatctattccttctccacttttctccaaatgttggtcatttcaaaacttctgtggatcttctacgcttttcttcctaacttgcccctacttaataaatgctatcactcacagatgaatgagccatccttttcttttccaatacataataaatgaagggccctaaggccatttgacatcattcattaatccttgtgcacaaatcttaaatgacctacatttggaatcagagggtagaaccatcatcgtcaagttgttattgtgtgatgaactaccttgtagactggatcatctgttggctggctgatctagttctctagtcttacagcatctatatatgagtagatcagtaacaactatagaagcttctaatgatgtagaaccacatgaagcaaaaaaatcatgatattgagatattctagcctcatagtgcgaaatccattatccatgtttggttcgagatgtagtaggcatttgatctttcaacctatcttgctgatgtagttaggagttcagacatgttctgttttgtggcaatccagtgctaaaaacaacgattacatgttgacaaggagccttttagatcttatttcagcagttctagctgacttgtcagattgttgacaatgtatcctttcttatccttagaactggcacctaagctaccacatgttttactgggcaagtaagcatcattctagtaactcgatgcaaactgtggggactatgctattaccttgatagtgccaactttgatctaacatttcttatttatttatttatttgccccattcgtgacacatgttgcattgcttgagccaccagtccattatttcaggaactagtggtgcagcaaaacttttgcgtgctaatggaaccacacttctcaaagtgcgtgacgaggcagcgaatgtgcttgggaaatcagaaatgttttactttagtcccatgcatccaccattgacagaagctgcacaacgagcccttgattgggctgtcaatgaaaaactgaaatcaggtaatttctgttcaacatatgaacttctgttgctgtatcactcaacatatgaattgcttctatgtggtgtcacctcctgattacacaatttgatttgcttatttgcttatagtattcaggtatgttaacatatgtgtgttggtgcccccctagaaattaagcaagaatgcattgttttgttaacccataagtcctttcatcacattgtgtagtctattttgcctccaaattccttagttcccaaaaagcatgctaccgtggacatactttagatggcccagaacccaagcagcatggccatgctgatgcccgccgcccacatgacaagggcagggatagaatactagaaaagggtagggactcttgatctatatcttcactaaccaaaacggaaaaaaatcccctgatgtgcatagatgagactgttttacttttaagaaacttctctcaaattaagcaaatagatgacaactccaaccaatctaatctaatctatgactgcactaacccacactgggcctgggcatgatactattcacatgaccagtatgtgccgatcctatgggatgtggtttggcgctgctccttcacatgggcccgccggctatgacacatgctctttggccctcttctttgcaggaggtgtctagtgcctcctatcttcacgctgttagaggcgacaatgaaaaaggatcctccgctcatggtctatgaatgcttttccaagcaccaatggtccctggtcaatgtgacttctggaattcttgctttcatataacatagattaatatgcattgctttgcaaaatgtaattctgtattagcatcagtggagattgaaattgtaactgcctgtatacctgctaaccagtaatcacattgtttgctatatcatttactggttaggcttgttccggtgacagggtgtcactttatttctttctatttgcttacaatttctctggagctatagtttccacactagatgtagttgagctgggttctaacttaaaacatttaaattgcattcaattcttctgagaacatgtttcaaaaacttgatttatactgaatctgggagtataatgatgcctctgagatggatttaactatgactcgtcttgttgaaacaaatttctggatatcatgagcccatctactcaaaggattttagtgcaaatgttggcataaaacagaaacaacaccaataaagatgtaacagactttttttttggcaaagtaaagaaatatgcccccaaacatcaaaccttactatgtttgcagtggttgtactaaatcatttgtgatttaacctgaatggaagaaggaagattaacccacaccattgtttcaatagttcaataaagctgttatcaagtcttgttcagcggatatagttgtggccagaggattaaaactgatggtgctccgtgttttgtatgcaacccatattgagctcagcttttgttgccttttcagttcagcataccgccatatgaatatgatgatatattccaagatgagtgtcacacttaacttacaacaggaccattgtttcttccatgtattgtattttgatgaggggatttggttgggatttatttcattttgtgtgggccatatttattccatgtattgcatatgaatgaggggaaacagcccatagaagcgctattgggttgatgcaggcatgcaaaactgaagtcttgtctctctgcctaatactgttctgatggatcatgatttatgaatgcttaagcttgaaggtgcaatagaccatgaattgaagatgatacatgatccagtctgacatgagatttgaaggcttggaggttgtttgtgcttttggtgcttagagcacatttctgtcctgatgccatttttgttctctcatctctctgtgaacaggaccttgaacttaggtcatgcactcttgttattgaacggttgggtaggcatcaactacagtactagttttaaattattattaagaagccgtgcacgaaatggactatctcaaggtcgtactatagctatagtgtggcctaggctctagaatcattgagtaggtgcgttgttaattttgggcctagagactagtctataagattagaggcctggtgaattttcgggactaaagacccatggcccccacttgattagaccaagagttccagtggttgataattttttttgaacaaatagtggtttataaattttgaatggagattctcctgaaggttagtgcaattcgagggcacacagagttttatggttcttcatgttctactttggctctttttttctttttcttttttgagcttactttcagttgcctttatgttgttgatcccctatatgttgggtgcctgatctgcatgtctggagcatagttggttttgatttctgctatatttattttttgttccatgtggtttaacttttaatctaattttggtgctttttttcttgaactgaactgtgtgtttaggtgaggatggagaagtaactgccaatcatttgctactggggatatggtcagataaagagtcagctggtcataaaatcctggaatcacttggatttgacgatgagaaagccagtttactggccaaaacggtaacattattatattttccatttaaaggtgaatactgcacaatggatcatttcgtggattctcaaatatctatttatgcacggcaggctaatgaagaggctgcaatgagtcctagatagcaaagagagcacccaatttattcttcggcttaagttggtgttgtgcactagctgtatgcacttcttggcgcctcaagacgttgacctgaagacgctgcttgcttctacaaaatttaggacttatccagatgtgttaggtcaaatacaatatttgtactctcacgattgccgatggctgttaaaacattgcgatttgtttgtcacggtgaatgcttctcagcttctgttccttgctcgtagggaaaaaaaagtttgtagggtccagtgggcttgacgagtccttcaattttttttttttttgttcattttgctgcctgaatcctgacaagcaagaatttcacctgaagtcaccgatattgttctgtatccgcagattttgaatgaagctattgggacacattcattggatgcaaatggcataccaaagtaagtctttttaaaagaattattgtgtgccatttgtcagggaaaagcgtatattagcagtactttctttatcagtgtccaggcaggggaacctgcacgcactttacaccaaatctgcacgaggttggtacttgcactatgctttgattccaagaacatccacctcgatatcttttacattgtttattgttattcattcaccccttgtgcatcagaattctgcttgtttgcccgggcactaataagctgactgatggagactatcagaagttacgcattgcgtgcgttcttggacggagaggcgtcatgctctgacacgaagcatgcacagactgaaagccgacgccatgccggtggcctggcgcagtcctgcgcttaggtttcagctccggagtccccatcaggcatcaagttcatctgccaccgaaagaacatccc

SEQ ID NO: 3989 - DNA, 3698 bp, Sorghum bicolor
gcttggcaccctggacgacaccggcgtcttccgtatcccactcgccgccgaactcctgcgcgacgacgggagcatggaccgtgactgcttcgcgcagctccacagctcgctcggcacgccgtgcgtcggtcaggcgccgcccaggatcgcgcccaccaccagccaatcagacggcggcagcgccaccagcgacacgacctacctcgcggccgcggccgacacggtgttagcccccgtcgcgtgcgcctgcggcaagaagaagaagcactacatgttcggcccgccgccgccgccgccgaggccgacgccgacgccaaccccgaaccccccgacgacgccgacgtacgggcccccgacgccgacacccacgcccgtgccgccggagcccaggcctccggcgcccgaggagcccgagccgttcttcaagaagaagcccaagatgaagttcatgcacaagaagaagccgtgcccgccgctcgtcgacgacgacgacaccacccggcctgctgcggcagacgggcaggggcaggagaagatccccaagaaattgaactagggtggtgtgtgcgggcatgcaagcaggacagcagcaaattaagcgatcagatgttggagggtcgtcggtgatgttcgtttcgtttcggtgatgttgttgttgttgtggtgtcagtgattgttttgttcagttcatgccgtcgtgtgtccgcggtggcattggtgtttcagactttcagtccgttgcttgatttgagaaataaacgtagtgatttctaaagcaaaatttctccctttgagcatatcagtggtgtctgattttcagactatgtttcactacttctatcggggaaaatatgaagatagcaacgaaggatctgcattcaattggaaaaactccgcgccactgagggtccaaatgtttatgtggccgctgactcaaggccggatacaatgccgaaccaatctgcagcgaaagaacatcgtgccaatgtcactgtgtgaagtgtgtgagtaagctgatgaaaccccggagcacatcatcaatggctgccctattgccatgcaattctgggcgaagatcggcgttaccaatgctccggacttcacagtaacggagctgtacatgaccaaccggccgagtaacataccacagcaggagtttggggcgtgggcgttcatagcactatcgtgctagcagctctggaaaacgaggaatgcgcttgttttcagaaatgagcgaacatccacccaacagctgttgctttgcctgtaggagagaagcggagcaatggagagccagacactgccgagaaggaacaagtgtgtagcggatcaatggtcggtgcacggtgttccgtgacgcgttaggacgctaagctagctcaggagtgacctgtaaattccatttctctcaaaatgtaaacatcttgtagacattgccacgggccgcgaaggccaaataaaattcaatgtagggaaaactcccaccagtgacagcaaaacaaaaaatggagatagttgttgagtactgccgtgcggtgttaattcggccattcgggccttcggctactgaacgagctccaactctgaaattaacttttcattaatcaccattacctctccttgagtcgacagcgcacggttagttgaacactatatgcaccggatccagatcgtccgaacgcgtgcagaggccggtaaaatgggtacgacgatctccaccacccgtcatgcggtcctgcctgcgcgtggacaattaaccgcgagtacgagaatagctggaggagtagacttgaaggaaacgctgatcacattgcaaggggccatactattaactggagatctagctacaatggcggcgccaaattagctgcccatagttgccagcttcactagtttcacttagcttccgccgatcgatcgagctagctgcgtcatcagaccttggcacctatttatagacacctgcgttccactccttgctccccacccatccacatcttctccttcctcaacaactccgaacaagtggtagagagatggagatacaagcacgacagctactggtggccattttgggcattgtgatagcgatagctttcgccgatgccgtgcaaggagcgacagcaacgccggttgttgtcggcctggccaagtgctcggactgcgccaggaggaacatgaacgctgaggcagctttcaaaggtagtttacacaaacccaaaccacctgtcactctgtcagtgtcatgatatagtggtgttactaaaaacagtttggctggctagtcaatgcatgatttgtctgtcgtttactttccccaggtcttcaggtggctgtcaagtgcaagaacagcaagggcgagtacgagagcacggcggtgggacaggtggacaagtccggcgccttcagcgtcccgctggccgccgatgccgttggtgaggacggggagctcaagtcggaatgcttcgcgcagctccacagcgcgtcgagtgcgccgtgccccgggcaggagccctccaagatcgtcgcggcgccaccgggcggccacgacggcaacgagaagacgttcgttgcgctcggcggcaaggtccaccgctcgtcgcccgagtgcgcttcggctttcctttgccaccatttcttccacagcattatgcaccatcatcacgtaggaacccacacgcctgtggttctccctcacgcgcctgatcacggccacggcggccattccctgccgcctgtcaccaagccgccggcggtagacgtgcctgagcacaaaccggcgccggtgaccgtgccggagcacaagcctccgtcgacgccggtggacactccgtcaacgcccaccgccccgtcgacgacgccagtgtattcgccgccgacgccaactcccatctaccacccgccggcgcagcgggacgctgtcactggcccgtagctcttcaagaagctgctgccgttcctcaagatgttgttgcctttctttcctcctgatgcgatggagactcagcactatgagtgtttggtcagtgttttcttggcttttgcaggttatgcagtttcttcagaataaggtgtgtgtgtgtgtgtgtgtgtgtgtgtgtgtgtgtgtgttctatctattggggatagttgaatcttatgcgatttcctgtgaaccgtttttatttagtaaagctctgcaacaagttgggaatacgtattaaaatatgattgcaatcaacagtagcatgttttttttttactattgaacctcgcatactaacccgattacccgaaagtttaaaatgggtaaaggtgggctatgtacaacacttaaatatcttagcgataaaaatgatccggttttagagttgatctcaaatgatcaaatggagttcactattgcatagcactctggatgtgagagttatgagaaccggaagattctgccccgaacgactgctgcaaaagtctgtcattgtagaaaaatggtgttccatggaacggtatgaatgtccaaacttcaaagtgttgttatccagaggagagtgtaagggcggtctcaatgcgagtttgtcaatggaaatttataagagctttattgcattaaataagaaacatggtaaatatgacaattcattaatgtgctccattactataacactacgttgattgctctttgaccttaaaacaaacttcaacttatataccttttatgt

SEQ ID NO: 3990 - DNA, 2881 bp, Sorghum bicolor
tgccagatgggtttctgttctagaatgtattatatttgaggacaaatcttaaaggctagaatgctctatattacaggacggagggagtgtgttatgaatgagattataatagattgtggattataataatctaaattgttcgaatccctaaattataatgggtggattagttattagtacaaataaccatatagtgtcattgcaaacgttgaggggtaatttgatccttttaccacccatcatttccaattagcaagtctcaagtggattacatgattattacaatccggttcttgaattataaaagtcaactacatactaaaaaatctcttatatttggatcactattagtttattttagctgattatggtaatctaactgtgatccaaataaggcctaaaagtgttcttttagacagaaggaggtcatggtaccgttgtactattatttaatttttttgtgattactaccactaattaactgtacatggttctcagtaatactagtagtacttagggcacctctgatcataactatcagattcccactgttggagatgattatgtgaacaccctataatactagggaacaggaaacaataggaagaacttacaatatgaaaggtttatgatacactattattagaggaaaaaatgtagattttttagtgagaaggggataaatatgttttagaactatcaataaacttcttgctacatttctccataacgtgcatgtaatctacaccttatttagttatacccaaaatccaaaaacttttcaagattctctatcacatcgaatcttgcgacacatgcacggagtattaaatatagataaaaaataattaattgcacagttaatctgtaatttgtaagatgaattttttgagccttgttagtttatatttggataatatttgtcaaatataaacacagtaaacaaacattttaccgagagaactaaacaaggccctagtatttaactatatacgcaacatgctatgttctatgtgcatcttttcttttgcggacgtacaagtaactatatataattgatgttcgcaaaatgaaaagaaagtactccaattgatgataccgtcataaaaaaaactgtcacagagtcgccatcaacttatgccctgtttagtttttttaaaaaaaaatttcatccatcccatcgaatctttggacacatgcatagaacattaaatatagataaaaaaataaactaattacacagtttggttgaaaatcgcgagacgaatcttttaagcctagttagtccatgattagccttaagtgctacagtaacccacatatgctaatgagagattaattatgcttaatagatttgtcttgcagtttcctgacgaactatgtaatttgtttttttattagtttctaaaaacaccttccgacgtccttccgacatattcgatgtgacacctaaaattttttcatcaacgatctaaacgggcccttagatcgaatgaaactaggactccattcatagatgactatcctgcacctgtcccagcgcgcgcattgaattcgtgattcgattggcagcacgccatacaattcagaaagtacagtaacacacactttttttccccatttgaccttgagagaaacagtttactatctttcgcacaggccactacactccccccgtttgaaatcgtgtaaaagccacgtgccatcctcatcgatcccaacgaagcatttcccttttactttggcagagagcactctcgacttcttctttttacaatatggggctattttcgtcctttttgcgcccttttgcgatgtgtacggacccatcgtagcatggacccatcggcgatggcgccctgtcctgcctctccaattgctccctttccaccccttgcctctccaacctccaccaaggaattctttgcccaatgcgctcatcgtccccgtcaccacctctccccacgcaccatcgccgatcctattgcccacatacctcgcgtcatctccgctccgcctccttctcgccggcttcctgtgtgtcatcctgtcgctgtcaccgtctcgttgtttgctaccaccactgccgcaccggctggctggctgcgctgaaacagcagccgcgctacgctgaccggcgagggcggccggcaagactggccgttcgtccggtcctccccctccggcctccgcgcaacggcgcaagggacgcgacggggccggcctcggcctcggcctcggcctcgtgctttttgtgcgtggttggagtggttgagccgatggcgacgagcgatcccgggcggcgggcgtggcgccatgacggcaaccattttaatacgcgcgcccagcagctgaaacctgacaagctaaccagattttaggtggttacccgtgtcgcctcccacccctccctcgcccttcgccgcgacgcctccttttccgcccagcgcccaggtccggtccggtccggcccggccccaggatatagttcccgctctcgtcgcttgcgcttgtttcttcctcctcgtctcaggcctcccccgccgcgcgcccgcgcctttcggttcgggttcagcgaattcagccacaaagcgagtgggtggccggagaggccctgtacgttacccggccggcagcgagttcctggtaacggaactcgctcgcgcgctcgctttccagtttcctgtccaggcgacgaccgccgccccggcagttttctattccagcgtcgcggttccgggtcagacattggttgcaggctccaagccagttgcccggcgccggatcgtcttgtgacagcagcaagtccacggcggcggttagtggttgagcaaaccagtggcctgccttggctacttaccagcttgcttcgccatggaca

SEQ ID NO: 3991 - DNA, 12957 bp, Sorghum bicolor
ttcttctataaccacatctccaaaacgcccaccatgtatatgtttgtaatctaataagtatcgacgatctgtgacttggtttcttatgatagaacctatacctactatccaggttcaagttctcgacttagcacatttatttacaaattttggatttaacgatgttatgcttgtagtggtaggcgatatccccaacgacagcgaggcgcttgtggcggctttgggcgtgtttggaactgcacgtgggtggtcatgccaggtagccaggccaaaaccagtcagaggcaggccaaaagggtgcgagccgacatgtttggttcacaacactaaattcagggtggcccaattgagattttgtttgtttcacaacatgcagctcggcccaaggccaactgccatcagctgccacaaaagatgcgcccccaaatctctatggaggagcgcaagcgagccaagctccacaaaaacggtggggggaggtcgtttcgtccctggggacaggcctaagggtgcttttgagcaccgtgctgcctaggctgggaagcggcctatggacatcaaacgtcgggagcacggggcaccccctaggtctcgtagcaaacatgcccttcatgaattcgagatctgtcgattcaatccttcaaaggtgctcatagggatagtccttcaaaagtgttcatagaggtaggatttatgaatatgtgttcgtatagataagtgtgcgtgcgtgttgtgagcgtctacattgtagtgtgtactttaaaaaaaacacagacaaactttaataaggatgtagcatgccatcttgttaccttatttctttatttaatattggctaatgcgtcttgaaatttcatattatttgatatactcataagacatatagtttcttttcttacaaacaagatctatgtttacaccgcactgttgatattattaacaaattcacattggctgcaaggtagatgacatgtcaaaattcacattactgcaaatagattataaaaggtgataacaataaaaaaaatggcaaaaatccacttggtgacttacgagctagggttttcaaataccgacaaacaatcactatttaacacttataagttgtgtgttttaaaatggccctttggtaatttgaccaaccgctcattgttgccttgtagttctaagggtgatttaccttatttgaataagctttccgaagagtttgcttatcatgtttaacatgtagtctaacttccttgagtttagatgccatggtcctctatatttatcctactcaatagtgtggaacatataatatctttatggcatgcatgataaattagatgagaccgaatgctatataatacggagtattcatattcgatcaatgagtatacgaaggatttaaaatggcataaggcttatcggtgttagacctcctttggacaaggtttattgctagaagtaataataaattatagcacacatataactgtgaagataaacgtgaaattcatatcaaccacattctcatattaagagatagaactaaaagaattattaatttataaaagaaatccacccacaaattgagtttttgaactcttaaaatctagactcttttctataagaaacaaggtcttagactttaaggaaacatatgttgttgggtatttgaaaacccttatggctttatcagtttttaaaatttttatatatatatggattggctttgcaacatgattgagtcttttgtgatgaatatcatatagttttatatgatagaagtgtttaatgtctagagctaataggactagagaaataaatatctctataaatcttcaagttggtcgtaataaaagcttttccttaaaataaggtctcaaagtagggcgctatttgctgtccgattgtaggaaaataaaggaaaaataggaaaaccatgctctgtctctgcctccggtgtctgttcgatccggcgttgtgattggggggagtagggagtgcttacaccatttcctctccattcacatcagctctcgacgcctgcgcccccaattcccaaattctgcgccgcctccgccccaaccctgctcgtcgactcctctctgccgaacacgccggaggaatccttctccgagactcgtcttcctcctctctgccgggctggcgtggagtggagatccatcaccacgtagattggtctcttcttctgctggtaagtaatcctagctttgcttggacgcagtggcggatctaggatagggacaagcgggggctaaataaggcactgccggccgcaggccgcctggcgctggcacggaggcgccagaggccggagggggagcgcggaggcggaacggccagccgcggacgctggacgacggacgcgggggccggaggtcgcgagctcgggtcgggggcgcgcctgcgcagtcgctcgtggagggcgcggacgcacggaatctcgtcgcgagtgcccgctttgccatcgcgagtgcccaaagttcttaggatccctaagctccagcccctgcccagcccaaggtggctttaattatgtctgagaaatgagaactttactaaacttacaattttcctgtttccaaatagatggtaacatagagtgcctataatcaaacattttaaaccagttgtcagtacgcacaatggactgaagtatttagatcatgtcagtttagccaacatactgctaaggaagatattggtccaggttgcgttccattggaatccatgcttataatataaattgtacttatttacaaaaataacaatacttttaaagtaaacaaatgcctccacctcctgcctggaaccgaggcaggttatgagctaagggctcctatgctcctgccaagaagaaatgcctccagtcttgttggcatactgatatatatagctgatagacgaataagtaactcaaatatatatctacttgctgtcggtttaagcaggggttcgggtttttctctctctgaggcttcttaatcataataacgccttgggggaggctgttccccagggttgaggtttgtctctttaagccatgaggtattatttcttgtcatctcatgagagatgtcatgcattcactccttatggaactctttttgtccaagacaggccttccttattcatgtactgtggtatgtgcatggcacctgtctggtcactaaacagatcaaccttgtcttgcagagttgaattgttctttcagatagtcattgtggatcctataacattatgagatgaatatgtattattttatatgctttaaaaacaatttattataaatataagataaaaaatttgttgctgcacccttattagacaagaaagacatctcatgcagaagaacttgcaactccgcagttgatttccatacatgaatatgaatatctagaattagcatttataagtgaaagggaaaaggtgtgacttttagaagaagacaaattatatgcattggctagaatggataaaatcaaattggaatcaagataactttgaattttaaggcaatgtacaactaggatcgtgatacctctctgctcagaacttgacagggctctgtagagtcatagggttctgagatttgacctgagatttaaataccttgtatgcaagcaccataaatgttccccttgccctggttggatcatgcgtacagtattttgttttccttttgggctatagaataatagaagtcagcagcaaaagcatcattgggtgtgctaatgataaacactatattataaacatagcttgcttggtgtgctagatatgtaaattgttggctagaataacctttgactgtacctgtatttccatgccatgtattggaaatttgaaatgaagtaggagtctggttaatattttaccaaaatgtctgattacttatgctcttaaagttcaatatggtgatggtcgtgatatacccccgcattccagacttatgcttttaaagttcaaatgcatcagacttagacattcatgttggttccttgtgtaacaccctgtcagtatacaagctaacgatcacataacaataaaagtgatatgcttattatgctgctatataattggatccttgtggtccatatatgcatatgtttcatgaacccagacccccccccccccccccgggcccccgctgtaagggaattgcacaaaaccaatggtttctgatcggcttatcgtttctaaacggtctggcaccgatcaggacgatcgggacgattaatcgatgatcaagacgattaatcgactcctgaatcctgatcgatctaattgtccatatcgtccagcatatagcaggaccatataagtatatatcatatatgtatggtatatataccatatactatatatttatgtagtacatgtcaagcatcaagactatatttctagttagttggctacttacctgtgagatcttctggtgtcatgcgaagcatggcactaactgacttggtattggtgttcttttgagttgctgctttagtatgacccgcaaccacaaagggagtgatgacagcttgagctattttcttctttgcttgtgattgtgcttgcttcagtcttgtcccagaacttggtacttttgctggttcaacttcagtaacttcatcctcttcatttccttcttgttcttgttcaccatctccagaaagtgccacaattgtattccttgtattcttcttcaagtaaacaatcatctctcactggactattagaggtggttttgggcacttcactgcatccccataacccccagcaaggtgcatcttgaaccgacctattcctgcaggcactaccttcttgcagttgcagcagaagggccaagggggaggaagaagcaagctgcagggaagagggaggaggaagcagcaagcaacagcaagcagcatcgggctgcttggattggagctggaagggggaggaagaagcaggcagcagggaagagggaggaggaagcagcaagcaagcagcacgagcaggagcagcagctcagtagctgacgactggagtgggagtgaggactgagaagagagtgggggtgaagttataagggaaaccctaatgggcctgacccaatcaaatatagcccaggccaaaagcagcccatcttctagttcaactctgatcggtcaggaggcctgatcagacgattaatcggacgatcaggtttctgatcgttctaatcgaatcggaggccctaatcgagtgctacaaaccgataaggacgattaatcgcgattaatcggacgatcagaaaacactgcacagaacaatacaaattcatttccttcatttttcgagcaaaagccattaatacattgtacgctcttcctttccttttttttgctctagatagctagtaataataaataagtaaatcgtgcgtcgttcaagactgcttgcagactccactggttcctttaccaagcaaatagaacaccacccccctcctttgtgggtgggtaactgaatatgttctttgtttctcttgatagtttcactttgtttcttggccactgggaactttgatgtacttctgaatccctatgtttcagtgatgatgtaaagtcatcttcctcctagagtagttgtttcgacatgtttgcctgccaaataatgtttcttacactataaactatagttgatttattttaagttctcaaaaaaatacaactggagatgaaattatcgtgaaaaggaacgtgagacctttacggatttgtttttcttgctacaactagatggagttttaatttctttacccagtgccttgcatggctgcacacccgtgacacaaaacatggatacacccatagcaattaagcatgatggtatcttgacggagcaaacaaagcttttcctttcaatgttggaacacatatggagggtaaatcaaaatgattgttattgttttctcgactttcctctagttcaatacattgaaagaaaaggtcccttgtttccatttcccagatgttagcttccaaaaatttagcgtctaaatatacttgcagaatagctagcaacaagcaaatgagcaaatgagcaaatgaacaatggtgtgcgggatggtttcaacaccttggtcgttttaggggcatggaccctgtggaaagcaaggaatgacatggtattcaatgggatcatccctagagtggacagaatatttattctggtgcatgaagaatctgaactctggatactggctggtgcgaaaggtcttggcgccttggtcgcttctaggccccccatcctatagttgggagttggtttagcaggccgtaacttacatgtctttggcgcaaatgtaaaaatgtaaaagtatagcccggtgaccacgggcaagtgatgtaggcgtgtgtgggtatgcgttgtacgctgtgtatgactattttgtcctaactctccttctcttaatgcaatgatatgcaatcctcctgcatattcgagaaaaaaagctaccggtgtatttgtcaagtcacatttgatggaattaggtgaactattaatcataaaaaaggctaccataggtctttcccttttgcccattatatctggttatctgtctcctaaaccattattgtgttcttaatggttgagtacacgcttctcttataaaggtttgaaaatttaggatctatcattttgttatggttagacactgaatctgtcattcactttttcccgcaggttaggcactgaatctgcccttcaatgccttcacaggctctatccctgaagaagttgcagtttaagaagctattgccacgtttttgttgaaggaacaattttttgggtcatccagattggacacggaacatggtgagtgtttgatccttcatattctcagtgtcatgtgttctccagtttgtgattcatcactatttttcaatcattactcaaagaaattgcaaatttgagaaccttggggagttggggttctaattaactgaatctttttgatggagtttgtttttgttgcttatgttcatcgaccttaagatgttgcattttgcttcaaagtgaaagctctgtccttttgggacaagagaataaaggcaaaaggaacataaggatagaggagagaaataaacaatgggaaagggagatgtggctactaggtccaaatctcaaaaatcgtcagcaatacaggtttgtatggttaatctgggaactataagagtaactattggcaccctcttaccttatctttcttatttcagaatgagcagagtacacctactaacccccccacagcatatcctgattggtctcagttccaggtgtgtaaaatggaattgtgctgtattgcttttcttttattgatctagtagatttattcgtgtaactgttaatataaatctgtaggcatactataatgctcctgggacagctcccgtgaccccaccggctttttttcattcatctgtagctccaagccctcagggacacccatatatgtggggtccacaggtacattctctctgttcaaccattttgcaagaataagtctagtaggtagtgtaagtctgcaatcatgaggtttagtgagtagatgttaggatgaatctgtcttttaactgtagtacaaggtacgagattggcagattttttaacatgttgttcatagggtttgctagccatttatttattttaaggatactatcagctaccgcaaccactgtagctctggagataatcagtcatctaacatttgattatttattatttaattggtatagatgatgcctccttatgggacaccaccaccatatgcagcaatgtatgcacaaggcacaccatatcagcaggcaccgatgccaccggtaatgtacctcattttacttgagagcatgttcttatattgtgttaatgcttggttgatatagtaatgaactaaaatgtccttgtttttggttcagggttcacacccatacagcccttatcctatgcagtcaccaaatgggacagttcaaactccagtaagttaatggaccccttatatttgatctatttattgttgcggaatggatgcagtcatgcagaatttcatccattcctttctaaagctttccatcctaactgttctctgtcatttatacttaggaattcatttgttagagtcctgtttatgtcatctgtttcctcaaagcagataagatttttgtttttttattgggttatgttgttagacatctggtgctggcggtacagagacaaataaatcgaataaaaataagcggaagactcccctgaaaagatcaaaaggaagcttaggtagtctggatgttgttgcagtaaaaaacaacaagtcaccggcaaagcctcaagcttcttcctccaatgaaggttcttcacaaaggtaattttattactacctttttttttggtgatatactaacagataaattattgaatccactatctatgatacagtgagagtggaagcgggagttcttctgaaggaagcagtacaaattcaaaaagtgtatgtcattctgttatattgcttaacatttgacttcataatgctattagtacaaattccaaagcagtatgttactgtttcgctctcctccccattatggaaagcctagtttgtgggagtaatttctgctctaatcttgaaatcatctgcgcagcatctgcagtatgcagatcgagtgcatgagaggtgcaatttggtacagtttgctactggttctgtctgtgtacatggtattttaagaggatgctgagtaatgagtatctagttcatttttcaaaacaaattctaaagaactagccttgtattaagtttcattaattgcccaggtaccatatgttgcatgagatactttaccatttgcaaattaagtcttctgtttcatatttcttttctttggttatattatagtgacttacaaggtagatgtatctatgttatcctcacttccaacatggtttacctgctcatggacaaactagaaggatgcatcctaccctactgcattttgttcctttgtatgttggatatggtcatcatcatgctaattcatacttactggcataaacaaataatttgcttgcagagttcaagggcgaaggatggttctgagcaaggtcagggtaatggtaagacttgaagctttatatatagatataacttatgaccaactacttttagccccatgtgggaataggtactgagaaacaaatctgtatttttatttagcataaaacattagatacaatagttatgttccttcttttccaccagatgctaggagtaaaggtactcaaagctctgcagttgagcccacacaaccatcttctgggcctgttgtgcttaaccctatgatgccattttggcctgttccccctcctatggctggcccagcaactactctgaatatgggagtggattactggggtactcctgcttctgtacccatgcatggtaaagttattgcagcaccgacatcagctccttcatcaaattcacgtgatattgttctcagtgatccggctatacaggtctgtcactgtgcaggatttgattctccttgtctttattttgttctgatacctaccttgcatttcttagcgttattttcttattaacataggatgagagagaaatgaagagacaaaaacggaagcaatcaaatagggaatcagctcggcgctcaagattgcgcaagcaggtgtttaatgtctgcagtgtttttaataagaatcattggatgttataatttatcctataccttgtgaatagtttgcatttctgctaactgcttatttaggagtgaccatcttgttactgatgggagttatgggtgtggggtcaatttggtagcagcatcaaccagtcaagacacttatgctaactgctaagtcagtttagaattggtttaagataagatttgtaaggaagataaggtcaattggttagtttgttaagtgtgttagcatcttgtgttaggggctggatataaagcataggcacactaccaattgaaatcaagcaagaacaacaaaaaagaagctaccatagcctccagagcgaggttgagtggttgactagctggttcttcctgttatcccatctatacctagtcaatctgtatcatggttcatggatctagttgaaaacagtagggtaagttaagcgaggattggaggaggataacttttgccaacatgaaacattagtcagcttttacctattctcttgtatataaggtcataaagtctattggatcatgacattatgcagttgcagaattctgcgcaatatgaactcaacatatgtatatatataactctaaccacagtatactaggatctggttgtacctacttaaaatgactgcagtagatgatgagaataatcgctaaatatgcataaccatgtggaccatgcatgtcttcctgtgcatgttcctagagtcaagaataaagatggtgctactgtagtgatgagttatcgttcatggatgacaaccaacatttcaactagttgtattgcataaggctaaagaaaacaattgaggcacattgtgaaaacagctgcatatttgtttccaagctcatgcatatagctgatagcaaaacccacagattttatttatttatttatttcctagctgtgacacctataagggtagatgctgccacgtttgttcatatactttagtgtcctttgcttcatgcaagcctttgatgtattctatatttttatggcatactacaggctgaatgggaggaagtagccaatcgtgcagatttgctaaagcaggaaaatagttcgcttaaagaagaattgaaacaacttcaggagaagtgtgatagcttgacctcagaaaatacatctctacacgtaagcttcctcttttgtttttgacctcagaaaatacatctttacatgtaagagggattggagcagagagaaaggaaggtgagtgctagtcgatgggagctgctgctgctactgctagtggttgtcgattgaaggagaagctggttgcttggatttattgatcgagaaggaaaatagaggagcagtgcaatagcagtagcagcaggtttgagctgatgtccacgcagccaagctgcagcaccacagccaccaaccaactgccatggctggagctgggcatgagcggccatgccgcctccactttggactactacatcccggtgctgaacaagatcaagtggtccgtttggcgatgacacaggccaccttggcaggggtggcattcggcgatggctgcgcacaatggctagcgctcgtcatgggggcagtgctcaaggaggtgaggttgacgctcgaaggggatgaggtcagcgctcagttggggcggtgctcgggcatgtgcagcgctctgagagaaagatggggaatggctggagataagggatgagcaggtgggcccaatctgagtcagcaatttagcatgctgactgtccagctccagcgtggcggtcaaaaccagtgaaaccagcattaaaggggcgcggtggccaaatatgtctggtttacccaaatgaatggctaaagatttctggttttcgagttcagtgaccgaaaccaaactctgcgatttaaaatggcagaaaatggacgtctccctttttttaatgccagtagttgggagctgtatgcacacctttttggaattttagatttgatattgcctcttgactttgagaaacttatgtggggcattcctaattcttgcaggagaagcttaaagtgcttgaggatgagaaatcaaatggaaattggtgcaaggattaaaggctgaaacttctctctttctgactgctgatgtaaggaacaatttacttgagagctaccattaggtttacagaataccaactctgattgctgctgtaatgttctcgatttttcagataatttggtggtaacctgataggacgacaactaaggaggtattcatgtacggtattagatttttgttcgaggggtaaaattgtatcataggaattgacatggttgatggctacgattcttcttccagttgcctcggctgctgtgctctgtgttgtttttcttcctctttgtgctagatcctacagaagtacaactatgtagaaaccccccaggtgttgtttgaagcgtggggattagcgaatggtatagctgttgtagagctgctcattgagcttcttgagagaaactgaagcgtgttaaagccatatttgatttatgattcagacggactaattttacggatagtactgtagtaatgaatacacggatttcactcaatcacattgactgtttgcatccttgtatgggggagtgggcgtggaaaattgtggaagctgagcagtgtgtgctgttgctcatatgttagtgggtagttaactcagcaaatctttgtgaaatatgacctgaaaactcttgttcgtcttaaatcgacaatttgaagggtgcacattaccttttatttatcttgtactcggatcacatgctccaccgatgaaaacatagtttgtttttttttccccaactgatgttcatgcgtcgctattagatcactttacctgatccttttttttgggcctcgccttttctcttctttttgttgttcgagtccaacaccactctttcccccgcatgtagccttcgaacaacgtttggtaatgaatctatctccctttttttttggccacttcatgaccaatctcgtgctttcgtcaagcacatgggtggttccatctcctttttcatcctctacccctggctggttggtacagctatagcatttgaatgtcgtgcgtgactcggcgaaataatcacagaacacatcatataccacgcagtgggagttgctcgtcatggagcattctgcgtggtctcagaaagaaacatcatcacagccggcatgtgtcgcagcagatttcctgaacatttgcc

SEQ ID NO: 3992 - DNA, 4817 bp, Sorghum bicolor
taatctgaatttttttgcaaaaatttttggaaccaaacaaggactaagacaatcgcaaaacgtaagatcgattgttgtagcttacaaaagatctcttcatatatttttccttattggaattatcataggcgtcgatgagtttatttggagataacagacataattttctagattggaataaattaaactaagaggagtgttatattaaaatgtgacctgttcgaggaccgagctctgactgcaggggaacactaagcggcgccagctctgcagagaccgggcggcgctgttcatcaaggagcaggccgcgcggtggaagcaaagggggaagtgcagagcgttgcgcgaggcggcacgacgtccggacgcgagggggacgccaacacgtgctacttccacgccagtgcctatgcgcgactccgacacaaccgcattaaggacttgtttagatcataaacattttggatgggttagaacacaaaccaaaaaggttttaaaatttttcgtcacatcaaatctttcggcacatgcatgaagcattaaatatagacgaaaataaaaattaattgcacagtttacatgtaaatcgcgagacaaatcttttgatcctagttagtccataaggacactcccaatgcaagactctatcacagagtacaagataattcattacatattatttatggtattttgctgatgtggcagcatatttactaaagaaagagatagaaaaaataagactccaagtcttatttagactccaagtccacattattcgaggtaataaataactttagactctataatagagtctgcattgtgagtgccctaattggacaatatttgccacaaacaaacgaaagtgctacagtagcgaaatccaaaatcttttcgtatctaaacaaggcctcacaatacaagactctatcacagaatccaagacaattaattacatattatttatggtatttttctgatgtggcatcatatttattggagaaagaggtacaaaaaaaataagactccaagtcttatttaaactctaagttcacattgttcaaggtaataaataactttagactctatgataaagtatgcactgtgagtgcccttataacacttttgtttatatttgataattattgtccaataatggattaactagacttaaaagattcgtctcacatttatagacaaattgtgtaattagttattttttattctatatttaatactcatgcatgtaccgtaaaattcgatgtgacgaaaatcttaaaaataaacaaggccttgctaaaattttatgaccacaagcatgatgaaaagagagttttcctttaagaggaaaggaatgataaaatgatcgagcttattgtctcaaaggttaagatcattcatcttaatccaaatgtggccgacagcatccctttaggcactgaggctaaaaatggaaaaattaccaaggagggcaacggctctcgtcctggaaatatggcatggtcgcatggcggtgcggtggaggttgggcaatgtgacgctttgagcctacttccctttcctctgtctccgtggttcggtttcaaccccttcgcttcttccgcagaagaacacgagaataggaaggtacgacatgagcgcgtgaattattcacattctgatgcctttttacaccggcttcgttcctttcgcctctaatctcggctccggcggcacttgcattgcaggggttcatcacgccgacgggaggaggaggtgcgccattccaatccaaccctggcccaccctctagagggtggggacgtggggtggatcatcctcctcgctaggagagaactccatccccgttaaggcgttaaacattaatcatggccactccagctgatggcgacgatgtgtcgccatctcctttcaactcgtcgccggagccctccgactcggacccaggcttgggctcgccaccgccatcactcacaccgtcggtgtcaccgccaccggcgccgatggagaatagcagcgcgttgtcacccccggcacctgcggccagaggctcgccgccggtagcgccgtcaagggactccccgccgtcacaaccggcttcgaagcacagcggtggtgactccaacaagagtggcggccgcagcaagagcggaagtagtagcaacgaggcaacacaggtaggtgtcatcgtggtcggcgtggtgatcggtgccctagccttcggcctgctgatgtgcatcgccgcatgcgtgtgctgcctcaagaaaaaaaagaggaagaagcccccgcacatgaacatgccatactacaccgacgagcacggtacacgctgcgctgatcgacgacatgcaaatggccggcgacagtgcggagtaacaacactgacagggcgcgcgtacgtgcagggaacgtcttctacgcgaacagcatgcccaagtggcagaacagcgcgatggaccacggctggcacgcgccctactcgccggcgagcggggacatgagcggctctcacgggcctgccgggcaggtgccggcgccgtcgccgggcatgccgtcgctggggttctccaagagctccttctcgtacgaggagctggcggcggcgacgggcggcttctcgtcggcgaacgtgctggggcagggcgggttcgggtacgtgtacaggggcgtgctcgcgggcagcggcaaggaagtggccgtgaagcagctcaaggccgggagcgggcagggcgagcgcgagttccaggccgaggtggagatcatcagccgagtccaccaccgccacctcgtcacccttgtcgggtactgcatcgccggctcctcccagcgcctgcttgtctacgagttcgtgcccaacaataccctcgagtaccacctccacggtcagtacgcggcgcgtggcgctcttgagtggcattatattctggttactggttgtgatggatgcgtacgtacgtggtgggtgcagggaagggcgtgccggtgatggagtggccgaggaggctcgccatcgccctcggctccgccaagggcctggcttacctgcacgaagattgtaagctccaaattgattagctccttctgtttatttgacgattttttttttctgagaggtatatcccatgttcatctttgacgggttccttttcttgctaacgatatgcatggtgaattaaggccaccccaggatcatccaccgtgatatcaaggcggccaacatccttttggacgaaaatttcgaggctaaggtacgcgtttgactaaacaaacaaaaaaaaaatcgaccggatcaccggagtgaatttgtaactcgttcgccctgatacatctcaggtcgcggatttcggacttgccaagctgaccacagacaccaacacgcacgtctccacgcgcgtcatgggaactttcgggtaagctccatgccgccgcgcgcggcagcggcaaagcgtgcagtcggtgacacgaaggatgcaggggaaaaagaaaacaataggtgcctggatgaccgtttgtctgtgtatatgtgtgcaggtatttggccccggagtacgcgtcgagcggcaagctcaccgacaagtccgacgtgttctccttcggcgtcatgctcctggagctcatcaccggcaagagaccgattgatcccacgaactacatggaggacagcctggttgactgggtagtctagcctgcctccctctgtgtattgtgttacctttgcacctccattcgcgcatgcatgcaagcgttcgaacgctcgatactcacacgttcacgacggtggtgcgcaggcgaggcccctcttggcgcacgccttgtccggagaaggcaacttcgacgagctgctggacccgcggctggagaacaggatcaaccggcaggagctggagcggatgtgtgcctccgccgccgccgccgtccgccactcagccaagcggcggcccaagatgaaacaggccggtggatttcagcttcggcttcctaagttttgcgttcgagacccctagcctgcgaaatgatgcgaaaatattcgacattaccatgaatgaattgtttcgccctctgtccccgtttctgcagattgttcgtgctctggaaggggacgcgtcgctggacgacctgaacgagggggtgaagccagggcagagcatgatgttcagctctggctcggagaacgactccggcggcaactacgcgtccaacatcaacaggttcaggaaggtggccttcgagagcagcgagtacagcaacgagtacagcgggacaagcgaatacggcgctgattccgaggatggggcgtcccggcggcagcaacatcgctgatcgtttcgtggggagcctgagtcttcgtcaagatgcgtgtgtgatgatgtacaatataccaagggatcggtgtcgatcgtcggatactatcagagatacccaacgcttgtgacagctttagtacttgtaatgatcgtcatactgtcatgtaacgtatgtatctgtgcgtttccgtgtgggtaaagtggtgctgcttgcttcaacttttggcgaactttgctgctagttgtgatgagcaggccatctcgtcgaaagacgccgaggattaggaacttgtaccaatgttctcctggagtcggagtaactttctaactccattttactgctcccttgatttcaaattataagttgttctggctagaaaaattaagacgactttataatttggaggtagtaaacattcattcacactaccaaaatagcagaattctcctagtgttttctatagtaataaaatactatcactaatcaaagcattaaggaatcccactatgagatat

SEQ ID NO: 3993 - DNA, 5101 bp, Sorghum bicolor
accacaccaatatatggcggtttgtcaacttcaaatgactcttcattggttctagggctaagtaatctcacattacaacgagagggtgagttaaatcagaatatcgatccgagtaaacaacacgactggagttaactagcccagctacatccatgcaggtatcatatgtttgttggattattatatggccctagcagcactcactctacgcagaaagcccactctgtaatcaaaacggatttcaactaggacaaaataatggaattcaactaggacatatataacgaaagcatcttcagaagagaataattttagtttacataaagcaatttggctgtatgcaaggctatgggacttgccacgtaagtcagaattcagcatgcattgtggtgttctcatcgttgcactgtctgtgtggataatcacggaagaaagctgaatgaatccaagatgagctagcgatgatgttcttgggacgatttgggagaatgagaatctcaggtgaatgcgcgatgcatcaactcacactggaatccactagattccacgcctcgagaagactcgtataaatggcgagatagagagttacaatgattcatcagctgtagttgcctagttggttacaaatatgccacatacgtagcacaggtttaatttgtccaggcagtgtggaaaaggaacataatactatgcgtcaggtacaccatatcttggatctttcagtatttgtggatatggggaactaacgcgattatacgagtgtggttcgttgtggatgcttcattccgccgcctgattccagattccagatacttgtgggggaaaaaaaggggcaccacatgcatgaagcacaagccgaaagcggcaaaagctgttggtgcaacatccaccacatcgacaagaatactattgttgttgctccttcccgtgtcatgcagcactacctgctgatgtcaacctttttacttatttcgtttgtttattatgattatgatgatgatcgatcctgctgcaactggctatcaaacagtgaaacaggagacatatctagacagatctttgggccgttgggccgaaaatctagatataggcgctaaatccaatctatctcggagcaatcatatttgacattaaacgcacaagcgagcctgtagtaccttcacggcttcaccagttcaccaccatcacttcttcctaatccagcttcactttgggccaataaactttagcccaacaatggcccagatctactttctcgtgaacaaatagtactgtatctctgtgctaacatgtcctctggtctggaatgccgccacagcctcggttcctattactacggtgataataaacaataaattttctgtacgcgtaccgtcaaaatcgtcttgttggggaatcaaaaaaaaaatcgtcttgttggtttggtacggtcgaaggaggaagcaagtcatgacacgcgaccatcatcacgtcttttgcgtgcgacggcttgggatcccccgcacgcctccgtctttttcccaaaagacaacacgcgagctcggcacgtcagatccgttggggcgagcagcccacctggcatgccgagcgcacgcgtgggagacaccgcccgagccagacggcagcgggacggcgcgcaggaaaaccaccacgccagcacgcccaccggcaccaccaccgatcgaaacgaaacgaaacgaaaccaggccaggcccaggcgcccagcagccgagccgccaaaagcgatcgcgctcgcgcggcctggcctctccttcctcctaaatccgggtgagagagagaacgggtcggaggcgcggcggccccctcggcgagacccacgggccgacgcaaaccaacgaagcgagcgagcggcacggaccaccggcgctcgcgtcctcggctcctcgcgtgcgtgcgtgcgtgcgcaccccggcgaatattcgaccgagcaggaggccgcagacccggctcgctcgcctcgtccccgctctcgacgatcgatggccgcgacggcggcggagaggatggtgggggcggagtgggaggaggaggaggaggggaagcaggggatgaggaggaggaagcggtacgggctggtggagtaccgggcgctgccggcctacctgcgggacaacgagtacatccaccgccattaccgctgcgagtggccgctcccgcaggtgctgctctccgccttctccatccacaacgagacccttaacgtctggacgtacgtaaaccctccctctctctctgccctcaattgtcgtttggtccaattgattgatgttagctgcctcgggaggaacttgttacagattggaatgcttccaattgtttggcatacatgagatttctgggcgtttgtttcctgcttgcgcttaatgcttgcttataggtttcggagtttacattagattcattatggattggcgaaatatctagaactttgtagttttattcatttagctgcttttgtccccttcatgtttgtgatggctcaacaaagcttaaaatctcacggaaaaggactggaccgccaactaattaaagaagccatctttcggtggggtatgcatttttttgaaactagttggcgcattgctgaacgaccgggacggcagcccctgtcctttactgtaggtctaatttggaagaaaggggaggcaaacccagggatggaaaactccctatgaagaattagatggctaatttaaatggcatacacatggattgcttgctcccgggaaaagtctcagatctcgaggggattggagtttgttcctagcatgggcttgtgacacagtatctgtttaacaatgatgggaaagcgcagtactaaaatcagaggagtatgatttctgaaaattatgtatgacaacttgtgatatgttattttgtctaatagttgcatgatgcactagtttgtttcacaaatctcccatggttggacttgtatgtcatcaataaactgtttaggttggcattaagtctgccatagttcctctaaaacctatctttttttttggttacttactaaaggcttagtctatgtacattgcaggcatcttattggatttttcatctttctcgctctgaccatatacacagcaacacaagttccaaatgtagtagatattcagagcttgcaacatttgccggatgtgctgagaaaggctgatattcataagattcaggcggagcttgtgtcatgtcttccgtcgttacctcatctttcggatctacaaaagctgaaggatgagctgaagagctcttggaattctatggaggttcttccatctctgtcccgttggcatctcttggagttactcgcaagttgtttgccacacagatttacccatccaaatgaaacaagtttgtctgttcttgtaagtagtctacaacttgctgaattacttgattacattcttttacttttgctataagagcactactgccttgcattaaggtcagggtggttaacttacctgaagctgaccaagatttcacttctagaggtttatatctgtaacaatctgcaaaccagagattactggaaatgcagtagcattcaggctgttgccaatttatgagattaagacattagtgtcccagtgctatactactgtattttttctgcgatatatcaatagaaacttgcactgacttgtgctgttcaataaaagaaaagaacattagtttacgcattgttactcacccaagttagtgaaagtgtaactactagcattgtaggtttgttgtgatgaatttatttaagataatattgataaaaatatatttacctttcagtggaattctctagataaggctggtaatttggtcatctgttctggtcagattataagatgtattgcttttgaaagtggctcataccttgtgtgttcagaactggagacaacaacctttcttgttttcattttgcgcagcaaagcatgaaggaggatctagcaaacctgattgcgccgcaactgatcagaccaattgcgcggtggccattctatgccttcttgggaggagccatgttctgccttctcgccagcagtacttgccaccttctctcgtgccattctcgccgcctagcgtacattatgcttcggcttgattacgcaggcattgcagctctaatcgccacatccttctaccctccagtatactattctttcatgtgctaccccttcttttgcaacatgtacctcagtttcataaccatcctaggagtggcaactatcgcgttctctctacttccggtcttccagagccctgagttcagaaccatcagagcatgcctcttttttggcatgggcgcatccggtgtgatacccgttcttcataagctggtcctcttctggcatcaaccggaggcattgcacacgaccggatatgaagttctgatggggctcttctacgggctgggagcactggtatatgcgacccgggtacctgagcgctggatgcctgggaagtttgacatcgccgggcacagccaccagctgttccacgtcttggttgttgccggagcctacacacactaccacgcagggctggtgtacctcaagtggagagacgtgcaaggctgctgaaaggtgttgcatcgttgaggatgtggatagattgtagattccgtgaattcaggctgacgatcgtggtctttgtaaattgtaacagtaaacatgaacaattgctacaagtctacaaggtagtggggctttaatgaataataataataataatcaattgaagaccagtatttatgctatcattactaaatattcgaggtgactgatgggatggtctccatcctgctaattcatgtacagttactggccgggggctccttgtagctgtatgtggttcatctttacatcagtgtttttggttaatttgtcaggttggagagaacaggcaacatgtacaatttatatatgtgttttgtgtattgctatgaaccaagtggagtgggccagtggctaacagcggggctctaaatcgtacaaagaaaggatcatttagttggttcctgatgtcatcagcaaaaaatgttttatagttgcgaaaaaattgtcttcagtactgatacatg

SEQ ID NO: 3994 - DNA, 4396 bp, Sorghum bicolor
aagataagatgatgtagtagacacaaaaaagaagacgatgcactgtccaaaggataggaaaggcctagagagggggaggttaattggcttttaaaaacttaaaactcgattcaacggattagcataatgcggaggttttacaaattctcgcggaagttttagaaggataggtagtgaacatttgattcctcataagcttaccactttatgtctgtcttaatggtatgacttttcctatactcaaatttaaaatagaaattgaatgtaagcttttatttggccaaagtcagagaaatgatatcataatatagtaaataattcaagttgagtgatggacaagatgagcgtgctagggtgtgtagcttctgatggcagggattcagacttcagagtgtacaaagacactgcttggaacatacacgcatcaacatacacgcatcaatgaactaagttcttacttcaaattaaaccgattagaagatgttggaccaataagcacccacctagatagttgtcatattaaattgaacaaattagaagatgttggactaacatgcacccacttaattagttgttgtatggtgagtgcaatttactcttagttttttcgtttacatttaatgtttcatgcatgtgtcgaaagatttgataagataggtgaatagtttttgggtggggaattgaacaaggcctaaaccgagaagaggaaccaacgaagccatgatttgtagctccacctgctctgttctaccgtgtcactacagttaccaacagtgccggagcagataggcgtggctgctggcctgctgctagttttcctcaacactgggctgggggtgggccgatccaagccaacctttccaggtctcttggaccagttccctgaaaccatccacttttaacaagtggttttcgagttagaaaatgcagtcttccttgtgttggtctcttgccgattgagaatgatcgggcaatggtctaatgctccagtcaagactcaagaggcgttctgttagaggatgtcatgttatcaccttagagcacctccagtgtgtagaaaaagcgaaccgtgggcgaaccatcgacactccagtgtgcgaaccataattgtcagtcttcaaatcggttgctacagaccgtttggatcaaagggaataaaataagcggctgcgcatacatgcaagctatggacgcatgctagagatgagaagagaactacttttaggtttgtttattagactcatctatttagcactagagcggtcgaacttctatccaccgaatccaagtgtgtcagttcggttcgatctccacactggaggtgcccttattatccagatagcagatacctaagcatctccatctgcgtatgaacatcttgtcagttgccacacagatacctgaacatctccatctgcgtatgaacataggcattgggtgcatcatcaacacctcgttgcttagcaatatcttatgtgttatgatgttggttattggcgccatagtataatccccttcctctttctctcttgacaacgaacgccgtagcatcatgacagcagctctttgctccaatcagacagctgtgcagacccgttccgttgttccgtctgcaagcaacccctatgagagcgaccttcaaaagatgattgttgcattcttcgtcccggctgcaccctattaaacatgcggctacatttgtactaatccatatgaaatcatgcctgctagtataaagtaatacggcctactgcaggctgggatcaacgaatggcatctgcatcgcggagcgagacttcgaggaccgaatcaaagcacccgagccgcgacaaatggccaccgcgctattgacttgaacgatctcgtcctttggattgccggactacatgttagctacgctatgcagtttaatcaagctgtcatcgcctcactacttcacagcctcaattagccaaggagctcacagaaaagcagcccgtgacaccgacaccgagagcgaaatggaacctcgccatttctgctgcgctttgctgcttctcctcggcctccggcaagccggtgcccaggacaacacaaactacaccgtccccgcgcagttcgcctgtaacgtgtcgtcgtcgccgccgccgtgcgacacgtacgtggtgtaccggacgcagtccccggggtaccaggacctcggcagtatctcggacctcttcggcacgagccaggcccggatcgccagcgccaacggtctcagctccgaggacggcgtgctgcagccaggccagccgctgctcgtgcccgtcagcaagtgcggctgcacgggcggctggtccttcgccaacgtcacgtacccgatccggcaaggcgacaccttcttcaacctcgccagagtctcctacgagaacctcaccctgtaccaactcatccaaaatctgaacccgaggtcggtacccaccagtctacaggtcgggcaggaggtcacggtgccgctcttctgccggtgcccggctcccgctgagcggagcagcttcatcacctacgtgtggcaagcaggggacaccatgtcccaggtgagcaagctgatgaacaccaccgaggacgagatcgccgaggccaacaacgtcactagcagctctgcctccgcgtccctcgtggggcagccgatgctgatcccagttcaacagcggccgcggcttccgccgctgcactacgctgctagtgcaggcgacggcaagtcccggtggcgacgtcgggctgtcatcataggcgccagcgtctcggggtctgtcgtcgcgctcgccgccttgttcgtggcgatcctggcgctccgaaggtaccgaaagaagccgtcgatgcgcctgggttcacggttcgccgtgaacaccaagctcacttggtccaggaaccaattcggccatgacagcagtaattccttcgctcacatgatgaaactgaaaggaggcaagctgctaaccggcgtgtcggagttcatcgacaagcccatcatcttcttggaagaggagatcatggaggccacgatgaaccttgacgagcggtgcaagatcggcagcacgtactaccgggcgaagctcgacggggaggtgtttgcggtgaagccagcgaaaggcgacgtgtcggcggagttgaagatgatgcagatggtcaaccacgccaacttgatcaagctggccggcatatccatcggcactgacggggactacgcgttcctggtgtacgagttcgccgagaagggctcgctcgacaagtggctgtaccagaagccaccgtcggcgctgccgtcgtcgtcgtgctgcaccgtggcaactctctcgtggggccagaggctgagcatcgcgctggacgtcgccaacggcctactctacatgcacgagcacacgcagccgagcatggtgcacggcgacatccgcgcgcggaacatcctcctgacggcggaattcaggaccaagatatcaggcttctccctggccaagccagccacggccgacgccgccgcgacgagctccgacgtgttcgccttcgggctgctcctcctggagctcctgtccggcaggagggcgatggaggcgcgcgtcggctcggagatcggcatgctgtggagggagatccgtggcgtgcttgacgccggcgacaagagggaggcgaagctgggcaagtggatggaccccgctctgggaagcgagtaccacatggacgcggctcttagcctggccggcatggcgagggcctgcactgaggacgacgcggcgaggcggccgaacatgaccgaggttgtgttcagcctctccgtgctggtgcagccattgacagtggccgacggattcgagaagatgtggcaacccagttcggacgacaacattcggatggccagctcggtgtcagctcgataaaatgaaaacaaaactttttgtgcaaatttgaaatccagggtctactatttgtcgtcttcagtttgggaaactcacaaggaacaaaggaggaaagtacatttgtcatgattcttcaataaaaggagtgataacgcgttttaagcaccagtgatgcggtgaaggatttaggagttggtagtgccctccgtaaaattataaatttaacttttttaaaaaaaaaagttattaaacaattataagtttaacttttaaaaaaaggttttaaatttaagtaaatatgtaaaaaatatagtaactttatgatttcagaataaggattattatattaaccatggaatatattttcatagtatacctagagtgataaatcataagtattgataatatttttttgtaaactcaattaaactaaggggttgcttggttcttggcggtgcatcacctcagctttcctactacgtcagtcggtcagtgcgatcaatgagaagcgctggctcagg

SEQ ID NO: 3995 - DNA, 6032 bp, Sorghum bicolor; identical to SEQ ID NO: 3611

SEQ ID NO: 3996 - DNA, 5289 bp, Sorghum bicolor
ctatgcctaaaaaatctatattttttcttttgagaaaagccacatcttacgactcatttttattcttgttccctttaagagaagccacatatcttaaggatctatttttgccacatcgacaacaatactaaactactacgtatttcttagtacgaataaacatgtttgaggttgtctctgtcctaaaatataaaataattttagttattttaattaaatcaaatcatattaagattggctaagtttatatagaagagtattattttctatcaatcaaaataagtaaattatggaaagttatcatataatatatttaataaaggtcggtgtgtaaaagtatactccctccatataaaatttagaagtcattttggacaaggtttgagtcaaacattgagaatataaatcatcaataacttttaaattatcgagtttacaaatatggaattatataaatagatttgtcttgaaaatacttcaataaaagtatacatatatcatttttcctaaatagtttttaaaaataagaggtcaaaattgtgttttggagatcgtgtcgctattctaaacaatttctaaatcctagatggttggagtatatctaatgaagctcatatgttgttgttgtttttattattattattattattattattattattattattattattattattattattattattattattattattattattattattattattattattattattattattattattattattattagatcaaacttattattaagggggtgtttagtttctcataaaatgcaatatgcaaaatgctaactaatttggaatgatggaatacaaaatgccaaaattttcagggctatattttattatatcaaaaataaagaacttactgtcctcatgagggtcttttgaggctctgatgggcttttttctttttgtctttttgaagatcaaaatctaatatgaagaataaccatatttttgctaaagtttttcgcatggcgttagtttttttatgcaaaataataaactaaaatctaactttttttaatagaagtggaactaagcatcctttaagatggtttaagtaagaataatttaattaaatatatcttaggaccagaaaaatgcccacattttggcgcgtgacatggaaacgacgataaaaagtggatcgaggcagccagcatcaggaactgacacgtccatcctcccactcgccgcacggtacgccaccctagctcaatcgtcggacccgttcacatttttctgaggttataaaaggtagcagtagcactactaaatttgtggtggtacggtggtggtggtggggtgagaacgattgcgggggtcgggggacaagcagggcaacgtgcaaagcgaaagcgtgtaggtcatttaccattcgacattactagttgctaccgcgacacgaatgtgtacccttggtccctttttttttcccaagtgcaaacaacctaataataaaaatgaaaatgatttggggacggcagcatctccatgcacgtcagtgaatatcaaagtcacaacacccacaagcaaggagatcgcgtcactcagacgccggccgtgtgtgcccaccaccagtttatcgagtcgttgtagccgtgatcaaggatgggaaaatcagtcatcgcaatgcagtgcggcagtgctgcattgggcaagcggcgccgagttcgatgacgcgaactgcgtgtcgtgatgagttcctagcacactgtttcggcggaggttgtcctgatgatgatgacacgttactactttcggagggtttcttttggcaacaatctgtgcttgtcgtggtgcctcccgcggccgtccacgcgttcttcttggccctgtgcgctgttctccgtgttttcgatcgaggcggacggtgcaccgcctggcgcctgcgcctgcgtgcgcggtgcttcagttgccgccccgcgaagcttttataaaaagcaagcggagcgcacgtagagagacggatataccagcgcagcagctagtagagcgcatgagtctgtgtgtgcaactcgtttcgagcctgcccgcccggagcccccgtctcgccgccgttctccacctccgaaggtacctgatgctacttcctgatcctgccccgcgcatcgcattcgcatccgcgctttttttttttctttttttgctttcctcaatactccctccgggcggcgttcaccgtttcatccactcgccgaaccgatttctttcgtttgctgttcgatccgcagatcctgcgagttcatcccgcgagtcagcatgtcgtcgtactccccgccgccgccgccggaccagtccctggacacggaggcacccaacgcgccggtcaccagggagaggaggctcaaccccgatctgcaggagcagcttcccaagccatgtacacacctcgatctctctctctttcctctacttttctgttgcctgtgtatgatgatcgttgtggctacacgggcctgttcgattcgtgatcacaccgtgaaatttggttcacgatcatgatgatcgttgtggctacgtacgggcctgtttgtttcgtgatcaaaacaccgtgaatttcggttcataatcgctgtggcaaggcaaactaggcatggagatagcgctacctatttctcctgattaggagagccggcgtaatccagctctagtgcattgattccgttttcttgttatccctctttcacgattcgcagatctcgcgagagctctggaggcggtggacccgagccacccgcaggggaccaaggggcgcgacccccgcggcatgagcgtgcttcagcagcacgccgccttcttcgaccgcaacggcgacggcgtcatctacccatgggagacgtttcaaggtacgtggcatgcatggttggttgatcagtcatcactgtcactgggatggcagtgctagctgatgagagaagagaaggctgtgtgactgattcagcagttgtagtaccgatgatgatatttgtgttgtcagtgtctgtctgactcttgctcgatgggcttaggatttttctgtctgtgtctgtctacaactccctttcaaaaggatttgaatttccagacagacactgacagagaattcaaatcctaaaccctactgctgctgaaacctgcttaggtcatccgcaatagttatcaaatagctagctagaagaaattctattggttctcaatagcactttacaaatagctagcgagatgacgtataaaaataatgaaaaagtagcactctcattggctatcgagaagagagattaaatagctagcgactcataaatagctaatcgagcacgattttcgagaaataactctctcacaatactctccacaatagctagcgacttcctagtagctagcgactttctaagctagctatttgtaaattgccattgagagccaataacattcttcctagagatcaaatagctaacgatttgaacattgcggacgcccttaggatttgaattttctgtctgtgtctactttcaggcctgcgagcaataggatgtggattccccctatcattcgtgggctcgatactgatcaacctcttcctgagttatcccactcagccggtaaacgttctcggcctctttcatctacctgcatgtttcctttaaatctgttgtacctttgcgtgactgtgcagcacccctcagacattccgctctggaagagtcttgggtgtcttgacacttcttttttatttgtattattatttatcaaaggactggcttggaatttgtttgtaagagaaaaaatattgtttcatgattgaaaaatagtactgataagttcactgaaaagaaaaagaaaagaaaagctctcgtgatctgaccaccctctttctgaatttagggatggttaccttctcctttgctgtccatccatataaacaacatccacaagggtaagcacgggagtgattctgaaacatatgacactgaagggaggtatgtatagtacactagtacgcctaacacactccttactgtctcaggctgctatgaccaaaggttgaatgccgatccagccatatataactagtttatacttgctttaattgcacaggtttgatccatcaaagttcgatgctatatttagtaagtatggtcgaactcatcctaatgctttgacaagagacgagttgggctcaatgcttcaaggaaaccgcaatacgtatgatttccctggctggtaagtttaatttttataaaccgttctcggattagcccaatttcctatttttgacaataaattgtttggacatgaagttcatttcaaatgtcttgttcttattatgtttttattattttctgaatgttctatgatctcgtccctgcaggctggccgctgccggtgaatggctcttactctacagcttggcaaaagacaaggatggcctgttgcagcgtgaaactgtccgtggtctatttgatgggagcctatttgagcgactgcaagacaacaaaaagaaatcgtcctgaatgcatgcgctgagagttgtacagctcagaaagggctagcagtacaaaactaccagattataccattggtcgtgttcaaataacaaatgtttcagctttgtccagctgtcattaactgtgtgtgtgttgggatttgtttatatgtgtgttgtgccaccagtttcttctccttttgtctcacacaggtactgatacgcctgtgttttctggtgttcgtgcggaaactgtattataagctgaaaaatgtgcgtttgaaattgattggcaaaactgtcatgttggtcttgaaatctgaatatcctttttactgaaattcacgctctctaaacaaactcaaggaaaaaacattatatttatccaaataacaaggcgtcaatagtagccactgtagataaaagacattgtttgacaatatttgctatgtaccccatgtatacaagaaaaatgcttaacgtacgtacttaaaaaaaggcatctatatctcttgtgaagctaattcctactacagctaattttcagtataagtctatcttaatatacgagtcatctatattattttttactaactatatccacattatctctactaataaacatgccgttccactgactttcgatattttaatgcaagatatcatatcatcttcattaattttgattctacgtaattttcgtagcaacgcatcttctagtttgatccgaagtgatgaaccaccaactcaagggactcaaattatttgttatcatgcctgtaaaatattggg

SEQ ID NO: 3997 - DNA, 5805 bp, Sorghum bicolor
tcctcttctccaaggtgatcgagtctcagtagagtttcattctcatttaattaatatagtgattattgacacatcaacaaatctacttactcgattcgcttatttaccagagagagagagagagagagagagagattgattttcgtagagttatatttagcataattaccaacacatgtggcaatcttgttaactgtttcataaaactctctgttttgaatagcataacacattttcaactcctacataataaacctctctaccaagaaaatgtaagtgttcatatcaactctttcccttttgacaggcctggggctaattaattggccaagtgtgggaattctctttccaattttcacagtactcgttcctgtatctagtgatgatgatgagatggggtttgttcctcaagccggtggactagtttgttcaaaccacgcgatggactagctaccggctgtccatgtcgtcctcgattgctctttacacttgctagttcatcgagaatgcagaaaaaaaaaagcgtgatggaaggtgacatctagcgcataatcgaacaaggatatgctggggaaaattaaaaggcggtgtgtacgtacagctttaacagaagaaaaagctagctagcaatcccattgtcgtgttatgttgttcaggaaatgttatcggcactatcagtacgtacagtagcctccttcacatccaagtcaatcaaaaaaaaaaaaaagcggccactttttacagagttgggttattcagagatggcagcgatttgccgaaagaaaagcatgcagaaaggcccgcgcgctgatgataagggcaagggcggcgctggatggagaggccggaaatcttgctcttgcatgcgccccagtgatttctcctgtgctagctggaggcaacggagtgttcaccgctccgtgctactcctacgacgacggcggtgtggacgaacgtcacgacgatcggcgttgacgtgggcaacatgtgttttccacttgctcctccgcatgccatggtcttgtttagtttcaaaaaaattacaaaataaaaatagtaccactttcgtttgtatttgataaatattgttcaatcatagactaactacggttaaaaaaattgtctcgtcaattccgaccaaactgtgcaattagtttttattttcgtttatatttaatactctatgcatacgtctaaagattcgatgtgacagagaatctaaaaaaatttataaattttttttaaactaaacaaggcctatgttctcctgttcgtgggccattctgaaaacgagatgatattacttacagcccaaatattagcccatggccgtaactagcgtagggacaatgggccaccagcccaaaaggagacgtgaggatcatgtgtagtgaaaggcaagatgttcctaaagatatgtgtaaggcaagatatccaaaataaatgagaggtgggtaattaaactcgtgcgtttatgcttccacaaggacggctagatatttagaacttcctcgtaaaaaaaagttactcctaattgtgagccagaaaaggaaggaactgatcgatctgtatcctaaaattcctttcggaaaaactagcaatttccaaactatgctccagaagaaggctgaagctgaaacaacgcctacacatccaaactgagacagtaatgacaggtgggaccccgtagacaagctcttggccccacaagtcatcggaagcaccaagtataaccagggcacttggagatttgatctacactagcggccgccgcctgtcagttgcagagctcccgagcaacgcaagagttatgctcgccgagtttgatgatctctccgaagaagttggatgctaaaatgctcgtcccttcctcttctccattcgcctgagctccccatctccggatgggtcccgcgaggcttcccctagcctgcatcgtcaccacgttgatctttgtctacatgctagtacaccacggcgccagttcgcaggaagttttcccggaggctgacggcccggcagcagagaattcagacgagctgtggctcaggtccggaccgccgccgagggtcgtcgacgtcgatgactacggagccggagatgccggcggcgaccacgtcaccgaggtgaattaatttgctagctgatcttgttgttctctcgattgctcggtgacagacacaatcgtcttagcggtgcgagcggtcagtctgctccggcggctgcactttctgatcgatgctgcactgcacgcgtttcttcaggcgtttctcgaggcgtggagcgaggcctgcaactcctccgatgaccggtccgtgttcctcgtgcccgagggcaaggcctacctcctgatgcccgtcatcttccgtggcccctgcagagctgtctcgatcactgcgatggtgagcctcctcctgctcgttaatgtacaagctgcgccgctcattgttgtttattgggttctaatgttccttattattaagcgatcagataaagggaacgctggaggcgccgtccaaccgatcggtctggctggatcaggatctgcaggagtggatcacgttcgagggcatcgatcgcctccgtgtcctcggcggcggcaccctcgatggcaacgggcttcagtggtggatcaactcgtgcaagctcaacaaatcaatggtatgtttaaattcgagtaaagtccatcaccggtccctaaacttgtattaatatgtcatcccagtccctaaactcgtaaatcgaccatttagatcctcgaacttgttcgtctgtatcgtctcagtctctaaacctgtttagttgtgtcatctcggtccctaaacttaaaaatcactcgtttaagtcctcaaatttgttcagttgtgtcatccgggtccctaaacttgattttaagtctcatctgggtcaaaacaaagtgatctaaaaactctatattaaaaataattcataactttttcatatgtactcgaatgaagacaaactttatatcaaagttgtagcccttaatgcgttctacaactttatagttgaaatgttttttatttaaagtcgtttaatatcacaaaatttaattttaatttttaaatttctagatctaaaaactttcaaaaaatattttgggaccccaaaagatttcaatttaaaaacttttcaactacaaagttgtagatcgcattgcttactacaaatttgatataaagtttatcttcatttgagttcatttgaaaaagttatgaattattttcctatatagagtttttagattcgccctgctttgatctggatgtgacttaaaaacaagtttagggactgggatgacacaactgaacaagtttgaggacctatatgggagatttctaagtttagggactaggttgacacagccgaataagtttaggtacctaaacaatcgttttgtgagtttaaggaccgggatgacacacgcaaataagtttagggaccggtgatggactttactctttaaattccttgcggtacttagcatgtcatgcacatttccaaattttctcagatggaattttctttttttttatttttccttttgtttgtccatccatcagcgatgcgtcatcggtccgacggtacctttcctgacccggaaaactttcagttgatataataatgtgcatcatcggcaaggtgtttcagctgccgagtttcaggcactgtacttcaggaggtgcacccacctggtggtggaggagctggaggtgagagacagcatgcagatgcacgtcgcgatcgcctactcgtggaacgtggtcgtgtcgaagctgctcatcactgcaccggggtggagccccaacaccgacggcatccatgtgtccaacagcagggaagtgtccataagcaagtgcaccatcagcacaggtatgtatgtgcccattgtgatgtctcattcgcatccctcgtccccttcatatgttcaagaagttggtcacggcagaagatcatgtgcacggagagattcgtgtggccagcactcgtacttattttctgattagagaaagcgtaggctgagtttggtttttctctcgcttctgtgatgatgcaggggatgactgtatatccattgtgactggatcaatgtttgtacgggtaaccagcatattttgcggaccgggccatggaataaggtatacccgtacacgtctgcaaatatgtgctagtagaatggatggtgctaatctaaaaaaacaacaacaagaagaagaatccagatgctgttacacgatttaccacacgatgaaatttagagttgcacgcgttctgacgataccacatccattgtttacagatataggcatttgatgtttcaaatttggcatttgtaaaggcatggccacaagctgtactgtacattgggttctgagtttctgatgctttcctggcgttgtttgctttgcttgatgctacagcattggtagtctaggagcaaacaactcttgggcccatgtctctgatgtcctcgttgagaaagccacgctgctgggcactaccaacggtgtgaggatcaaaacttggcaggtaatgcatgatcttctcgcttgagtggcatggaaacttggacacttccagcccttttttgaattttgaggaaaagtgttgctcccaaaaggggcgtacgactctataaccttttgttccctctgtttttgcagtcccctgtttctttgtttcctacaagctctgtagtactgtagcctgtactgtagatgagggactatgtgtcgcatattttcatggaaaattgtgtgccgatacaatacaacacatgcatttgttatgcaacatattttcttctaacaatgtttcttataacttcattgacagggaggacatggctatgctgaaagaattagcttccaagatatatcaatgcacaacgttactaacccaataattatcgatcagaactactgtgactccaagagaccttgtcatgaacaggtatggtcccctacaatatatggatccaaatctctttgttgcttcatcagatctctagatctctagaaaataaacatgtttatgacgttttgtgcatcacactgtgtagggatcagcggttgccgtacgcaatatacgctacagaaacatacatggaactagtgcttcaaaagtcgccgtcaattttatttgcagtggcgctctgcactgtgatggtatactaatgcaagatatttatttggttggagaaggaagatatgctacatgttcttatacgaacgctacagttgtacaatttgggtataacttccctttttgcagtgcagagatgtagcatagggatataggcacatgatgtatagtacatgtcaaaatgcaggagtagtgaatacacaagattagcatgacccggaattcggaatcctacaaaaacttagaacgcgagattctaaaagaagcgtttggatgtaacaaagcagactttttcaagggaaaaagtatggaacaagaggaaggtgcattatgtgttcaacttctcaatgtgaggttaaagtacttaggacttgtttggatgcacatataattggattaggggttaagtggatcttaatgcttaccaatgagcagtgtcttcatttttgaaattccttggcaggcactagcacatacggctttgctctttttacagggaatgacagaatggtcgtgtaaattggtttgaacaccgacgaagacgtacaaacacaatgtgtccgaatgcagaagacttagcagtactacctgcaagtgaagggctggctgcgcactgaggttttgtacgcatgtatttgc

SEQ ID NO: 3998 - DNA, 13667 bp, Sorghum bicolor; identical to SEQ ID NO: 3504
  misc_feature (6359)..(6458): n is a, c, g, or t

SEQ ID NO: 3999 - DNA, 6133 bp, Sorghum bicolor
cgggtccccgttgccatctggagggggaaagctgggctgtagggggaaagggagcaggccggggagggagtgggcctcggccagcaggccaccaggccgaggggagggctggccggggttttgttcttttttctcttttctgtttgtttcttctcccttttttttcaaaacattttctaaacagaattttgtgcacatattatttctacccaagaacaatcaagcaacacataaaatatgctccagcatgaatgcaccatcaaggttactaaacctttgataaattttattttcctcaaaattatttattcactaaattaaatgttcaccaaaaatacttaaataaatcaattaaattcctattaattgaaaccaaaattttgggtgttacaaactctaccccccttaaaagaatctcgtcctcgagattgaacggtgcttactcgaacagatatgagtatgatttcctcagatcatcctctctttcccaagttgcctctgcttccgaatgccgattccactgtactttgcacattctgatgacccgacttctggtgactctctcagctgtctccaatattttgaccggatactcttcataagtgagatcacctttaacagaaagttcttccaatggtagttgctcctcacgtacacgcaaacacttcttaagttgtgacacatggaacacatcgtgcacaccagacaaactttcaggcaattctaaccgatatgctacttctccacgcctttctaatactttaaacggatcaacataccttggagctagctttcccttcatattaaacctcttcacactccgcataggtgacactttcaggtagacataatcacctacttcaaaagccagctctctcctacgcgtatctgcatagcttttctgacgagattgagcaactctcaagttatcccgaatagtccgcacttgttgttctgcatgtctaagcacatctgtcccaaacacctgagtttctcctgtctgattccaaaacaaaggtgtcctgcacttccgaccatacagtgcctcgaacggtgccatcttaagactctgttgatgcgtatgcgcccgaaatatgcggaggatagggatcggcactgccgtcttaaaaaaaacttgtcttaggtatatgactcttttttttaatttggccatgtagcctcaaaacaaaatttatttggctctatggccttctgtcagttttgagcagctaacaatgttaagaccattttacccctaacaatttttttttgtgttttatatgaatatatatgtggttatgtagtggaaatatacatgtgattatgtgagaatttatatttttattttttgctaggggtaaaatagtttttttaccctagacttaacacggtcagctacccaaaactgacagaaggtcatagaaccaaataaattttgtttaaggtcatagagtcaaattcaaaaaaagagaaacatatacctaagacaagttttttcgagggccatacacctaattctcccattttttaacacaacaccattgtggccttatttagttcccaaaaaatttccagattctcgtcacatcgaatcttgcagcacatgcatgaagcactaaatatatattaaaaataactaattacataattagtctgtaatttacgagacaaatcttttaagtctagttagtctataattagataataattactaaatacaaataaaatgctacagtatccaaaaccaaaaaaattctccaaacgaacaaggcctatgtcaaacaggcctgtgcagcccagccggcccaccgcccactcacccgcgcggcggcgcccgcccccgcctccttccccggcgccaaaacttctcaaaattctcccgcgcgagcgccaaaccggagccaaaacgaaactagcagcgaaccccgcggcggcaaatgctaaaaaacgcgcaaaacccccgagcgccgctcgcctcccgccatttccttcccaaatctgccttataagcgcgcgcagcctaggcagctcgacgcatcttcgccgccgcacaaggctcccccacacgaaacctaccttcctccgggagacgattcgacagggagaggaaagaggcaagaggagccatggacgctgccaactcggtaacgccgggcgccgtgtcgcacatcctggcgcacccgtcgacgggctccgacggcgccgtgccggatctcgtcgtccaggtcctcgacctcaagtccatcggcacgggcagccggttcaggtcagttctcacctcctcccttccctggccgcgctggatctagtatctttgctagttttcgttccttgggcggcggatttgttctgttcttagcgcagttcttatggatcttgtcggatggtctgacgagcctccccttcggtctggatctgttgttgccttgcagtttcatggcaaccgacgggaaggataagatcaaggcgatgttccccaccagcttcgcgtcggaggtccgctccggcaatctgaagaacctcggcctcatccgcatcctcgactacacttgcaacgccgtcaacggcaacaatggcaagtaagtgttctccatccttctttcgtcaccatgagcgggctaatgttggcaactattctcgtgttcagcgtttccctcggtttcctgaatcactgtgctttgtttaccagagtcttgattgtcatcaaatgcgagcttgtgtgccaagcgctcgacgccgagatcaacggcgaggccaagaaagaggagcctccaattgtgctgaagcctaaggacgaaggcgtggtcgtggctgagcaggcaaatgctcccccagtcgcgattaagcccaagcaggagttgaagtccgcgtcccagatcgtgaacgagcagcgtggaaagtaagtgcttgcaattgctgtctctgtcctttgatatctggctgaatctgaggatttattagatttacagctcattattatacttctgtgcgtgcagtgctgctcctgctgcgcgcctttccatgacaaggagggtccatcctttgatcactctgaacccctaccagggtaactgggtcattaaggtgcgggtcacgagcaaaggcaacctgagaacctacaggaatgctcgtggagaaggctgtgtcttcaatgtagagctcactgatgaggatgtaagtgctctgatggcatttttctcatgtttaagtgcgtttttgtgagttgttgttggttcgtgagctgatattttctgaatctgtgtatgcacagggcacccagatccaggccaccatgttcaatgaggctgcaaagaagttctatccaatttttgagctgggaaaggtctattatgtctcaaaaggatctcttagaattgccaacaagcagttcaagactgttcaaaatgactatgagatgtcactaaacgagaatgctattgttgaagaagcagagggggaaactttcattccgcaagtgcaatacaactttgtcaagattgatcatctaggaacatatgttggtggcagggaacttgttggtacgtcagaattattggagttaagttggttttgcttcttctggcttgatgtagtgtctcactgttttatgtattacttcagatattatcggtgtggttcagagtgtatctcccacactcagcgttaggagaaagattgacaatgagacaataccaaagcgtgacattgttgtagcagatgactcgtaagtatcgcttgatcttttaccttgttaataggtcagaatacaatcattcagtgatgttgcttataatttctctaatcacagatataagtccataaaaattgtctcaaattaattctcttaagttttgccatatctatctttatatttttgtgacctaaatttaacagacttgttaataggccagaatacaatcattcagtgatgttgcttatagtttctctaatcacagatataagtccataaaattgtctcaagactttatatttttgtgatataaatttaacttaacgaaacaatattggcactactatattaatgacgataataataataataatttcataatttataatactctctctttaagattatttttatagatattgtttctaataaagaaattatctgttcctaattgactcatttcatttttttggcagtggcaaaactgttagtatttctctctggaatgatcttgctactactactggccaagagcttttggacatggttgacagttctcctgttgttgcgataaagagcctaaaagtatctgatttccaaggtatgtcatctaatctctgtttgatcttcttcctagaaatcagtaagttactgagtgtgttgtgataatgtggtgctgaaatttgttttgcaggcgtgtcactttcaactataggcagaagcactcttgctattaatccagacctgcctgaggctcagaatgttaaatcatggtagtacttctctcctgaatgatttgagcttgctgtatgtttttaattagtatagtatgcttagacttgtacataatttatcaaataggtatgactctgaaggcaaagatacttcactagcaccaattggtgcagaaatgggtgctgcacgggctggtggcctgaagtccatgtattctgatagagtttttctgtctcacatcaccagtgatcctgctatgggccaggaaaaggtatgatcctgaatattcactaaacggtaaaattgcaaatttggagaagccccagtttgacttgtctttgctttgcagcctgttttcttcagtttaaatgccatcataagccacatcaagcctgaccagaatatgtggtaccgtgcttgcaagacctgcaacaagaaggtgactgaagcttttggatctggatactggtgtgagggatgccaaaagaacgactctgaatgctcactgaggtaaaatttgttagcagaagcctgctattgttatctatttggtgctaaatctgattgtttccctgcatccttcagatacataatggtcctcaagatctctgatcccactggtgaggcatgggtgtccgtgttcaacgagcatgctgagaagatcattggctgcagcgctgacgagcttgatcggatcaggaaagaggtaaattctgaaatctgagttgcgcaaatactctggcttgacagcattgaatttctgctgtttccttgtttgtcttatccctgatagtgggccctccattgttgcaggagggcgatgacagttacattctcaagctcaaggaagccacctgggttcctcaccttttccgcgtcagcgtcacgcagcatgaatacatgaacgagaaaaggcagaggatcaccgtgaggagtgaagcaccggtcgactatgcagctgaatccaagtacctgcttgaagagatcgcgaagcttactgcttgctagaagatgcaatctttctggtggttcgtgaaggaggactggcccctgatatggttccctcgcaagggttttgagctgtagtaactttattactgttctgtgttgctctcattggtctttagcacttctgtaagatatgtagatgttggttcaccttgatgtaagcacaacagatgctatgacagttcaagcatgaagcctttgcagaattgcagttccgattccttgtctctgcagctttgttgagcaaatagcgagggttattaagactaattcatgatgtcaggttcctgcggctaagttttagttctgtatatcagtaatcatatgtagaaacccttccttgctctaactcgtatgatgattgataaagtgtgcgtatcattgtgccatctattctgccttttctcagacatgtttccgtgaattgcctgtgtcagcttatcgtgtatttgtactctttagctagcggaatgagcttaacatgctccagcctctacaccttaaatacatatctaatcgtgcgtttggatggaggataagtgggttgagttggtcggagttgcacctggccgagcagcggcgcacatggccggggagctgaggcggggacggcgtgcgcggccgggccgagaagaagagcacgcaaaaggtaggggaagacatccgcgagactgccactgggcctctgattttctctca

SEQ ID NO: 4000 - DNA, 5018 bp, Sorghum bicolor
ccttcaaaaccgaaataatttctgtgctttttctagagttccagggagaacactccccagtccgtcaaattgattcaggaccaagagtttagtattttcgtttaacaacacccaacattaattaagcatttaaaagctcagtaacactagagtttctacaaccagactcccatcagcccttgttgtccaaatcacaactcaaacacagattgaacagaacaccaaatcatcatatattgatcaattacctcttccaataggcgtgctttcttgcggtggtatcgctgaaccctggcgtccacctctacctccctttgctactccaggaaaccgaaccctgcaaaaagtaactgtgaaatctgaatctggtcgtacctgatgatcgcaagaatgcaatacccttccgattctaaatccacaagactaaaattttgccctttattgtctcaagtaaccttttttcacctcaacctttacggaggaagatttcagaaccaccaaatcccagttacaatatgacacggaaaagaaaaacaatccgaagccagccacataagatgaaattaagatcaaacccttcagcagatcgaggtccgggtcctgctgcatgcacctgtttttacctcagcttcttcgagtccccgtccatggcgcgcaacgtatttgtagagaagcccccaatggcaggttccaactccaaggcacaagaagccgcagcttcagtaacaagcgagagcctcgtatttaaaactgcttgcttgcatgtagaggcggtgcaccaaagaactaaactgttgtcttggtcttggaggcagacaataggagtggaaatgggaatgggatcgctttacccccatcccatggaagcctaaaggccttcaagaatccagcgcgtgatattcttccctccgttgtgccgccgcctccggtcctggcttaactctcaagacagctatgcctgatggagtgtgcctaattcctttgtgacgttcagtcttcagaggataactttcgtcggcacgaatcggcatcttcgcggggctacgtttggtactatgaacatagctagcaaggaatcatgccaggtttgctcatcagttacagatgtcagtgcaatgttcgaagttcaaactcgttcgttgcaatctcaggtccacttccctctttgtgcttttatcagtcaccactgagtgctgaatctgtcctgtgatggtggtagttggatgctagatttgcccttttgaaattaaagaagccactttatgccatcttagtgccctggaaagaggatgggttttatctttggttttttttgtgtgatttggttttatctttgttctatctgtcctaactcctagaaagagatactgatttccaccaagattttgttctcgcagaagtaactagcaggtcaaatagatgagacagatagtggcaatgcaagcccgcaacgcatcggttctttctgtcgtttcaatgttcacaaattgtcactcagaatcaggcgtcgtttagcaccgtagttcatattgccaagccacaaggctgacatggttgtatcaccgatcagtcttacactacgtcgaaatgctacactaaccttttttttacccgaaaaaatatattattaaatcgattcttcaaaaaaaaaacccatcaaaactgccttgaaactactgggctgaattggagtcttggtggactaggatttttattgggccaaaccaaatattcaggcccgctaataagaaggcccatttaatacatccgatcatccctaatcccctcatccacacaccacactgctcctctcctactgcctgcctcctctctacccgcgggccgcggttactctccacctctccaatccatctggaagtgccattttccacccaattccgtcgattctccgtttttggatgccttcctctcccagattagcgaagagagccccggcgtgttgatgaaatatttggatttcgttactattcgcggcggccatggctacagtttggagcggctgcagcacgagcagcggctccttcgtccaagagcttcccccgcgcggcaaacggggcggtggtgatggcacaaggttccgtccgcgaagcggaggccggaccagaggcgacgcccgccaggcacaagctctaagcgccgccatggttacggtcggagcttgcgtttgtagggcggctccatgcttacttgattcggaggtcgacgggaaggaggacgtcgaagttgggtttcggggcgtcgatagtgaaccgcacgctgatggccatgatggtggcaagaggcgcgggccgcgtcggcgtccgatgaggccgactgtttttcagaaggagatgggcgcaagaagtgctccaccggcgatggcgtcggagccggacaggaaatctgagcatggggcgtcgaggctgcacttcttggaggagagggacgaggagacgctgtcaagaaggttgataaagctgagccaaaacaacaaggtcaggagtgccactgagctgtttgattcaatgcgcgcatctgggctgcagccaagcgcacatgcctgcaactccctgttggcttgctatgtgcgtagaagtccactgacagatgcactgaggatgtttgagttcatgaaggcgaaaggaatggcaacggggcacacgtataccttgatactcaaggctgttgcgagcaatcagggttatgtttctgcattggaaatgttcaataagattgaggaggaggaagattcaaagaaaatcattgatgtgattgtttataatacaatgatatctgtttgtggaagagcgaaagaatggatgcttgtggagagactatggagaaggctcaaggataattctttgagtgggactttgctgacatatgatttgttagtcagcatattcgtgcaatgtggacagtctgagttagcaattgccgcatatcaggaaatgctccagaagggacttgatccgagcgaggatataatgaaggctatcattgcatcctgcactaaagaagggaagtgggagtttgcactgtccacatttagtagaatgctgagtgctggcatgaaacccagtttaattttgttcaattcaattatcaactcgctggggaaggctggtcaagatgaactcgcctttaggatgtatcatctactgaaaaaatcaggccttaagcctgatcaatatacatggagcgcactgttgtcgggattatacaggtctgggcgatgctgggattgcctagagcttttccaaggaatcaaagccaagcatccggccctcttaaatggtcatctctacaacattgctttgatgtcttgcgaaaagcttggtcaatgggaacatggtttgcagctgctgtggatgatggaaaaaggtggactggaaatatcagtggtatcttacaatcatgtgataggtgcttgtgagtttgctagtgagccaaaagttgctcttaaagtgtaccagcgcatgattaatcgaaggtgttcgccagacacattcacacatttatctgttatacgagcttgcatctggggatctctttggactgaagtagaggatatattagaggtactacttctgtttctcgttatttcatttctgttcaagtggcaaaaacttgaattcccatttgcttaagtgtgggttttttgtactgctctcgtaccaaaagattgaatgggtggtactctgactttggttcttcaatgctacatttatcattgcttaattatttagcaatcttctatggttagtaccaacactgtggctggatacaaagatgaaaatacttatatttttctatagttgtggcttttcagttttccttggtcattccaatgccttcttgtgcataactgcacctgaatttgaagaattatgtacatgttgctcccattagatttctgttctttacactagtgatattcagttcgaaggacatcgttaattttgtgctccaagcctccaattacctggtatttgcattctttagccatatccattatttgaacatcaaggacaatagctgtctaaactgctgagcattaagaacactggaacagcatcgtatgagtataaagtatggattttattatggatgttgaacctgcagaacattatggacgttaaactagtgagcattaagaacgttacaaagtatcaacacggtgcattattgggtgttgaaccggcagaacatcatactatgcttatactagtttctttacagaatcattccgttgaacctggttgcagtcttggtgcttttaaatccagctctcgtggttcattcatggatgccctccctagtgatctaatagatttttttaaccgcctgcaggaggtggctccgaactcttcgatctacaacgcggtcatccacgggctgtgtttgcgaggcaagattggactggccaacagggtgtacgccaagatgcggagcattgggctcgtaccggacggcaagacgagggcgttcatgcttcagcacattgctacggactaggactagcctcatgaagaacaaagtccggcgatctcgtagctgtacctgtacacagccccaaatgaaatgagcgaacgcgcatgtatacaggatcaaaggtggtacagcagaattgttgcgctggacactgtataggtactcaacatttcaacttgtccgcaaaaggatgggtgttcacttcagaccgctgcagactttttttagttcaatgtactgtgggcggagcggaagctggcagtgccggtgcacagattgttcatatgtttctcctcactaacatcctgctgccccttgccaacgatgacggggtccctgttccaccgtggttgtccatgccaagaagaatcaggatgaaccgtgcggacttggggtggcttttctgtagcggctggtgcgcggttgtggaaccactgaaacttttggaattgcgcccgtctgctggaggagagctggttcttccggtggttcacctcggtctttcgcggattttggtgggtgta

SEQ ID NO: 4001 - DNA, 5149 bp, Sorghum bicolor
agacgcgagcatgtcgtggtacacctgcatcgcggtgtcgacgcggcaggcctcgcagtgcgcgaggatgagggtgttgtaggagacgatgttggggacgatgttggagcggcggaagaagaattcgaagagcgcgacggcgtcatcgtggcgggcggcgcggaccatggccgcggccacggcgttgcaggtgaagacggtgggccggacgcgggaggagacggcggcgcgggcgacgacggaggcgccgtcgagatcacccgagcggatgagggactggacgcggttgtggaggctgaggcgcgggccgacgagcgcggacgtagtgtccgggaggcggggcgcgttggggtcccgcgggggaggcggggaacggcggagcgcgttgattggaggctcgatgcggaggcggcgcttgcggcggcggcgttcggcggcggcttcctcggcggaggagaaggcgaagtggcggcgccccgtcggggtgaggagccccgcaagggtgggtgggggtgaggagcagatggcgggggctggcgaggggtggaggtgggagaggcggcggaggagcaggatacgacggtagagcgccatctccactcgaagggagcaggaacgggtgcggcggcggcggtggcggcggaagggtggaagaaacgaagaagcgccctgcggctgcaaccggcaggcaaagcagcgcgggacgagccgcagacccacgccgcaagcccacatagtgcgggcgaggaggcgagctggcgggccaaccagcgtggcgtccagaagtgggccgtctgggtaagatagagctcgcgggcttgcggatcggcccaaggtagcttaagcccagccgccgaggttctcagggtgcgacgtgcgtcctgtgagtagcttgtgcaaacgctccgatcaaaaaaaaaaaaaaaaaagctagaagagccacacggcctggttgacgagtcacaatctacaaacgggtagataacgtttttttttgtaggacagccgtgagccgtgcattacaccggacaaggaagaatgcctggctcgaaaccgatgtgctgaaaagtaagctagaggatgtaggctgcaggctgctggctggcctatcacatttgcataagttttttttttttttttatgtttggtatactccgtgtgctgctccagcttgatggattccgttcccgcggccgcttcagaggaacgatcggctccgcgccgcgcggtgcgtcctcgctcgtcctcccgtgacaagaactcggtcacgcaggcacgagcgctggcaccaacggccccgctcctgccgcattgcaccaacaacgtccaccctccggctctcacggtggccggtgaaagaaaaaactgtccacgcatccaccgcaccaatacttaggccttgtttagttccgaaaagtgaaaacttttcggaactgtagcactttcgtttgtttgtgacaaatattatccaattatagactaattaggatcaaaagattcgtctcgtgatttccagctaaactgtgtaattagtttttattttcgtctatatttaatgtttcatgcatgtgccacaagattcgatgtgacgggaaatcttgaaaactttttggtttccagggtgaactaaacaaggccttatacttttgtcaaattcgacttttgaataacgaacgctctcgaatttgagcgagtagtagatagatcatagatgtggatgattctttctgagaatttcgcatagacggaaacctgcttgaattatggcaacgacaacaaatcgcacgcttgctgttgctgtcaaatggaaactggcatcattatccagtcagcccccaaaaaataaagaaaaaagtgagagagaaaaaaaggaccaggtttacggcagcaaatatggaagcaggcctcactgtcgcaaaggatccggcgccgcaggcccacgaccctctcgatccgcgtgccgttgcctatttatcggggtccgccgggccgagcgccgcatctttgaacctggttcttctgtcgcccatcttgcggcaccccaccaccaccagaagagcggccgagcggcgcagagaagagagaaccagcaagtttagcggagcggccgcgcgtccggagggaggatggagaaggcgctcaccaagctcggcagcttcaccatctcccgcaaggccaagcaggagctctccgccatcggcggcgacatctccgtgagtgctcaccgtcgccgccatctctccttttccgtctcgcctttcggcgcaagcggttgctccagcctcccggtcacgggcattgcgttggatccgctgctttcaatctttattttatccggtcctgccgtcctggggaagttgatgagattagaaatactacctgttgcattgcatggctcatggttgtgctaatgtgaagtcctttcttttccttctggttcttgtcactgctctgaacctctgatgattcaacttcttcgagcatctattttagtggattattctcgtttgcacattttccctccttgatgaggctgcactaaattcacccccatcgtgttttactcatagcaagtactagtagagtggtaaaggaaaaatccctctttgattgaactggggcgacgatatagtagatcaatttcaactttagatgaaagccgttaagttcagcagtatgaccaaactgacagcctttgatcttacctgcagcgtttatcgagcacggtggaggagaaggcaaaatgggttttcgagaagctcaaaggtacagttctgttccattccatggttggttttgtggctgttaaaatgagagtgactctgaagagatgtacatgatgggctgtgaaaatgagagtgactctgaagagatgtagatgatgaattagaaccttctagttgcatgttaggttgttttggcaacatcatcagtgcaattatccattgcggttagcttttctttgcctcatgcgtaaaaccaaagcaatgcgggaaagagagctttatttaatatgattatatgtactggctgcctgattcctagcctttcctctgattggatctagcttttcttggatttcctgtacccttttgatctgcaaagtagtgcacatgggggccaaactgaaatgacttttgtgacatcctgctgctctgcattggttggcatctggcccatgtttttttttaagataaagtcccagtttttcgttgatgccattattcagaagtccatagaggagcaatggattggggacttgctcacctaacagcttgttttacgtgcaatcttggcgttggtcctcctcatgtcttcggcggtattagcaagactgtgcagtgtatgtcctggtagtaggaagcaccaactagctgcttgatttgccagcctgtactgcaatgcccattgtttgtcatagcacacttgcttctaagcagcatctaatttgttgtggccagaaggacaaaagcaattgataatgtagctggtcagcttaactcctgtcaaagctttcagtacaggatacctttgttctgaataaactgctttgcaaactgggttcctcacttttttcgtgtacttttccttttgccaaatacaggtcttgtcaataatatgttcataatctatatatatccatttcaattgttagtggatactatgtctaattactctttgatgtcttcctcctgatttattggtggatcacagttatcttatttgtctgattgcaatttctgtgatgaacaattgaacaataacaataaaaacattttagtcccaaagcaagttgggctggtctatatgataaataattgaaatattgtagatatcttttattctctgtagcgtcataaatttcagttgctatattttttgaaattctaagtcaaaattgctccatgaagttagactttccttcaaaactcaacactttctgattctgaattatgttcgtttatctctttgttaacctcataccgtagcacctttgcgcagttgtataattgatatttcaaaaatatgcactgacatcagtttcttctgcccaggacacaagaagtcgctctctgatctactccgtgagcacaacctccctccaggtctcttccctcgtaacatcatctgctatgagtacgacgaatcaacctcgaagctggtggtgcacctgtccaaaccctgcgaggtgagcttcaaggattcctccacaatacggtatgctcctcgtgtcaaagcgactctgtcccgaggcaagctctccggggttgaaggcatgaagaccaaggtggtggtatgggtgaaggtggcaagcgtgagcctcgagagctacaagtctgacaagatatgcttcatcgccggtgtgaagaagctgaggcagaaggatgcttatgaggtccctcgcgaagccgtctctgttgaggagttctgagctcgattggtttgccttatccgtattccgtagtatcattcattcatagcattttttgggtctcatgtgatcggcgattgatgtgctgtgacctgtgatttggtagatttgtatattggaagcatatggatctgttctgcctggcagaagaccacccgtgcatgttatctgacgagaccttcacatgtgtgatgtttcagtaatgtgaacatttagcatgtgtcctggttctgcattggttgctcctagaattcatgtcttcctgttttatttcgatatatatatggtatcgcattgcatgtagttggttggtggctgggttgcatagtttgttccaacaggtaattctagataatatatgcactgggcttaagttttggctatccagttattgcccgagtttgttttcggccatgcaactaaaaattcataacttttttaggccttgtttagtttcacccaaaaactttttaccccatctcatcgaatatttggatatatacatggatcattaaatatagataaaaaaataactaattgcatagtttgcatgtattttgtgagacaaatctattaagtctaattagtctataattagacattaattgctttttgttaactaaataaagccttaattagaagaatccatcgtagaatatttggaagatagcgctgtcatgctcgaccatatttaggcgtcgtatctaggccttgttt

SEQ ID NO: 4002 - DNA, 6734 bp, Sorghum bicolor
atggattaactatgttcaaaagattgtctcacaaattacagataaactatgcaaattagttattttttatttacatttaatgttctgcatgtgccgcaagattcgagcgaagtgaattagaataagaaatagtggatcttgcatgtcaaagttgtagtccacggccatgtaaatctcgccctcctatggtcagagttctatggccatgtaactcttttttttgcatactatttatggtttgcatggatgggaatgagttgacctggtcatggctaacatgtcccatggtcgcaagctcaatttaagataatgggttgacctatttcaactaaaggttagggtctcacaagtctatttacatctctaatggtttggccattagagatattagttgctacatcttcttaacaaatttgaactgataaatagaggtttaagctgaaacttctttttattgtctacctacatgaatctaattgtctattataagtttatactagcagattagttcacatacgtataagttgagcattgcttgtatctaagagccagacccctatgggagaggctaagcgcatacgacaatgttatatttggttctatacatatttagcctggctaagagaagatgttgagcgtgctcagctcccaaccaccgttggccatgcctgcagtgtggtggcgtcgctgcaaccatggcgtccaaaaagtgagccacactcgtcacagtgaccacacgctagacaaggagcagcaagagcaaaatgacagagaaaaatctatggtggccaaagcttggatgagaaccaagcagaatgcaaaatacttgtaccttaggcatggcgagatgtggtgagaaccaagcacactcgttctttggttgccttactttcctaaaagagttgtatctttatatgttgcatgaaataaaaaaaatcagccagtgtatgattttttttagcgagccaaagaccaaatgaaagtacagacaaagctccgactagtttcttctatgagccacatagcgacaattcttttttctttctctgttggtaggaaaaaaaatcgtgctgttgtgcagaattcagggctgcacaggctcatgcctaggtgctttcttccgtaatggccgggaagcctactgattttgagtactgcactctttttgtctagcgtgtgtctactatcccgccaatgttttccaagctttcttgtctagtgtgtgacgaaagcttattggttttgagtacaatactatactcgtactcaaaggttcggtttgtttggctgaaaatgtataattaaaagtactatttattgatttgttgtgagagaaaaatattattaaatgactgataaattcagattttactaaactgtttgtctgtttcgcataaattttctgcaaagtttgtacgtttgaaatcctcccgaaatcaatttcggattatacatactttgtccttgagttgtttagtgaccgatgtctttgtactgttagcaagtggtatcgtacatacgtgccactgtgccaggtcctagcaaaaggacggcagagagtgaagacgacgatcgacggacgacggcaacgactcagtagccgcagcagcacactgcagcttccaccctgcacaataaatcctagaggcgccggagggatggccacaggcggtcagtgtcatactccccgagacgccgcattggatgctccctctacctgtctactacccccgctggaatccgccgctttccattgtcgctgacccaagcaacattctctgcttcttggtccttgccttcttggttcgccgccctcccgcaaactctagttctgcgcatcgctggagcaaggcgtttcttggttctcctgagtatgggtctgagaaaggaatgcgccatgcttcgtgaggcagccggcttctatacatcttggtagccctcggcattggcatcctcccgttcttgggcccttgactgcagattgggggtttaactcagccatgaggaagcacgggtggcagctgccgtaccaccctctccaggtataatccactcgccagcgcggggttgtgccttcggctttcccttcttctccagtgttcttgctgttcctcgcatttgcctctctcacagtgttccgcaactgactggctgacggacggactgcaggtggttgcgatagccgtgttctcggcactgggcttcgccttctatgtcttcttcgtgccgttcgtggggacgaagccgttccagattgtggccatggctatctacactccgttggtgaggttcctgccttttttcaggggttaaattcgctagtatgcatagatctggagtagggtgtttgtttcgctgccagccctctcgtgctttacagttcttggtatctattgcaagttcaggcactgatagagaacgtcatctgctttgcatgtgttgcgcatatctgctgtaaaggaatgatgatgtggcatccagttagagcgtatagtataattattcacttcagtgattgaacgattttacctagacaatgattaatgtcttcttttacagattacatgtgtcgttgtgttatacatatggtgtgcggcaacaaatcctggagacccgggcattttcgattcaactaagaatttgaagttagataagcatgaaaagcactcctatgtaaattcggaccagggaattaatcatggaggaaggccattaagtgagacttttggtactgctgataacagtgagaagctgagcagcatgcttgagaggaaggattcgccttcttggcccagattttctggaattctttccctggtttgtctcccattctcttgccattgcaaacaatgcctccattcagacagtcaaccttcagaacagaaaatgtgtgaagaaggcatgtttttctgcagcttatgcgaagcagaggtattgtgatggagtcattttcctattccttgtagtgcactcatgtactctatatttcccttgggggctattcaatacaaacaaatgctattgataacatggtatcagattagtttttttctttttgtcgagggttctatctcctagctgttgcttatattcatgcgttgcacttgaatactcatacctgaacatactgtcctgttgttcaagctatactgatctgcaagcttagtttttaaggtcacctaaaaactatgcagacaatttagtaaaaacttgcacagtgagttttacatctttcagcattttatgctttagcttggcatgtgcttatgtagttcatgtttgtacttcaaaattttgctaatattcagtttgctgatcagtaatcaatagagctttgacagactaactaatctgtggatgtatgaacttatgagggcaacccatgaaattcagggctactgtagcaaactatactgaattcagataagcaggatggctagtggtttgaatcaaataaagtcattcaggcatttttctaattatgctccaaatttctgattgaacggttatagctgaatggaaagtcactcttctgatacttttgtgatcttgattagtgtcttcattgtttctaacatcttatgaaaaactagcataattcttcgccttttgatttggatctcactcccaggttctgaagaacagtaagcattgtagagtatgtgacaagtgtgttgatggattcgaccatcactgcagagtaagatctgttttttgttatgatttcccatgatactaaaaaatatgattcctcacaagaactatggtcttatttcctcacaattaatggacttgttttgcctgctgcctctgttcttttgtagtggcttaacaattgcatagggaaaaggaactacaaaggtttcttcgctctaatggcttctgcagttattctggtaagtgtggatctcttgacaaatgacaaaactgacacaaattggaatgtaaagacgacccttgtgttattgcatttaccttcaacatctgcaaccaagtggggggcaatgcatatagttagcaatgttgttccgcatccttcctattctggtaggttattgacagatctccatggtttgtacaacttgatccagcttgtgatgcagtggttgtcgggggcacttgtgttgattctctgtattgtgaagcgaggagaattctctaggcaggttgtcacaaagttgggaagcagcttctcaactgtggcttttgtaattgttgtggtgagttgaacagtttttccttcttttcattatcaaatatgtgtctgctgcattgaagttcatataatttgttagtaaactaaaacagttctgctatctttgaaaaaggttacaagattggtaacaggatgtttaattttttttgtaggcgacctgcaccattttagcaatggttgcaaccgtgccacttgtccagcttttatgttttcatatccttcttgtcaaaaaggtaagttcctcttgaggttcaattggggactccttgaatgacatcattatcatacaatagcaataatagacgtgcttgcaattttcattttttgtggccatctctgttatctactttcctgcttcctggagtgaaatggaccgcttgatcactactattttcttgatccactacatggctattgttatgaaactcaaattaactattcccttagtaagaaacaagaagtactcctcctttgtcccactaatgatagcacaggagtcgattgttttggtcacattttctgctgaaataagtcagtcacatattacgggttaactataattggttagggagttttgcaagaaaagtagaaaactttgtgcatttattattattttttcatacaacttgaggttaaattgcagtcctcttcatgtgtgtccagggaattagcacgtatgattacatcatagctttgagggagcaggaggatcaacaagaggttcctggacaccaaagtccacagatgtctattattagttctgttactggttttagcacagccagttcttttggacctcttcatcgtggttcatggtgcactccaccaagattgttcctggaagaccaggtatgagataatcactcatgtctgtaaaaaatcttatgcggccaatgggaataaagatcttggatagccaaagacaacacgctgtgatacatgactgaatatgtccggatattgcatgtgttgttttgttaattggctgaatatgtcctcatttgtgttctacatataaaaccaactgaaatcaaacttcactatatgtgaaaaagacttcttgatagtaacatctgaagcttcaagtgcttgcatttggtaggtgcttcaagttatcatgattcatgattagtgaagtatgctaaatttgttttcaaacaaatagtataatttttgtgtgacaattggacaataaatcaagactgtagttccccttcttccatctttagcagttgatacttattgcttgctcctctcttccacagttcgatgccattcctccagaggtcggcatttcacagaattcaggcagtaagaaaatcaaggaagaggaaggagcaaggagaaaaaatggagcagtgaaaatcagtccatggacattggcacggctaaatgcagaggaagtttcaaaggcagctgcggaggcaaggaagaaatccaaaatcctgaaaccaattgcaaaacatggcatctcagacaatggcagtaaaccagaccataagctcagctaccagagacgactagatagaagaggtttccctgctgagctttctcttgacccacttgcaactctatctgcaagcggcactgaaagcaactacagcgacacagcaacagaaatttgtggcagtttagccccattacagctcgaagcaagaagtgctttccagcctagtactgcagcatccacaagaaatgttgcttcatcgcctgaaagtagctttgactcgcctgatctccaccccttccgcacttcctcagccacaggcgatgagatgcagggagccatgacacattcagctcacaggggcatcgagtttaaaagatcatcgagcgatggttatgaagcatctggaggtgaagatagtgaccgcatcccttcaagaatcgtgcacagatcgtcgaactgggccaatgtctttctgaattctagtcagggaggccctcaagctgatctgctcacgacatcatctgaaggttttttagttaacgcaaatgtctcgaattctggttcctagagcattactgggtatggcagagcaatgttgacaagacattgactagtctctgggcttaggtttaggtttaggtgcttaatttgtctgattacatgtggggatttggactagttctaggggccaaattcatccggttacatgtctgtaaaactgctttcactgctggcgtcacttctttgacattccattgtcgcctttgacaaaatgtgaatttgacgccgttgtgcttgccgagcttgatccaaattactgtttgtcgaaatctcacggtgtgacgctgccgtctgatcatggtaagcagtggaactcgtatatatagggttctgacaatggaactcgaatatctaaggttctaatttgttttgagaaccacttgttccggcgtcagcaacggagcacaaagaccggtaccgtgtgagcgggtgactgaccgcacggtgagcctggaagcaacaacaatttgtcccgggttgccgatctggagcccgagcaagaatggt

SEQ ID NO: 4003 - DNA, 7435 bp, Sorghum bicolor
cactaacaagaatcattccttcaaacttgatgccaataagaatactaggaaagagaagatcgaactaggatgactcaaagtgaagaagagtaggcgtgtatgctccccaaacttggcaagaagtatcataaaatacatcccaaaaaagaacaaaatcaagccaagaaagtttgtgtgagaggataatgatacgattatggtgaaaatcctcggggctccccgacaatcgatgaggtggttagtgccccaccatcatggagcttggacacggtactagcatatgccacatggccttgggagagaactaaagttgtggcctagatcaaccactatatatgtcttacaaaagaaaaaaagaatacattagctatgctagactcctaaagactaatttgggagcccaagattagttcggctcaactataactctcaactaaactaacataaactagttaaagatagctaatgaaagtaattctttcttctttttcctacgttgtgtgtggagactggagagtggcactgaggccctctatagcgttggcttagagtgatgctccaaacaaacagagagggtttgagcatcattatgtgcactgtaagtaccggtgcctaagctagagaacttgggagcatgaatgtgcaagatgcaatgctcactgattaaaagtatcaaaaaataaaatacatgctcttcgtctccaactcaagttatcgtggcttttattgtttatatattttacttatattgtaaaaagtcatggttgaaagtattgttcgctaattttattgtgagagaaaaatattgttgaatgactgacaaattcgagcgaataaggtatctattgctgcagttcaaaatgagtgatgcacgttctcttatgcggatcacttttttgttatagtgaatggagcagagtacttatagattgaatgattttattgaattcagaagaaatatatttatatgctttcgcttgagacgtcctttcttacgccagtctcagtagcccgtttcaatgcactatttccaaaacaaattcgctgacagggcatcaatgaaacgaataatgaaacaacctctacaatgcatgagtttcaccttgacatttcctaggctgtgcaaagcatttaattactgcaaaatgattggatcacatgcaagatggtgaaacgatttagccctcagtggggatttcatcccgtttcaccgtgtgggaaacaacgcccgcagagtttcaccatggtgaaactatttccttccctctcctcttcgttttatgcaaaaagtgtaattttactaacatagcgctctaataaatgtacatgacattctggtgaaacccccactgagattggcgttagcttaaggccttgtttagatgcgaaatctttttggatttcgctactgtaacactttcgtttgtttgtggcaaatattgttcaatcatagattaattaggatcaaaagattcatctcgtgatttacatacaaactgtgtaattagtttttatttttgtctatatttaatagttaatgcatgtgccgcaagattcaatgtgacgagaatcttaaattttttttggttttcagggtgaactaaacaaggcctaagatagggggagggggggcaatagtattggttccactgctgcaattttctttatgtcgagaaaaatgtgtcatcgagggtcgtctacaattgcagaacctttgttcaaccaatggctacggttcagaactcaaatcgtacagtaccattcagatccactaacacagtgctctgccggaatatcccaaactccagccgggatattccgtgcaagctcagttatccgccaccgccacgttccctgaccgttatcggcacggcacccagagaaagaagcttccgctctgcccctcaaggcctcggccaccggtatccgcgccagttcaacccccgcgcccgcaccccggtgcggcacggatcccaccgggcgcggcgcacgacctccacaagtcagaacggccactgcccggaaatcgcccgcctccgctccgtccgctgcgctgcgctcaccaccacaccaacacattgcccacctcctccgacgaccgtctgatcggcatcgccttcgcctccgctaaaagacccgcggtccacgctcccctccaaatcccatcccatcgccataaatctcgccacgccgtcgcccgcgcgcgtctctcccttgtctcttccccccaaccactccgccaccggcgccgaagcagagcagccatggccggctccgagcagcgcgtcgtcgccgtcatcatggtcggcggccccaccaaaggttagtgctgctagatctgcgccgcggaacccctcctcctccctctgccctctcgtctgatcggtttgctctggtgctggtgtcgggtgcagggacgcggttccggccgctgtcgctgaacgtgcccaagccgctcttccctatcgccggccagcccatggtgcaccaccccatctccgcctgccgccgggtaagccaccaattcctgcgctcccttgtcctctgtggaattgtggtgtttctatggttcagcatgcagctcgtatgaaacaagccttttggatcccattgctgcagatccccaacctggcacagatatacctcatcgggttctacgaggagcgggaattcgcgctctatgtctcgtctatctccaacgagctcaggatccctgtcaggttcgtttcgtgccctgatgatgtttgcttctgcggtgttgggctggtgcgctaggagatttcagagccgtgccattgacagggtctcgccaattttaggtacctacgagaggacaaacctcacgggtcagctggagggctctacagctttagagattatatcatggaagacagtccggtaatgacttagtgccatattgtcagcttgaattgaaaattggatatttctaaagctttattaatgcagtggatcacttcatccacatctttttgaatagtgtttgcttattcagaacacattcagcagctgggtttcttaggaatctactacattgctatactggttggatcaagaaagtttcatcatcctctaaaagttggttactgtttttgcttgccgttttgcagtcacacatagttctgctgaactgcgacgtctgttctagcttcccccttccagacatgctgggtaggttgccaagtaactgaagcattctttcgtgttggtttgatttttaagtttagcgatggtgtttcatgatcttagacacaagcatggctagtgtaatatttgaacatcatgaggttgttctttgctttgctgtttagaatgaatgataagtgtgtccacttgtcactagttagactaagtggaatggaagtgtagctggctggtattgaatccaaagctgagcttgtcattagtagcttgtttttggcatattcatgggttacatcttatagagatgcatccacctctaatgtacggtattgtacataaggtcactaaaattatatcacacgctgttcaatctgtgctgcgacgggtgtatgctttaaagtattgttagtatagtgcataggcaacaatgaaatgatcgaccattatgtgaatcaatggtaaataagttcatcaattttaagtgttctgtacatggacggttcactccaaaagagtgttttaaagataatttagatgtgccgatttaatttatcattggacaataagctcattctcacaaaagggtagattttacatctccattcatccaaattcttgggtttctatctctgacataagtaatagtatgaaacagatattttagcttctgactttttttgaaatattgatagaaatcaactgtttattcccagatacttcgtcgttccttttttcccattccccttctatattgctgcacaataggcatctgaacttttattgattttccacctatagttttgttgattagagaaataggagatttaagtcaaacttgcccaacaatagtaagtgctgcacttttaataagcacctgcatagcttcttgttggatacccacagctaaatgtatcattgttttcatcattgtagaggcccataaaaagtatggaggaatgggtaccttactagtcaacaaggtatgctaatactattcgcagattaatcttgtctttctcatgcataattgttactcttaacatcatcccacctttaatattctatgctaacactttcaatcaggtatctgcagagtcagcgaaccagttcggcgagttggtagctgatcctgaaacaaacgaactgctgcactatacggaaaagccagagacttttgtgagtgcagttctgctcttgttgctttatttgcttgtctatatattttcagttgagctttgcatgccacatttggctctgaaatcattgcagtcttcagaagtaatggctctcaatgagtaatttgcatagctgatagcagtaatgcagttttatctatttgtaggtgagtgatctcataaattgtggagtatatatatttactcccaatatctttagcgccattgaggatgtcttaaaacagaaaaaggacagaggtattgtcccctgctatattacaacgtttttcctttgaaacatgtgttattgtttaaaacaaaacattctttgtttattctattgcttcaaatgtcaacttctcttaactaagtagatgtaaatgccttctttacttttgatacaagtcacttggaaaagttttatttgctttgcctatattcatattcttaatattaattctcaaatggatgctctaaaatgtattacttgtagccagaggcgaagctacaagtattaccataatattcagtaaagatgagtctataagtagcaaaatacatttttaccatagtgccatggcaccagggaacttaaactaggcttcgccctgcttgtagcagatattctaactcgatcttctagttcccttgattgacagtttaattcaccagcacaagtttaattcctttaaatgctacatttcagcaaatttgcggcgtgtatctagctttgaagctcttcattcagcaaccaagtatgtatttgtgttatatttttcatgttttttttttacaaatcttgtttggcctgcagttatcctctttctcttccccattatgtggaggttcttccagaaactagccagtatatataattgatagcacttcggttaattcaactacaaagtatttattattatgtagaccttataagcttaatatcaacagggcgcttccaccagactttgttaggttagatcaagacattttatcccctcgagcgggaaagaaggagctgtacacataccagacgcttgatttttgggaacagatcaaaaccccagggtatacagatttttttttcatgtttttttgtaatatattggaatttctgacaaaccattgcttcatcttgagtaggatgtctttgagatgctctgggttatatctttctcagttccgccgtacctctcctcatcttttagcctcaggagacggcaaaagaactgccactattgttggcgatgtgtatatccatccatctgccaaggtgcatcctacttcaaaggtaatgtctgtttcatctaactattttggtcagattatgatggatcatattcagttcgtggttgttgactgataatgaagtgcttaaaacttttaaatagggggatctatttaagaaactaaatgtaactaatcatgtaactctataaacagattggccccaatgtctctatatcagcaaatgcgcgagttggagctggtgccaggcttatcaattgcataattctggatgatgttgaaattatggttggttttctctatcttttgtacgaagtgataaacctcaatttaggaacatgaatatctcattgtggtattatttcattctttttcatttgtgtatcaggaaaatgctgttgttatacattcaattgtggggtggaagtcatccattggaaaatggtcacgtgtacaggcaagcttctctttaccatttcacttttattcatttcaaatttaatgaatcctcatttcgtatgaagcttaaaaacttcgccttaggactctttgtcaagttcagttcaagcagcatgactgcatgagcaatgtcctagtgttacaatgttaattctttctctgccaaggttatgcttttgtaatctgaacatttcagcacatctagttttcttgaaatgacgtttgatactttcaattgcaaagctaatacattccaagtgacatttgcttgcaaatagtttagttatgacagtcaaaattggtgtgactgtacatgcctgtgtggtctactttttttcttggcacatcagctggcttcatgtaatgaaacttttgttctgaattcagggcgaaggcgatcacaatgccaaacttggcattactattcttggtaagacccaaacttgacgattttctgttgcctttccactctttttttttgggtgataatttcgtttgtggaattgacatcctatcttaacacaggtgaagcagttgatgttgaagatgaagtagttgtagttaacagcatcgtgctcccaaataaaactctcaatgtcagtgtccaagaggagatcatcctataatagctgtcatttttttttgttttatcccaaataaggtctcagtaccaatcacatagtttatgcttattcgttctcaccttgtaatcttccattagattgatattattagtttgtatctatacccatcttgcagcatgatactgcacaatattgacttgctatgctactttggttagcgagcgcggtgatgtaaaaaatgtacaaacaggtgacaccaattttgttgagaatgactgaatgaacactttacatcaaatgctgagttcaactgcgtgttgtattttttttaatgaaaggcgtgagcagctggtactggtctacacaaacttggaaactcaaggggctcaaaatttttagcctaatagatgcacgggtctccagtctccacagcccacaggcctggcgcctgagacacatatctctccttgcaaggatgaagatctgtgccagcagttgcgtttttaccataaaaaatcaggctgctgttttgtgctctcattgcgtagcaactagcaagggtgtttgtcagttttactactataatgtgaagtagtacgtaggccaacttaactgcctttcagaatacaaacgccatactgttcatcagtgctaactgataacacccctgtacaaatatgcaggcaatgctaagaaataagatgacttgcgttatataatttacatggcatgggctagtgctaactgataacacccctgtacagaaagccttcaattgcacattgtaccaaaaaaaataccaatgcacag

SEQ ID NO: 4004 - DNA, 4601 bp, Sorghum bicolor
tctctatttttcttttctcctgtctatgtggaggaggtggacagtggtgtgtataaaaagtcagcatccggacagtagcgctcggatcggacgtccggacgctagaaatgaattgtaggttcttttgttggcttgaggtgggcataggactgatgtattgaacagccaagcccaagcccatgttgggtccatagcattttttttttcaaaagcccattttgctatttgacaggccatgaacaaagctaaatgtactgcatagtttgttaggtgattaggtcctctgtatatcggtctgtctgtctctaaaaaaaggtggaagaaagaaaggtatgctgttatgggaactcaccaaagcgtatccatggcggctcttgccattggcctcctaagcagtttgttctgctcgagtaattacccacagcattgtttaatcacgcttaatcaagtacaatggctggtgcctgtctatcagattaaaggtgccttttattcacattccgttctcctcttttcttcgatctgagtggacagcagacagcatgcatgcaaatcatactcttcacttgaaggaccacaaggaccacagtgcattcttgctacgcatcactgttccctttctgagttggaactccactttcagaaataaacaaacaaataaaaaaggaaaatatagtactcagatcctgcccttacaattattcattggttaacctgtgactggaacatcacttatatataattggagtatctataacagacttgagaaacttgcgcagtctactactcttagctagctagttgtggctcatactaatcagatccatcatgcattgttgttaatctattcccctgggtctctagtattgagatcaagcttggttgaatgcatgcttgaataccttctcacgagtctactagcatagagagaatccatgttgattcgcattatatattagcaagaatgtcagccaataagcaaatttgctgtgtcattttaaaactgataagcttgacgggatacatttttattttaactagcttcctcgtatttgtgtactccttgcaaatccatctgtcttcatactgtaaaaaacggcacagttaatatatatatatatatagctgctactccaagctaatcggcataattaaccgagtggaatatatctcacacgcgttggctaccttctttaggtatttgctggtagaaaggtttggttaaactaggctttgtggggattaacagccgcaactttagaccttcactgcttcgcaaattatcgcaagtggaagctggaaagtatatatgcatgttcagcttatgaagattaattagtgcatgcatggacacaggttcggtcaaatcagtcttctcccggcccggctgcgaacgaaagcgacgcatgccaaatctctgtcgactgattgggcggaactgaagcacgccacgtagccctactgcgctagtgccctgcttgccggccggccggccctagctaattgctctctcaatgcgacttatagtgtcagtcatgtgatttgtcctggaaggatactttactgtcagttaagacatctgagtcatctgacactaacactagctgccaatccaaattaaactcggcgtaaattttaatctctgcaattgcaacctcgtaccgtcgagtgcacaaaactatgcaggttggcgagcgcaatgaaggttcctgcagctggaggtactactgatgtgttaagtttctcggacacgacagtattatctgctcaagaaagttctctgttttgggctgatcatgaacatgtacataaaagaaggcttccctctttcatgaaaagaagttaacaatgacttaaaaaattctttgcgtaaattgactactaattgcatatctaccatccactacttacgacacttctacaaaaccctactctctcagtcctgccttcctctctcttctttcttctacatccctcagtttgcacaagcatagcagataatggagctgaacactagaaccagcaagggcaagggcaaagccatggccaagatcctggaagaagaggaggaggaggaagaggaagatgacgacttcttcagcccaagcggctgcgggtgcttcctctgcgccatcaaagagccggacgcccggctccgccgggccagcctttctgccttcttcagggagctaccatactgcgacgatgacggcgggaccgccggcgccggcagcaatggcggccagtcatgtgccgcggcggttggcgccgtgtggcgggcggccatgtccgcgcccgatgaccccgagctcccttcgctcggcgcgatccggtgcatgtcccttctcctcgcccgcgcgctcgccgacgcggcgtggcttcatcgcggcgacaacgtgtacgtgccgtactatgccgcccatgtcatcggctcctacaccatccgctcctccgcgcacgccgagctggccgtcgcggccggagccgtgcgcccgctgttggccctactcggcggcgccatgacgtgggtcgagcagcgcgcggcggcgcgagccctgggccacctcgccagctacgagtccacgttcccggccgtcgcacgccacgccgccgaggcggtgcagctcgccgtgcgttccgcgtccacttgcatcggcgacgtctacgccaacttcgtcgcgctggcaccgagcaggcggccgaagtaccagcgcgacctcatgacgtgcgggatcggcggcggcgccgacgccgaggacaggaaggcggaggagtgggcgagccagctccagtgctggtcgctctacttgctgagctgcctcgcctccagggacctgtcatctcatgccatgatatgccaggacgtcttgttcttgagcgagctgtcccggatgtggggcggactggccaacggcgactcgcccgccggcgtcggcttgctgcgcctcctctgtaggagcccagtcggccgcgccgccatcgcggcgtgccgcgatgcgctgtccagtctttgtgacctcgcgcgttcgtccgatgactggcagtacatggccgtagattgcttgctcctcctcctcgacgaccgcgccacatggcacgccgttgctgatgcaacggcgccgtgcctctctgacttggtcgatctccggcacctcggtccaaggcgacgactcggagatgccattgcaactgcactgctccttgatgacggccatgtcgtcggtgaccgtgaactaggtgcggaagcgaaaagggcgatcgccggcgtgagagagcagaagggagagaggaaggagagagaggaagcaatgcctagggatgagttgctgaagagagagatcttagccaaggagaagaagaggcaaggcaacgacagcttcatgcatggcgacgtggacaaggccattgatcattacaccgaagctttggagctgtgccctctgagcaggaggagggagagtctggtgctgcacagcaaccgcgcgcagtgccggctcgcgcggcgcgacgccgacgcggcggtgagcgacgcgacacgcgcgctcgcgctggcgcggccggcgaacgcgcatgccaggagcctgtggcgccgcgcgcaggcgtacgacatgaagggcatggccagggagagcctcctggactgtctggccttcgccggagcgtggctcgacggccggaagcaccctcggagggcggcgcgcggtgcgaatccgaagctgccgtactgcgtcgctcggatgatcagcaagcagatgagcgtgacgggtctgttcgccggcgtgacgatgaaggacaacaaggtggggagtgatgatttcatgccacggtgcagcgaaaacaacgacggggacgatgaggacgacgaagatgatcgggatgatgacgatgaaagcgatgaggcagaattggctgataatgctggtttgaagatgtgcacgtcaggttagttagcgatgaagttaataaattgcggcgttacaacatttttggtttaaattgatcagttgcattatatggatcatgaaatggtttcttgaaccaggaagagagttgccaatcatcacgggagatgcttggacgaggttgtcccggaggacataaaagcgcattctgttagctattactcatgatccaccgtcgtaagcttgctagctagttcactgataaatgcactgagaaattagagcttcaccgcgactagttagatagagtctctgatcagtgcaaatgcaatcgctaaatgttttgtgcgcattgtcgcttctgtttctgtgtttgcaggctcacatgtttgtgttaatttccaataaaaaaatggaagtcttcctaaatttcttagacaagagaaaatgatctaatgatgaatggttacaagtgtgccgtatcaaactggatttacacataggcaacacattgttgttacaagttgtgattctatcatgtgattttatgatcttagtggattctacaattctattaagtggaatacgcaattttacgattctaatagttatgatcctataattcagtgtcctacccattggggttccgatctgatttaggattgcaattttcacaacgttgcattgatgcgttagaca

SEQ ID NO: 4005 - DNA, 3924 bp, Sorghum bicolor
gtgcctgtaatttgaggcgacccgtgccgatttgtttatctttcctcaacgaacagattaatcatcgagacattgcagagagggtatgtgtccattactagctcgctcaacacatgaaaaaaaatcgtagtagcaaaatatcctcagcttaaactactgaacaaatggtgcccaagatttgacgcgtacaagtactgcggatataagggctaatacaaagtgtggtgtttagttgtccatttgcacgagttaggctatctcgagaatctatttagttgctcgcatgagtgagttgcatgagataaaaatatataaataattattatcatgatatttattacatgcaactattatcttatagctcttagtttatcttattacttcttaatattaatcgaaatatgttagtattatttaatacgtgccaatcgtgcattaataacatcattagatggctaattacctgcaccacgtgaacctaacttggcagaaatgaccgatttctgcgttcctccaaatcctggctgcggggattctttggacgcgaagagcctggcctaatagacacgcgaaccagacacacatcagttctcgcacccgcagaacgtggccccatattgggacaattccaacagcttaactatttttgttgtggagactattttagaacttgtatgacagaaaaataggttcgaacaagatatgttatttggttttgtaaaatataaagttggttatctctttattttcggtggtcatatacagccaactactagcactagctatctgattttgtaagataacaacgctgttgtagtttgcttcttttttaagaagttatctattttataaaatagctcaacaatgaaatttggctactaagtttagtcaagctcttgaagttgctcttacacttgagagttaaataatttgatttttaataaggaaagtaccgtggaattttcctacaaaaagtaccgtggaactattcaggcggggtacagtgagaaaagaacggtgcgtaatgcatgtcgttcctcaaaaagagcagcgaatgggttacacaaagcttagccatatacattggtacgtgccggcaagagacagacaatatacgcgttcacaatttggaacgaggagactagaaaataaacacacgcacgaatgcagctaaactatcatatgtttaccaattaatacggagtagaagacaatagaatgatgcccggtcagtctaagttataggcagcattgcagcaatgcaaatgatgcccggtcacacgcacgcacacaccaaacaaaaagagaaagttagttgtgaagtccctatatgtgggaggcaaagattagaatcaatgatatgatgaagcaacaaaaactatatatctcctccttgcgaaattataatggcaaagaactcttccccacgatctcgccgacttcttcacgaccacctcgttctttattccccaaccacagtcctaccatccaagtctcttgtttttgtcatccaaaatgcaaatcacacttttaagactaccactgtacattactctagaaatcacccaatcattcctgcctattgcagccaattattattcatgtaatcatctggattctcaggatcccctcattgcccccatttcgttatttgcccccacagacgaaataatcgtgtgtgtttttaactaaattttgcgtctcattttcctattacatcattgcgcgattttcagcagttttagctgtctagtctagctagcatctccaactggaaatataatgctttctcatgcccagaatgcttcgaattaaacaaacccgccagtctgatgttgaaggcgcaaatggtcagacttgtacgcggcaactagatgtttaactgaactgaaaactagaagctgtgccctgtgctagtgctgctactataaattcagacacgcccaacctcatttaccagtagctaggccatcataccaactagtaccgaaggaaaaacaatggagtcctccgaggcgagctggcactcgttcgatccgtcagtcgccgtggaggactccgagacaatggcccagctgctcggcgtccagtactccggcaacgagcagaagcagccgacgccgacggccatgtactggcctggccaagaaactgaccagtactacagctcggcggcgtacccgtactacatgcagatgcagcaacacaactcgggcgcaagctgctacgaccatggttactatggcagcaacacgttcacgatgaccggcggcgacttcttcgtgccggaggagcagatcatggcggcggacccgagcttcatgcttgatctgaacctcgacttcgagtaccaggacggtgagggggccggccgcggctgcggcggcggcaacacgccggcgataggcaagaggaagcgggaggaccagaagggcgagagcaccacgtgcaccgttccaaagaagaaatcgcgatccaccgcaataccggtaagtgtgcatatatgccatgccatgaactcgtgatcgtaggccatttcagtgcatttggatgggctacatgcctgacggacggagtgtccgtgtgatgcatcatcaggtgcagaagaagggcaagaaggcgcagaaaggccggtgcagccgaggcaaccaggaggagagcaacggcggcggcgacgttgcacgacagcaacagtgctccagcaacggctacctgtctgacgacgagtcgctggagatgaccgcgtgcagcaacgtgagctcggcgtccaagaagtcgtcgtcgtcggcaggtgggaaggccagggccggacgtggggccgccatcgatccgcagagcctctacgccagggtaacgagatcgaaattctcgctcggcaaccgcgatgatgttgcatgtagtttcatgcgcttgctctgcctgctgctgtctgaaagtagattctgaagttttttcctgcttttggtgatgcagaaaaggagagagcggatcaatgagcgtctgaaagtattgcagaatcttgtgcccaatggaaccaaggcaagtttataccagtggcttgagacgaaaaaagaactcgcaatagtttttctgaacgctgaaaaagctaggaaaaacgagccgttctagttctaacgtatgtacggccgtgttttttcaggtagatatcagcacgatgctcgaagaagcagctcaatacgtcaagttcttgcagctccagatcaaggttggttcttgcaaaattctagcccctagccaaaatcttgttggtgtgagcgaaaaaatcatgtactagtattcaaaacttttttttttttgttatgcgcagctgttgagctcagatgatatgtggatgttcgctccgatcgcctacaacggggtcaacgttggcctcgacctcaagatatctccaccgcaacaatgacgatctacgccaatgtgaagattgccgatgttcactggcaaaagcacatatatagattctttcgtgtttgtatttttgtttcttgttcttgaattcatatatatgtaagattcaacgctaaggacagtcggttacaatgaaccacttttacactctaaccagtggcctcctcgaaaaatagactctgaatgacctgactatttataatcttattatttgcccaagatcaagggcaaactaggagcaacaaatttccttccaagtgaaacaattctatggaaataataagattataaatagtccaagcattataatctagtacctttatgttcacaattacaaaattctttaatgaaggtggatattttttattaatggagaccggcattgtagccgtctccaatcaaaggcctctattagtgcggattttttttaaatcagattattagtgcggattaacgaaggcgattgctttacccgtttcgatttgatctatttac

SEQ ID NO: 4006 - DNA, 5753 bp, Sorghum bicolor
gcccacttcaatggactttcgctcgatcgttccttccttcggtcctttccggataggaaagggaggccgttcacaaatgcgctttccttgtcgagccgatggaacttgtactagtagtagtagtagtaacaaagcttaaaagcatccagctttttgtatccgagctcgatcaactccaaattcggatatcagaacatggaacagggcatgtcttgttcacaaattctttttgaaataatgctaccctgacgagcaggcacgtaacagtgacatcaccacggcccgttcttcaggttttctcatcagttattggaccacattttctggcgtttcatggcgaggtcctcgatcagatcgttttcaccaaggataaacgcgcacaatcatcaccgacatgtggggcctcccggggcccaaatgaggcccggcccagtacgagccctcaaaagcatcgcccacacggcacaccacctcccattcccatttcttctaaaaaaaaaaaaaaaaaaactcccattcccatccgcctaaatccccttcacgtcttcacacctcaagtagtcaagtcacaccagcaagcagtccaagcgcccgccaaccggccgctgccgaacccgcaacagcaacccgcctcctccaggctgcttccaccgaggcgaggcgaggcgagggcgaggcacaccgcagtaccgcacacgccagacacgcacgcacacgccagggcgcggcgcaacaaacactccttcccctcgtaagcgtcgtctcctatttgcacttcgcggtctcctcggctcgccgcctcctctgctggtgtgggattcggcgagcgcggggcgtgggcgcgtggactggagcgcagcgggggggatccatgcgtcattgggatcgacgactcctcttggtgagcagccaaccctagcttgcctggacgggaacttcctaccgctgttttttcgcgattctcctccgcgtggtttttccctgtagatgtttcggctgcattgagcaatcgcgcccggagtctcctgtatctccgtcgttcgttcagttcaggatttgttttctgtgtcatggagggagggaggatcgacgtggtccttccgttgctctgcttgatgcttgttctgttcgaggaggttcgtagccttcttcggaattttcacgctgcgtaggatttaggatccgactacccggagctcatgtggtggtgtagtttaatttctgaaatacgatcgaccttgcgattttagggggggcagcggtcctacatttctcgggagcagtaacgggagattgtacggcgcgccagaattctgctgcactggctgctcttgtgttttatgaggtgcaaatagtgtgtgtcttgttgccatgcaattcatgggggtttatcccattctctttttgtccttaatgatttatccaatttttccttgtttgttttcgggggtttggttggttgagatatatggaggatggaattgatgtctctactgtctgctgcgtagtggggccattgctgctgatgacacttgacggtagctttgggcgttgctgttcttggcgtcttgtgagattggtgcgtgttacatctgaaggaggtgatgatgtttgtaatcttacatggagttagtacttagtaggagcgcgagtgcaaatggttgttagcctagtcatccagttctgctctactgttgtgtgccagaaactctgaacctcccttgcgattggatattcctataaatggtgctgtacttaaagaggaaaaaaaacgagacgtcactctaacttgagaaactaaaactagagaactgctaaatctgccatatctgacattttttgctctctctttatatggagctttatgtgttttctcatgattttcttgcttagtatctaattactgcacatgcactgagacttcttatttgtcattgctaggtcctgcagtctacctgattgaattgtgtcctgacagaagatccctgagagctagagctgttttttttccctacattaagttaaattatctggcagccgaagatgtccgcgatcatgctatgtacctgcagccgggaccagtccaagtttgaagatcttcctcgatcaccagaatctcttgcaacacgtgacttttcagcgaattgttcttcttcaaagatggcaagtcgagaaacaactcctgatgatagccaagtaaatgaagtagaatcagacctaaaagaaaccctttcactaaattatgaggtttggctcaacacctccgctcttcaaataagataggctgtcttgcaacgatttgctcactgtctgatttatttgctaatgtaataggaggcccgagcattgctaggtagactggaacatcagagagggaactttgatgcagcattgcaagttcttcaggggattgatataagaagcctgagaccgcgaatgaccagtgctattgctgaaagtatcaagcctagaacgcccccacgctcttcaagaaggaaatcttcacaagtgaatggaatgctcatgcatatgtcaatgcattctgtaagcttgcttctagaggccatactgcttaaagcaaaatctctggacacccttggtagagtagcaggtattaactggctgtttgttcaatgtgctttcttgtcttgtacttgagcattttaatctgaaatctgtacagtacctccagaaccattgcaaatttgctgttgtgctatgtatgtggatctagttaatttgttttataaaataaactgaaccatatgtatttcaaaaaccgaagtctgttatgatagtattgataacttctgcgactcaaagagctttgttgcatccatctgaatttttcacctcatgttaatatgctatcttgccatggcagatgctgcagaagaatgcagaaccatcatagacattatcgagtctgcatggccatacggtgttccggatggtactgctgaagagtgtaagctaatagacatattccattcggctctagaatatcttcctaagctgtggatgaggagtggttgttttgatgaagccatcatcgcatatcgcagagctcttgcaaagccgtggaatctagattctcaaaggtccgccaaaatgcaaaaagatttggcagtgactctgctgtattgtggcgttgaagtgaagttccctcaagaatttgctcaggaaaggaatctggtaacccctgggaacaacttagaggaagcaattttgttgttactcatgctaacaagaaagctatctctccgagaaatacaatgggatcctgaccttgtgaatcatttgatgtatgcactctcattatctgggcactatgaagttttggccagccatcttgaaatgctgttgcctggaacctataccagatcagagaggtggtatatccttgcactttgctacggtgcagctggcatggatgatagtgcgttaaacatcataaggaatggtttttctgtgctggagagaaagggaaagcctcatgttccatctcttcttttaggagcaaaactatgttgtaagaacccaaagcatgcttctgaagggataaagtttgcaaataaagctatgaagtctttcggaagacgtgatctgcatttcatcagcactgcaaaacactttctcggtgtttgttatggacctttttctaggtcctccgcctcacacttggagaaatcgagattggaagataatgcactgaggctgctgcaggatgctgctacaacagcaaagtataatcctgaaataatgtatagccttgcttgggaaaatgcaatgcagcgcaaactcaatgcagctgttgaaagtgcaacagaatgtcttgagatggtgatgggaggttctgttagtgcctggaagttactaattcttgtactatctgcacaacagaatttgcaagaagctgaagcagtagcagattttgcaatggatgaagctgagaaaaatgatcagttggatattttgaggctgaaagcacaaattcaggcttcccgtggacagttcaagtctgcagtggaatcttttcgggttttgcttgccagtatccaagtaaagaaggacatctggaaatcgaccacttgtaatgaggtacagtcccctcttctttattttgaactccaacagcgataccatgtttcttctttgctcattatccacataatcttggcaggttaaatgcctacagaagttggagatggactcatggttagatttggcatcaatctactcaaagcttgaggcatggcatgactcaaacatctgccttgacaaagctatatccattaatttcttttatcccaagtgttggcatgtcagaggtaactattgctgaaacttgagactgctactgtctgtacaaatattgagctttcagtgaatcctcatccacatgctatgatcaaaccactatgctcgtttttatcaaacattaagaaaaattaaaatgaaatcttgtaagcttaaccattttcttctttaggtggacagtgtagaaattagttttatctgtatttacttaaatttgcctctggacatcaagaaaatagggtagttcttgaaacataataatattgtgcttttgtgtccctaacagtaaaacgaatatcatgttccatgaaaatgaaatgcatatctaggactgttatattttatataactactattattcgtctcatgggtctagattctttccaggtcttctgttggaggctcaattcttgcacaaggaagccctgatggcgttctctttcgccctctcaattgacccagattacgtccccagcatggtttgcatggcaggaattctccgagatattggagggaattcgctatcaattgcaagaacttacttgcgcaatgccctccgtttagagcctacaaaccaccgagcttggttgagtcttgggcttgtcctgaaagctgaaggatcgctgcaggaggctgcggactgcttccaggcagcatatgagctcagagaattgtcaccaattcaggacttctctgagcaactcccgatcatgctgcattaggaacttatagcaaaggatgttcacagtttttttatgtggattttttcccatagttatctcagttatttatttatcgcttgcaaaggtaggaagcatatatgattttgtgaatgtaaattaatccacttatgttggtgagcaaatttttccgctcttgaaaaccgcaaagttatatatgattctccagcagcataaagctgaactttcttgcacaatgctcttcatataggctgcgcgctccggacttctgcggagtggagtgttaaccaagacaattcagggcttgtcctagcaattggaccatcctgcatttggaacacaggacaaggttcacagattgccgagaaaactcagttttacctttcgcatttctgctgccgttatcgcttgcaatttggttatgctccgtttggttgacaggattgcaacggattaattgaattggaactcatccaaatccacagaattgcattgtcgtccactgttaccgcttgcaatttggttgacatgattccaacggattaattgaattggaactcaaatccaaatccacagaattgcattgccgtcccattctaattctattgtttgattggcacataaattgtaatttggaaaacaaatgtgatggtttttctaaaagaaaaaaaaactattcatgttttgagtctttattacttggatcgcatagaatcctcaatcatgaactgt

SEQ ID NO: 4007 - DNA, 8568 bp, Sorghum bicolor
ttattcttgtttttatgtcttcttctggaaatgtttaatgaaatgatttccatattgttttattctctttgaagtataccataaataatgtctaccaccacttctggttttctttaaattacacaagtattgtgctcatttaggtcctatggcctgagagtggatggaaaccagttcctcttgttgatataattgaaggagcagcagtcaagaaggcttaccagaaagcattattatgccttcatccagataagttgcagcaacgaggcgctgccatgcatcagaagtatatagcagagaaggtttttgatattttacaggtacactagatttatcacatgtatatttctgatttacttaggaattggacggtggataaagctaatctgagatatacgatatttgataatggaactgtggaggcatgcgatccaagatttatctggtaccatttaaaaacattttgtgctgtgcttcagtgtccgtgccttttccccccttatggagcagtatgtagatgatcctgaaatgaaattatacatgcattgtacatattccacctatatgatattcacaaaccgttcagtaagaagtagcgtacctatctgaatgtttcccttgttgaaacactccagcagtcaaattatgcttttccggtctagttatatcatgcatttgtattgatgttctacaatgttgacatcttatgtttctatatcaacaaaaacagttgatatgttttctcttatatgtatgcaggaatcatggaaggaattcaattcaatcacttttggatagtattaggagtttactttgttattgcaatggcataatgatatctatcgcacagacatattgcgtcccggtgtctgcaacagttggtcgaaacaacctagaaaaacatagcaaatgggcaaagagagtacggtttatgaatttaggcacactggcaatgcctccctccgccttttcttcaaaatttcgactgtatgtagtattgcttaatcagttatattgtatccatcacgatggctcaaatatcatatgagaaatgctttgtgtacaaccatttgatgagtgcctagcagctgatgatgtacaaattttgcctgactatcgaataaaaaaagtgatcaatcttcaatctgaatgttgattttgtttaatgtaatactatatgctagcagcagtaaaaatttggtaatcacaccccaatcagaaaacagtagcggtatatatttacctccgtcattaaaagagtgcctagcaactttcttaaggcagcttccctaggcaccatgttcctattcactttgacgctcgaacaagtcgtaggcatcgagtccttgttttagatgtgaaattttttttgatttagcactttcgtttctttcgtttgtttgtggtaaatattgttcattcatagactaaggtcaaaagattcgtctcatgatttacagataaactgtgtaattagtttttttttgacaatgctgtgtaattagtttttgttttcgtctatatttagtgcttcatgcatgtgccgtaagatttgatgtgacggggaatcttgaaaactttttggatttcggtggaaactaaacaaggcccaagtttctgtttctgtttcaagcgctggaattggcgataaaactaaaaagttttcaagcttcctcgtcgcatcgaatctttcgacacatgcatgaaatattaaatatagacgaaaataaaaactaattgaacagtaaatcgcgagacaaattttttgatcctagttattttataattggacaaaaaatgtaacaaacaaacgaaagtaatacagtagcaaaatccaaaatatttttgcatcaaacaaaggcctggtggtcggcccaaatatcgtatcaagcccacgcgcaacgtcaagcgaaggaagactaccctaacctcgtgcctgcccgctcgtttccttgctccacttcatcccctcgtcgccgccgccgccgtcgcaagcgacgatgctcgacatcaacttgttccgcgccgacaagggcggcaacccggacctcatccgcgagtcccagcgcagccggttcgcctccgttgagctcgtcgatgaggtcatcgccctcgacatggcatggcgcggaagtaagtgcctcctctcctcattaccctgctccctcttccctcaaacgtattgcagatcctcggccggtctctgactaccatgggttctcgttgctgctgcagagcagttcgacctggacaagatccggcaggagctcaacgctaccagcaagaagatcggcaagctcaaagccgtacgttccgtgtcgaatttcgaatttagatgcactcgccatccttttccttctcggggttctgggtttcacgtgatggtggtggtgtgtttctttgcagagcaagcaagaagaggaagcgaagaagctcatggagagcacagacgaaattaagaagaggttggctgccaaagaagttgaggtgcaggaggccaagagcacccttgacgccaaggtcacgacgattggcaacatcgtgcacgattccgtgccagtcagcgacgatgaggtgatatggaaaatttatttggtggttgttctagctatttcctttctactgaagtactgaacggctgaaagaaaattaattcttcagtaactgttacattgtaatgtggcaacctaactgttagctccactgtcaactccaaccctgacaggctgactctcaccctcaccgtttaattgttggaattctaattctaattgtgtttcagggttctatacgaagatacagaaaaatattgaattccttttcttgtccaatcttgaaattgcaagtggtccctctgaatttgacctaattgttataaattttagctgaactgatttacttcttgcaggcaaacaataaaattgtacggacatttggagagaagagagtagaggaaaatttgaagaatcatgtagacctttgcaggatgcttgacattgtcgcattggagaagggtatatgctctcaacttttctctatttacaagtgctttcttactgcagtattgcttgtttaagacagtttcaaagctattacaaaccaattgcctatatctcttttctttctgattgttttcgggagtaacttgctaatttggttccttgctggcattctgctatggctgcatgtgattgtgctgcctccgttaacttgacaacccttctcatagataatgcatggttccatatatgtgtacgttttatatatcatattctaacaatcaacctgcttcaactaattttgatgtgcttgtgctctttgtttgctttcttgctgtgattaacaacatttgtggaacaggttgtcgagtttgcctctcacaaccttttacctatttacatttttgcaggtgctgatgtggccggtggtaggggtttctatttaaagggtgatggtgtcttccttaaccaggcattgataaacttcgggctagcttttctgagaaaacggggatttgagccaatgcagactccctttttcatgagaaaggagactatggcaaaatgtgctcagttggcgcagtttgatgaggagctttacaaggtaaggctgatgaaatgttccctacgtgcatatattgttacagtacagctatctacattcataattttatgacctaacataaattatgcttccctacttttttagtgaaagataacacatactcttcctgtatcagtttaccatttaccataatacactcctcttttttgataattaagattctatacgaatgaaaatatataatacatttggtcttcttttaactatctttcaagttctattgtttttccgtgctattatatatatataaaaaaactaatttccatgtactcaatatcagcaacatttcttgtttgttttcagcctatctgtttcattttgactactctggggtatgatggttttactcataataatagtttgattattaggacgactgttttagttttgatctttgattttgcatatgttttatggactatctatatatctgttgaaagatttcacctacaaaatctgtgagttctctaataatagtatctcattttattacaagtacattaatagtagtttcatttgtcaggttacaggtgatggtgaggacaaatatctcatagctacatcagagcagccattatgtgcttatcacctaggtgatcgaatctaccctgctgaacttccaattaagtgagtaatttttatcttcagtttctttatcttttactgacacacacgctatcaaatttaataacaaataaattacatacgtatagatatgctgggtactctacatgcttccggaaggaagctggttctcatggaagggacacagctggcatcttcagagttcaccaatttgaaaaaattgaacaattctgcattacaagcccaaatggcaatgattcctgggagatgcatgaagagatgttaaaaaattcagaagacttctataaagaggtaataatcagtggctcagtgctttttgatccttatatatttgtatccttgaaggttacttctcgattctctaaacatttcgttaatgtccaacttgcagattggactaccataccaagttgtttccattgtctctggtgctcttaatgatgctgctgctaagaaatatgatttggaagcttggttccccgcatcaaagaccttccgagagttggtgtcctgttcaaactgcactgactttcagtcaaggagacttggaattgggtatggccagaaaaaggtaaagtttctgtgccacttagattattgtagatgtgtcattgctctctgcaccttcacccagagtacattaaaatctaaccagttacttactcttaacatttccaatgtatgacaaatcacagaatgatgagcagtccaagcagtttgttcatatgctgaactccaccttgactgccactgagaggacactctgctgtattctggagaatttccaaaaggaggatggtgtcgaggtgccgaaggcactgcaaccttatatgggtggaatagagttccttcctttcaagcaacctttggatgtcaaacaagctgctgactccaaatcaaacaagtccaaatcaaaggtttttttcttgcttctgctgccccctttgcaaaaatagcatttgaatccatatttttgtctgatctttttggctcctcctgacagggaaaggcaccttgagctggatgaggaacatactggaaacgcaaatgcacgtgatggtggaactgttggatattgtgcatccttatgttaatttttgggcctgtcagtactcatagcatgactgtggagttgcaggttttggttttacccattttggtttcttggttaccacattatctgatgtacttgccatacttatattgcataggatttcttgatatttgaccaccaccatccctacctgctgtgtttattatcgcgttaccacagaccactgcctgttcgtccccgaaaccaccaggttgtcttttgtagcacgattagtaccggtatgctggtgcattgactttatcttttttgaatgatgatggtggattgatgtacacttcctatcgattctcaaaaagcattttgtgttagcggcatattattggaaatgcttgttgtggctggaacctggaaatgctcacgcgcttgtttttagattctagcgttgcatctgcaatgcaaacaccggtaactactgtgtaggtcaggtgctgaattctttctggctatgctttccaggctttcactgctcaatgtgactgtagcccttgaattcgccaagcaacagtattcatgtttgagaatcacaccctgatgcctgacggtcagctacatttgaataacaggttcatttgctaataaaccgaagcagggttatcgtaccaacatagtgtgtgcatcgctgtgcagtgatgcatgctcttatgcgtgcatttgttttaaaagaaaaacaagttttctttggctggtgccgaccgatttgttgtaagagaaacaaagtagtgctgttcaagcaacagggtaagagtgttggtcgtttatttgcattgctacggacgtagcgtatacttgggtaaggactaaggacgtactgtaaggtgaggagacctgtcaggagcacgatacacgaatccaagaggttcaccgtatgccagggtgagacgagccaagggagatttatgattcgccaacggggacaaagggaccagtaaacccgtgcagggcctgagccattacgctactgttcattcatacgagttgatgggcactgtcagcggaaataaacggcccatgattaaggcgagattgcgggccatggatgacctatttatatgcatacacaatcccactatataaactcgttatttttggcatgttgctggttgtttagcagagaaatgccgaggaaagctgagacaaacaggagggaggatgcgtgcgcgagctatcgagactggcgaccgaattcgatcttgtgctattgggggggtccgggagttaggcagatgtgctggccacgttcctcgattccaattatgatgatgatagttcctctgcactgcagtcaactaggtggcatttgtaatgggaaatttgttcgtgtctggcttttctggacaacatgatttccgatgcttcccttctcaataatcatgttcctgttctatacgaactctgcgcagttcctaggtaaacggcttgtcagcatcaatttgtacaaatgcacggtactgagatcagtctgcacgaaattgactacacggtagacggtactgagatttcatctgcacaaaatcgcctactctgtacaaacgatgtacggtagcagcttatttttccttttccttttttttgaaaaaaaagtttttttattttatttctttcattcacgtatgtaaatgtcaatggcaagtgttcttttccgtgagtattgagttccacatgccactgattaacttccgtaaactttgaaaatcccgtgccatttttatgcaatcattgagtttcacatggcactaattagcctaaagattccaaatggcttccatgaatttcccgttgagaaaaaaaaaaggatacattcagccactgaaggtccaaatggcagtggcattttgcgtcgctttaaagataaaagacaatcagcgcgccatggtgtccaatcggcttcgagatcctgaaaactttcccggtttgtttgtagtacgcactgtaaaacagctttaacagtactacagtaaaacattaccgtacaagtttctcacgctttgcggtaaaaaaaaaataaatttttgttgtactaacaccatcaacgtacatatagttacgaactggattgctgttgcctagatgagaagatcacattcacatttttttttctgaaaaaatctttgtaacgtctccattcaaacaagcttcaagtaaacaaatcaaaagggtcgagtcaagagattctggcactttgccccctgaaacccgcccgagcacagctctccatgcccatggagaggctgaccatgtgtcctctctcgctagccatcagtccatcacacacacacacacacactctctctctctctctctcttatcgatagattcattcaaaatcaaaatgccgcagagctttcaaaaagggagagaaagaggtaaaataaaaaagacaaggcgataataaattacaaaaacaaccccaccaccggtgggcccccctgttccacggtgcttttccccagctatcacgagaccgccccccgcagccacgctcgctcgccgaagccaaccaacgccaccaccaccccaccaccatcagttactactgctgcctgcctgcgcctcgcctccaggctccctccaggaatcccctcctcctcggattctttccccttctccagctcccccatcctcccgtccagcactccagcagcgccgcctgcactgtgctgccgcgccttcggcagcagcgcaccgctcgcctccggcctccagcctcctcggttcccgtggtaagccactgctcgctttcgttcttggcaaaagaaccgcagcgaagatcctggcttggatctgcgctcgcctgctttcttgcgtttcatggcctgttcgattctcgggctgctgctcggttcttggtcctgtgggttgggtccgccggacgccggtggaattatggctttgtctctcgtgtcaacatcgcatgttgtgctctttctcccccatctggaacgcgtagtacggccgtggaattatttctgggggttcagtccgttagcggtaccagacgttgctttcctagcaatagtgcggcttacctgcttgtaccgaagcagttggtgaagttcggttggtgccgtgatgtgtacatgtcttacgcttctctgcaagctttcgttcgtagtaatggagtcgtgtggtacatggttttcaattgcaatttggtacccacctagcttgtttcattcttgaaaccgaatgttccctctctcttttctcccgggtgtttgctagac

SEQ ID NO: 4008 - DNA, 6891 bp, Sorghum bicolor
ttgaggctacagatgatacctaacgaaattaattactctctttcccatattcgaaatgtgcatcacagtgcatatatgggccggtcatatgttcataatattcttttagcataattgatgttagaatctttatacgaaataatgcatttcaagatatgtgctaaccgaatgtgagcacatggtctcacgtgtacgtagcataagagttggccaacatcactaggaattattaataagcaacccaatgcaaactgtgatgtgaataatgactaactgagactaaatcaaaacatgcaatgcttctctcaaaacacaattaaacttatgtgctccatccaataaaaaatagtcaagagtaatcttcatagcagtcctacatttgctacctactgactgacatgtatgcatgcatgccactagtagatcgaggaacgaggaggagcatgcagggcagaccgagggatgaggagtcaaggacgatctaacaacaccaccgcaccagctatgctgcttgaattctatacacatgttattttttctaaatctcgaatagatcgggtatacccaaacccaaagctgaattatctggaactcaaattttaggtaatgtttttctagacaaatatcatgtattgatttctattacccgaatttcaaattacccaacccaaaaaatttgggttacctggttccatggctagtagtgatcgaatcacaccgtcaagccaaaccctcacttggatctcatataggaggttagaggtgaggaaagttaggggacatgagagagttacgaggaaaggataggtggagaccactaccacctcaccgcctatcaacaacattgtaattggttgcccttggtcatggtagaggtagtcggaattaatttttagtcgctcttatgttgtctacatgtggagaactcgagggatggagctctctatgtatgagatgttatgagtatgattactgttttggataagatgtcaaatatttgaatcaacctagctacatccttttcccgatccaaagaaatggattatttagagaatacataactagaaagatataccctagacactgttgcaggaatttctcagaaataaaaacagttgcatgcgtgagttaaacctacatgttcttacatctattcttatcaaaattggataagatattggaagaatccaataaaaaaataatagaattagaacgatggaatgtgtaaaacaaatagcaatatatggatgccttctatatttcttagcgctttgtggaaatgatgtagatagcttgtattaagcggtcggaagttagtgggatgacataactattagtgagagatgatgcaaatagcttgcatgttgaaatataacttatagtggagattagctttataaaagatatatagatatgtataattatgtccttttttgtagacacactcttatttgcttttggtcgtatctgctccatattgttttattccaattggttcaccaacaccgtccaatttgtatatacaatagtagtattctctccattctaaattataaaatatattacttttattatgtatttagacataatgtatatcacagtacatagtaaaaactatgtatttagaaaagtcaaatatcttatataatctaaaatttaaaatgaaagtgaatgctattaaagtatgtttggtcggggtattttcttagtccggctctggcttcttaaaaaaagtcgttatttatgaaaaatagaggagctagacccattacttctccgacgatcatctctaatgcactggctgcagcacattcaatcatcgcgggagaaggaaaagggcaaaaggcactccgaaacgctgcccaccccggtgaccgatgatgcatgtggcctgctttgtggcgtggtccatagcagtccactaccagtctaccacacccagccgagcaggccatatatagcaacatgtcaactttgctccggcatccacacacccctgcaagtgagcatttcctctccctctccggggcggggctcatccatgcacgggggcgggatgggtgtcttcttcctctaaccggccggcctcttgccaagagaatcatatcgccgtccatgcatatatgtgatatccgtctcccagggccggtgatgtttacacgagaggaggaattctagcctgcctcttcctctgatcgttgtcagcaagattctccgtccaaccgccagaaccaaaatcccttttaaagcaagggagctcccagctcccgagtttccccaaacacttcatttcagccttcagctatggaggcatcatcggcatcagcggtcgagtcgaccgccaccgtgtccgtcttcgatgtatcatccaacaagcagcgcccagacacggcgaagctcgtgctgaacagccccagcccgccgagcctgcgcgaggagctcgtcggcgtggtcggcaaggcgttccggccacggccccccggcggcggtggccgggcgccgcgctgcccgtggatcctcacggcgctgcagtgcgtgttcccggtcctgcagtgggggaggacctacaccctcaagtccttcaggagtgacgtcatggccggcctcactcttgccagccttggcatccctcaggtaggcggctctgatggtcatgtcacacgcttgctgctttgctcaattcacgcgtcagttttttcctctcaaaaactatacagtatacacaagtctttacttattgatgagtagtgatctcagcaagaaataacaatcaagctaggtaggtagctagacgactgttacttgaattcaggacgtcttctggtgagacaatgcaactgacaagtgtttcttgcactaaatctctactagacaaaaaatcagttactacttacttgtgactttatgaggaaccaccacatacttcaaggatcatatatatatatagatttccccttaaattttttctgatgagcatgcagagttttcctcgtccttatctgacatgtgactcctttggatctcgggtatgatattgtagagcattggatatgccaacctagccaaactggaccctcagtacggtctttgtaagtatcaatcacaagcctcttctctccatgattgttcaaaacaatttagcttgcgccaaggcgcacactccatgtttcttatttcgatctctcactcattctttcgtactactacctttttcttcttctgaaagacacaagtgtcgtgccaccgctgatctacgctgtcatggggacatcgagggagatcgccatcggcccagtcgccgtcgtctcgctgctgctgtcgtcgatgatccagaaggtcgtcgacccggccgccgacccggcaacctacaggtcgctcgtcttcacggtgactttcctcgccggcgtcttccaggtctccttcggcctcttcaggtactgtctgccgcttagcaagcactcgcctcttcaggtcgagacgtctgtgtgaccgtgtctgttcttcacgttcccctgcaggctggggtttctcgtggatttcctgtcgcacgctgccatcgtggggttcatgggcggggcggccatcgtgatcggactgcagcagctcaagggcctgcttgggctcagccatttcaccaacagcaccgatgttgtttctgtcgtcaaggccgtctgctctgcgctacatgacccggtgagtgtgcgtcgtcgtctctgtctctgtctctctcggccaccaagatactgggcatatttttttttctttttgtaaataaatataataaaaagagcactatgtaccctgatgcatgccccacactcataaagagagagtcagaggcacaatgattagtcacggtcattacttggaacaatagtactagtacgtcttcaacctcacactacggccacttgcctgcgcactgtttagtgttggattattggaatccaatccgcccgccttcatgtcaaattgtcaacaccgccatcttgtgcctggctttttactcatgtccgattcttatgtggctcatgttctccgtatcatgtgcgtttgtcacatgtggctcatgttctctgtgcatgtcatccgaattgcagtggcacccgggcaacttcctcatcggatgctccttccttatattcatcctcaccacacgcttcatcgtaagaagattcaaccattcctcttttttactggctcatgatatgcagatcggaaggtaactttagtaaaacccacacgatgacaacttaattaatggcaggggaggaggtacaagaagctgttctggctgtcagcgatttcacctctgctatcggtcatcctgtccaccgctgcagtctacgcaacaagggccgacaagcacggcgtcaagatcatccagaaggtgcacgcaggcttaaacccaagttcagccaagcagatacacctgaacgggccgcacgccacggaatgtgccaagatcgccgtcatctgcgcagtcatcgccctcacggtacgtactgcctgacctcagtaagccgttcatcttgtgttccatggtgaaatctgaatccggattgctgaaagagaaagctttgcattgcctctcctaggaagctatcgccgttgggcgatctttcgcctcggtaagagggtacaaacttgacggcaacaaggagatgctggcgatggggttctccaacgttgctggatctctgtcctcgtgttatgtggcaacaggtgatcaatatggctactgagtgatggctgctgcagtctttcaggaagaaggaaaataccattcctgggcataatgtctgaaaatgtttttgattcatcaggttcattctccagaacggcagtgaacttcagcgcgggcgccaggtcgactgtttcgaacatcgtcatgtccatcaccgtgttcgttgccttggagttgttcatgaagctcctctactacacacccatggcggtgctcgcctccatcattctatcagctcttccggggctgatcgacatcaaagaagcttgcaacatatggaaaatagacaagatggatttcctcatctgccttggtgcatttgttggtgtcctgtttgggtcggtggagattgggcttgcagttgcagtaagatgcatgcttgatacacctccatttgaaaatcacattcgaaaaattatctttcagcttttctgacttgtggtgggctgattggattgctgcagcttgccatttccttcgcaaagatcatcatacagtcaattcgacctcaggtagaggttcttggcaggctacaagggacaaacatcttctgcagcgtcagacaataccctgtagcttgccaaactccgactgtgctaccgatacgcatggacacatccttcctctgtttcatcaatgccactttcatcaaagaaaggtactagcaatctcaatatataaatatggatttataaaatattcagtacaagttctccaacaaatgttgttcaatcaggatcatagagtgggttcgggaagaagtggagaacccaaatggaaaagcgagagagaggatacaagcagttgtccttgatatgtcaagtaagtgcccctagaatctccaagattttacaaaaggagatgcttgactttttctagttaattcaatttatcattaggtggaatatacaccaatgtagctgtgaaaacccatgttcagtgctaatctgatacaaaaatatgtatgcgcatgatcctgtttttgcaggtgtggtaaacatcgacacttcaggactcactgctctggaagaaatacacaaggagttggtgtctcttggcatacaggtgaagtactgaattgatcacagagtacctttacgcttgggtaaaaatcaaagagatataatgccgaattgcccggtttataatgctgaaacaactacctgcagatggctatagccagtccaggatggaaggcagttcagaagatgaaagtgtcgcgggtggtcgacagagtaggagaagattggatcttcatgacagtaggtgaagcagtggaggcctgtctagctgctcataagggcacagctctcgaatgttgagcatgcgcttaattagcactccactattagtactgctaaggataatcccataagcgatgcggctttgcatcctatgaaggtgttactgcaaatgcttacaaacagaaatgcatgtttgcacatgatggtgacgaagtacctatgagatatgactgaagtggtcgtggtgggaaacaatcctgctgtgggaagaacaatccttgagcttcacaagacatgttttggtgctatcttcatgatctgtacttgtacttagtttttcttttactgtttcttcctaaacaaagatgaaatcttgacctaataagaactaagtgagattaaaaagatacagttgcgcgtttgaaacctaagaaacagagttgaagcgcgaataagaaaaaagagggggagcggggcgtacagcatgcggctttgccggtccgccggcggcgacctcgaggtcggggaggagggcgcaaactgaaccaaccggccgttgccctcggccgtgccgcccgtgcgggccttttaggtcttgaacggcccagcaatacagaagtgggccgctcaaccattcacacaggcccacttcttggccgcacccccagtctcgtcgacgacgacgactcgacgagtgccgtgccgcgtgacctttcgtggtcttcccggtctccggtcccggtcccggtcccggcctcgcgccgccggacacgcggccgtctaatcgtctatgtgctgtgcacgtcgccctcgcgtgccggcacggccgcgaagatgatggcttgtagggagcgatgcgtcggacgagagggaggaggagccgagaaggggatggatgga

SEQ ID NO: 4009 - DNA, 5021 bp, Sorghum bicolor
atctttcaaacacaatatggtggtgatcctgcttttctttttccttattacatgacagtctttatttcttttgtcccaatgagacaatatggtatgtgacatggagatcagtacacaatggtatccaagtagggtactctgaatctagtagaatgacaattgaaaatcgaagtttcttgtagctttggtttgttaagttcccttttcaacgtctaaatcttgtttgtacttagtactctggtttgattgccaataacttgcgtgtttactgatatctaccttgtccattgcagctatggttggtgatgtgaacatatatatgaatgactctgatgatatgcagatcgcggagatagagatcatgatagctgaacataagaggtaccttccctataatactaaattactaatcatgtcctatcaaaaaaaatttactaatcatgtcactgtttttatcatctttgacatcttctctgcatttgcattgttggcacacatttttacttggctttaataatccaatgtggacatcttacttggatatttgttacctgaattactgaatatttttgttgagagatcaaacagattgttgcagctaatttattcgtccttttaactttccattgtcagttgcttcactaaccacatcagtagcatagcatagtttattaaccttcaactatatgataatccagtgcaattatgctatctcttggcaactgattgtgtattgctgtactgcaagacagacaaaatctacttatcgcatgaatctgttctctacccatttgctcattgtctcatggtcccttttttctgtcagtatcttgttttatctagtgacaaagtagttgaagcaataattacatgtcacatgaaagtaaagtagatgctgaactaaggataaaaaggggatgttttgacatgagaaggaggtactgtctgatcgtgctaactaaaacttttactttttcttgttgcagccgtgggaagggaattggtcaagaagcaatcttgctgatgatggcatttgcagtcgagaaatatggaattcacacattcagggcaaaaattagtgaatcaaatacggcatcccttaagctcttcaggaagttggtgagaccctcttttgtcatattctcgtttggtcgctggtttgcttgatccgaattatctttctttggtttggatacagggcttcaaggatgcttcatacagtgcggtgttcaaggaggtaggctcgacttgatacctaatctcactttcacaaagaatctgtgagcattacaaagaacagtttctgctaaattacgtcacagttcatcaacattgatgtgccctcaatgattcagtcttatagcaagtaaaaaacaatagtatttgtccgttgaaataccaacaattactttaaatccatctaaaaaacatcaattagtcaaaactcatatctttctttcaggtgactctggaggcacctactgactcactcccgttgaggtttcctctaaccattggagactggtgacgtctgacatgccccaagctaattccatgcggacgacacaagaagctgatgctgtttgtctgtactatctgaccaaaatttactcgggatgatgatgtatgaaaaaaattgaataaaacagttgcacagttgtgattcaattgcattacggcaacatggaacaagttgcagcaatctgcagccaatatatggtgttgaaatcaaactgcatatatcataatgttgctcattcatgaatcatgatacgatttgtaatgttatgccactagtgtttgtgcacgtttttcctcagctacattttttttttactatgagctacgttttttattttagagtgggagctacgattattattagcctgaaaaacaccagacatatttggtttggcacttgggctcatagttgtcaagcagcccaaccaagcccagctaatgagggatgacatacccccaagtcctgggtacaaacccttgggcttggccgccgcccgcctgggcgaacgaaacgggacaagataacgagacagcaagggggagcagggagccagggtacccagaaacagagatggcggcgaggcgcgacaccgagttggacggcgaagagctcggcggcgagggctccaaccccgtcggtggtggcgcgactccaccgcccctaggcgcagcccctgtcgtatgcgtcctccgctccgctggggacttcgctggcggcgccttcattggatccgtcttcggatatggtactcccgtgattttagattaccctgtgcctttggttgctgcccttttcgattatcaggggccgtctgcctatgtccttggttgctgcccttttcgattatcaggggggcgtctggatattttctgctttgtggaatttgggttcttgggcacgtagaggatagaaaagccctttcccctactagtatataaatcatggcatagcatgaatttgttactctggatagctaagaaattagtattttcgccctcctcggtaatactgttcccgttatagctgcacatctcacctgaatcacatgatcacttaatttgaaatttaggtctttgctttgtttgcacagtgagccccttattgctctagttgcgaagagtgcaatcaacatggttaaattttttgtagtgttacacttgtggctctttcccttgatataaaattccttggattccttcctcaggacaaggcttgctcactaagaagggttttaagggctcattcagcaatgcagggtcctctgccaaggtttgtttaacatagtttttgttcaaacatatttctttgatgaagaaattgtgatgtgcctttctggacagctgttcatataatacaaaatatcttggatcagacttttgcagttctctctggagttcagagtttggtcgtgtgcttgttgcgaaggctacgtgggaaagatgacagtatgtatataccttgttagccggccatatatttgttagcatatctgaacttggatgtgtaatatgaactgacatgttctgttggcagttgtcaatgctggtatagctggttgttgtactggtgttgctttgagctttccaggtatttacattgaactttttttttaatttttcttgcttactattgtttccatttctcttggattagtatttgcagtcttggtcatgtggtaactggtaatcttgttgctgtgtgtactgtgtaactcttctcgtcattagattcgtgtgttcatcttggatagaatagcagttattcatgaaatttttatgagggtggattcatgtgttatatgaactgcttggattgagatagctattgtcatgtttggttagaattctatcttttgaaggatgaatcttaaatgttccattttgggtgtacatagatgcaactagaacttgtgttcttgaaagaattggaagcaatctatttcaacggttagacactgagtatgaaatgaaaaagggtccatgacccttgcctcatgagttcatcctgcattattttttcagtcagtgaaactaaatctttcttgcattattttgtgctgactagtggttagcccaagtttagttaattgtgaattggaccagtggtttataaaatgctcagttgcacatggtactcaatttcataaattgccatcagcaccttctttgacagaaacgatacccttcttttacaaagaaaacaatgttttgataaatcatagtttgatggggatcacgaccagtatttggctagtgatacactagaaacatagaaacatttttatgtgttttggttgttagtttgcgatgcatgtttcattgctttctggcactaggcatgcatagtgattatcaatggctataactgcattacgttttagcgctcaactgtttgtatgtggccagttgtttcaagttccgaaggaagtggatatttgcccatgtgctgcactgaactgctatttggagtcccattattctaaaactcattcagttcttggggattttgttttataataattatcttacatgtttgtttttcttttatcaggagcgccacaagcgttgcttcaaagctgtgccacctttgcagcattctcatgcatcatggaggggctcaataagcagcaggctgcaatggctcgcacacttggtgggactgccgtgacggtcgtgcatgagaaaggcggtgttctgcccccgttcacgctgccaccaattcttgatgcatctgatgctttagcttcatgctgcttagcgttagtaaagcctaagcactagattgcagaatagagggcgtgagagatggtgaagacttcggttctttattgtgttgaccccagcttatgtaaattttgtttttggacaagatgtgtaacgtgcctaaaatccagatttgcttcatctagccagttttcccttggaatgtgttaacgtttgtagcatgcccttgcggattccgctgggtctgtcatatttatatgggataaggtcataaatatttgcctgaatattcggcttcttttgggcattttgcattagtgaagtcactgaagtgacagttttttttttcagaatgtgaagtaggtatgcaggttttgagctaagctgagtgtacctcttggagaagtgcccttagacgcacagagattgaaggagccggccttatagcctgtgtcctccgcaggtgctctattatattgctctataactgtatctttagagtgccaaattttggccttgacagtactgcctgtattttttattctatttcagttccgaattttggcctttacagtattgcctacatttttcatgggttccttaaaacaacttctctgcgtttcctcatcagactgaaaaaccattcagattgtaatttcactcatgaccacctttaacaattgattccttaaaacagcttctacattcaagttctaagggcagcagcaacgcaagctaatgactactggtggtttcacctaaaagagaggtccatg

SEQ ID NO: 4010 - DNA, 3569 bp, Sorghum bicolor
acatatttcgattatggcctatgtgtattgtactttctgtaaagatttctatgggcttgtcattttgtaacttttcctggtaaatttttaagatctaaatataccattttaatgttcaattcaacacaggatgacttcagtgatcgaatcaacacttgtgctggcttcaggtgcatcgatgttaccacatccttcgaaggtactgtatcgagggctaaattaattgggatgattttttgattcaatttacatatgccaacaaaagatacaaggttgccattctgatattgcagtcattgtttcttaacattaacgggaaactatacatggctttctctcgcttcttgctcatttattgctacttgaatatttgtcttgatttttttataaccgtacctgttaattcttccaggtactcacaggtggtgaagatgcatattttattgcttgtgacggctggtttggtgtagcagatggagttggtcagtggtcatttgaaggtaaacaatatcttctcaaatgtagctctgttctaacattgtggatgctgtgaactgcagctaacagtccatccatagcacacactccataccctgtttcttaagttttattgtacttgcttttgagaaatgctttttttgctgcactaacattgtcagatgccttacaatcacacaaatatattccatgtccgagtatgatacattgatatagcctattcgcatgttacaacttacaactataactctataaggccttttggaattgctcttaataggacacagagtatttgcatgaaaattagaacttaagatttgggaaactcaaacatcacgcaataagttcaggtcaatgtgctgcagccttcaatagactttgcttggttgcaatcactggagcatggatgaattcaaaatttaagtgttggaagtccattttagtgtgggatggcatgatcaaagttgtttgttttttttagaaaatgaaaagttctgtcctcttctaccacacgcagccaaattcatacaaaagtttcagctcaacgacttgatcacaaaaaggaaaaagagaccacaaacaaaaggaaataatcatgagcaaagtctattattagatgattagatctccatccattcttggtgaaaatatcgagagcgatgaccccaaagctctgctcacatgatcaaagctgataaggacgaggtactgactataagcctaaacaacaatagctacattccttctgttcctatcaggaacgccagaaataagtgacatggctactgtagtattctaagatgccaaattaacaaatctataggagttggctgttgaatttgttatttggttgatagttatgcacaaagttgccatcctatctgccagtaggtaaagctgaatgtggattaggtcagtgactcaatagattttgctagagaacaatgtcttaccagttgccacacaaacatgataaaaatcatgagaagtaaacatggcaatagaaccaacataattgtgataaacatgccatgaacctgttgtatcaaatgtcattgtatccctattgtttatccttatgttaatatgatataaaattgaaggtagaagaaagggatataatgaaattcttgatttgatcttcaaccaaaccacccttttttatgaaaatggagagtggtcttattcaaattcaaagcactttgtaatgtaatctttaaccagttctgtacttcaattagttcaatttaatttcctggagtaagcactatacctgttctccaaggaaaaaggaaatgaaattctgtagtcacattggaaactaagagaacttgagatgcctaaccttgaatgcaatttggcatagcattaattaaaaaatatgtttgttatctcagggatcaatgccgggctttatgcaagagaattgatggatggttgcaaaaagattgtaacagagacccaaggagctccagggatgagaactgaggatgttcttgccaaggctgcagatgaagcacggtgccctggttcttccactgttttagttgctcactttgatggccaggtatgttcgttggttatggcttggcctccttttttttcacatgtacgtactgatagttgattctatatagattatcctcccaaacttggatatatttatgcttatgagctcattgctattgcaggtccttcatgcatcaaatattggagattccggattccttgtgataaggaacggagaggtccataaaaaatcaaaaccgatgacctatggtttcaatttcccgttgcaaattgaaaagggcgatgacccttttaaaatcgtacaggtgccataacacaatgtgctgcttttgatttcctcttgcaagctttatagagtttttttttacttactctattcttcttaacttgcagaactacgccatcgatctacaagaaggtgatgtcattgtaacagcatcagatggtctttttgacaacgtctatgaagaagaagtagcaggcattgtctccaaatcattagaagctgatctcaggcccacggtccgtatgcaataccaaatgaatttctcatcgtgttacagaaatgaacctaataaactactcccacaatccacaaataccaatgagaaaagatttatctcttaaccatacccactttacgttaaaattgcaggaaattgctgatttattggttgcaagagcaaaggaagtggggcggtgtgggtttggaagaagcccgttttcagactctgctctggcggctgggtacctgggttactccgggggcaagctggatgatgtaactgttgttgtatctattgttcggaaatctgaggtttaaactataaacaaactcacaaagttgagcgcagctcaagtttttgctacagctgcactcgctggcaaatgcctatgaacatattgtgcgtcatgagcacacagcacaatcctgggctacgctcagccaaacgtgtgtacactaatacatatacatactataaggttgcatgagtatctctttgagcacggccgcagtaagttgcaacttgcgagcctttcaatgaacttcgtgatgtactcagcggcagcggtaaccaattcgtgacttgtagcattattgatttcttgtgcgaagcaatgaaattcatgaacagtacatgctggttcaaaagcagtgcaaaacgacactgaaatgctcacaagatacatctcggtacagggttgttacatgctccttttatctgtggtcagactggggtaaggtaaggtaaggtggagcgcttgaacttggaacatgacaggtgacgtagcccagctcacaagagtcggcacacgaacagagtcgcggcagcagtagctgccgcgaggaacgtccgcggtggtgccgagaggccggcagcgccagaacgcgctggggagggtgctggggtgctggtctggctctggctcccggttgctgccgctgccggtgaccccgaaggaattgacgacgacggcgacggcgactggccgaagaatggggccccggtagatggagcaggcactgaaacaacgtgaaa

SEQ ID NO: 4011 - DNA, 3979 bp, Sorghum bicolor
cgacccaaatttggaagttggagtaatgggggaggagcattgaatccggcctcaactgtgaccgcccccggcccttccgaggcgctcctcccttcgtcgccggcccggctccgggctccggatccggccacccgcccggtgcgcccgcgcgagctctcaccgctcagctcacccctacggcttccccgcacgggcgacacgtgtccctgctaatcgagctgcatgcatgccctggtcgtgagactcgcgcgcgtgagctaagaacgaaagggcgatcgagttgacatggaaggttctgatagcggtcagagattacgggaaacgcccgtaatggttgtgtgctcctgatgctgacttgactcttgaggaggcaagggtacgattgaaatttgttactgccgacggcctgcttgctcatttactcctgctggtatgagcattgagcaaacactactggtattcacatttactgcgtccatcagggacagaattagatacagctagtagcttttaaagcagcccaagggccggggccagtgccagtactactacactttggtcaatctgttcagtaacatttcgtgtttactccattcctaaacctcaactcgctcatcggcgtgaagtattgttgctgcggtgaatggtgatcgtctgctcatagtaccagcatgcatcatgtatatgtgccgctgatcgaaagtgagctccatcgatcgatcgatcgccctgatcgaacctcatttcctacatgtgtatcatgcattgataagtacacgctaggctagctccaatgcacgcatagtcgatcgtcggcacggcgaccagtgattaatggctcaaccaccttgcttcgaatgtgggcaaggaagagggcgggagaaataaaaggatcggagacgaccgagagatcagcgccaccctcttgagtcttgagtcttctttacaaagcagagaagaagcaggcagatatctcctcctactcctatgaacgatcgaaggcggaggcgaaggcgattaaatttcattaaaatgggacgtgctttgatcgaccgtcccttggatgtttcccgctataaaacctctctccgatccggccgtgacatgatcctatccgcttcccggccgggtctcgaattgaatgcggtcgcatccacagccccaacggaaagttgaatcgccgtttcgtgtatttaatggcgtggtttccagtccaagtctgtagtagtagctacccactttcagccggagccggaaatgctggaacgggaataataactggacgcggctccgggcggaagccggcatccaaaggggaaagggaaactcacagtcacaggcggccggcagggcgacgccggcggaggcggagcgctcgctgatccatctgacgcctgacgggagagcgagagagagcgaggttaatgcgctctgctgctgtgctagctagctagccttgatggcgagctaaaaacgatggttaaccgcaaaagcccatgcagcgttaagaagcatgtgagggcggagagcgatcgatgcgaggtggaggaggacggcgcagcagtaatggcaatgccgcgcccgcgcggggagatgagcatgagatggagccggtgaccgagcccaacccaaccccgcctcgttgggagcccggccagcgcccagcggttcaagcaaggggcgggcgggccgggccggccggcacgttgggagccggatgacacgcaaacgcaatcgaggagatggaatgcgatgcgatgcaggcgggcctgactcgaccctgacccgacctgaccagcagtaagtgtaagtagagctgtgggaacatctcgtgggcccggtcgcagtgtccccccttttaagatcctggctaccacttctgtgctcataaatttccggccccccgtcgacgtcgagcctcttctgccctcccagcggctgaacccaaacacttctgcccttctcctcctccctatataaaccccgacccctcgctgcgcccgaatccaaacccagcgcgcccccacacgcatcgcatacatcaccaggaggagatcggaggtcgcgacccgcggcccgaccaagccaagtacgctaccacacacactcccgcgccgcacccgcaccgaccgaccgaccgcgagggtgcaacgagccaacgacgtagtactcctatatccgctaatccgcagcagctagcatccccaaagccgaacgtacacgtacgtgtagaatcatatataggcaatagcaagcagtagcagctcgatcgatggtgtcgctgcagtcctcggcggtcctgccggaggccaccaaacgccccccgtggctctccctcgtcggcagcgtcgtcgcctcctccaccggtaccgcggcggccaccagcaagaagcggaagcgggacggcagcgacgacgaccgcggcgaggtcgtggacgggatcgagctcaatttcgacgccgcgccgctgccccccgagtggcaacgctgcctcgacatcaaggtacgtgttttattcttattatcgcacgcaggcccttcggattccatcgagccgcgccgtgtacgcactgctcgatcgtacgtgtgttctgttctgagttctgactcgtgtacgtctgggtgtgcatgcagtccgggcagatccactactacaacacgaggacgcagaagcggacgtggaaggacccaaggggggattcggactaccgcgccgccgcgccgacctccggcgaagacgacggcgaggaggaagaggaggactccgcgaattgcgcgccgccagggctggacctagagctgaacctcacgttcgagccgcgccgggcgttcgccgccgcccacgagaagaagaagcccaagcccgcggtggcggcagacgaccgtcgtcgtcttcagctggccgcggaggaggaggccgaggacagcagcggcagcagggagatggtggccggcgtgtgcgtgcggtgccacatgctggtgatgatgtgccgcgccagcccggcgtgccccaactgcaagttcctgcacccacccagccgcgccgccccgccgccgccgccgccgccgccgccgccggagcctgagccgccggtgccactcaagctcggtctccagctgctctgctgcagggactagctacgtagctagctaaagctaagctacctagatggaggatggatgcttctataccgtgctccctaggcatgcgtgcatgcacaagtagagcgcacgtgtgtcgcacgtgcgaggaggggaggatcaggatcacgtaattagaggcagctagctagcgtaatggtggaggaggagttagttggcggcgccgacggccgatggatcgatcggctgtacgtactacggttattagccgccaaaggggtatatcatatcgtattattattcatataatgacgatgaatggtgatgtagatatacttaagtgcatagcataaatgtagctcggaactttcggtgtctgtcacttgtccgtgtgcatgtactcgtaacatgttttcgaactcgagaacccgtcgactcgttgcggaaagttggttggccgttggtcagcacgtactctgcaggaatgatttattggtgcgcccctgtacatgacactagcgttgcgtcgcactctcgcggcttctcgcgaggaaaaacaccctgctctgcctctcattaattaattaatactccactactgctactagtagcgattagcaagtggcagggaaaaaacccacccccgcaaacggaaaagagcagggtcagcaagcacgtacacggccatgcatgcaagcgcgaataggattcagggatcagaaggagggtgtggccggccgaccgctgcggcgtcgtccaggccggggagaggccgttgggaagggaaatttgaaccacttcgacgatctcctctctcgatctggcgctgccatgccatgccgaaaccgcccgatgtctgtcgtgcatacaaagctag

SEQ ID NO: 4012 - DNA, 5501 bp, Sorghum bicolor
tgacaaacagaggacttgggggtacctccaagcatttgtttgtcgtgcttgacagttgacacggcgccaaacctcggcatcgcgaggtccatctactatgtggctacactctgcaattgccgcctgctagtgtgattgtgggcgccaacaatgctactataggtctctatctctatatacatgtcatcaagatctacggtggtcctacctacactatgcacaaatattataattttttgtagacctacttataactaacagaggaacgaacatataaacctgttttttaccaacatctcctctaggaccttgtattccaaaatttgtggtagtatatatatgtcccaaaactctatcacctatcgtggtttgacaaaaaaaaccattaacagaggtagatcttttatgctcatccgcggtaaaaggccaaacggaccctagcaaacaaccatctccatgaatcatttggagtggcaagtatactagagtgactatatatctttgttaattaattattacagagactgtcatcttacgatgcccatcactataaatgatgatctttatagaccgcttcttggcctctatatagagaaccatttctagaaatagttatctaacgaaaagtatctttctcaatatgaagtcagataaagacaatttttatactaaaattatagaagtcaacacaatctataactttatagtagatattttttatttaaaattgcttaaagccaccaaaattcgttttaaattatcagattttgataatttcatcctcgtctttctctacacaacgcgtcatctatcctcttacagaaactgtgagacaatgagagcttctcgatcgtccttcaaccgttccttgttttccacctctgaactatgctcggagaacgtggaacaggtgtggctgcaatacaattattgcacgaataagagtttactggttagataagcaacgaagttcagaaaagaacagcattccagcttatcttttcttcttctacaaatgttcggtttacctcaattgatcttttctaaaatgttgcttttggaaaatgaaagatactacttgactatcagtttggaggttcacatggtacatattgttcttaattccttgtctcttcccccctcccacaaaaaatgtcattataggatttgtgctagtagtcaaactttcttaagtttgacgtctggctatatttgtagaatatactaataacacttgtatttctaaataaatttattattaaatttaatgatttataaatagtaattcataccataaatattaatattttattatatatagtcaaagttgacaatgtttgacatttagagaagtgaaaatgatattttttagaaagaattggctgtgagacatgcagaatggtggccatttaccagtagatactagaaaaaaaagattgcttaaagacactccgtttcttgttaaatttgctgacggacactatgtctaatcaaatatctatattttttttacactcgatgccgttcctcaccatgccggcgtttaccttcccgccaccgtgaagggttgtgctggtattggggctttgtttacttccactccaaaacctaaaaattttcaagattactcgtcacatcgaatatttagtcgtatgcatggagtattaaataaaaataaaaattaattgcacagtttgatcggaatttagaagacgaatattttgagcctagttagtctatgattgaacaataatactgtaaacaaacgaaagtcccgaatttttttccctgggcaactcaacacggcctgggccgaagcccagcgagctgaggtgggcaacgcatatgctcccgtcaccgtttgatatgaatgagcggccagatgttcagcaactgcaaagagaaagtacgtgcccaactgcaaaggatctcattcccccttctccagttccccttcaggccctcactgagtcacgactccagatctcgcaccgctcgccatggaactcctcgacgcgaggcaccgccacacgccggattcgagctcctccccggacgccgcctccgacatggggctcccgctcgccggtgccgcctaccagccctacgtctccgagctcctctccttctccatcgagcgcctccacaaggttcgtacgcctacacttgctgcgcgactcttgattggcggcgatggtaattctgagttcgttggtttggtgagcgattgtaggagccggagcttctgagggtcgacgcggagcgggtgcggcggcagatgcaggaggtggcggtggagaactacggcgccttcatcgccgcctccgaggcgctctccttcgttcgcgcgcagctcgagagcttcgacggccacctcgaggccatggtaatgcggccggtccctccctgctcgttgtactctttactccgttgcttctactgcctgccccctttgtgccaaaagttattgctccatgtggattaagtaggccttgcgcagtaaaactgatcggatgaatgctggtggatggattgaattaagctgctttatccttgtagaaactagatcacatgatcttgctattgttgctccccagagatgtgattgcctcttaagtggaaatgcaattctgctagcaatgtggtcatttttaagttgaattttgaaatgaattgctattgatcacgaaatcatgaccataaatatgcaaatcaaaaaacgaatctagtggaacctcttttgtgtaactaagccatcatatagttggcttaattaattcgtgaaaacatacaatgtctgtatcttcaaatatgcatatcaggacagaaataaccttaaagcagtattatgtgaactagatgatcttgagcacttggtatgaccaacaatatgtttattacacacacatcatgaaaggatcgatacagatttataggttttatccatcacagatacttgtatggcagtctcggtattgtattaatctgtcaaaagctccgtattattattatatgctgaacaatgtttctgttccttgataaaaatatatcattggaaattgtggtatggagtgcctgattttcagtctagcaatactagagggtagagggtgaaatcgattacatgttcattattatattctgcctttttctttctttctatctggtatatgctaacattatatacttctatgattcatgcaaccttggaagaatgatttgaaatgtttgaccatgttgttcatgcaccattgtagatagaggagataccaaacttgacatctggctgcactgagtttgttgagtccgcacagcaaattttggaggagaggaagcttaatcaaacattactagcaaaccatactacattgcttgacttgcttgaaatcccacaactgatggacacgtatgaaactttatcttttaccattcacttgtctctttactttatgtttgggttgtttgttattgataatattatttgtttttcagtagtgcatagtttcagttgtattgttgctgaattacgcatgacagtaagtaagcttattcttgtaggtgtatacggaatgggaactatgatgaagcacttgatctagaagcttttgttagcaaaatctcgaagttgcaccccgagtaagttgtgtgacataattgctatcgcaggccctggcatagtggcatttgctgttatattaaccattttctttttccatttgaagtttacctgttgtccaaggattagctgctgaagtcaagaagacagtacaatcattaatttcacagcttctccagaaacttcgatcaaatattcaggtgaagatgctggtgtaatgaaaaatatttatgactgttctatattgtagagattatgttctgtgtatgtccaatactcatcgaccaaatactctccttttaccccccaaattgcttgacttatccatcttgagcacaaatctatctaacagtcatttcattttctactacagttacctgaatgcctccgtattgtagcacatctgcgtcgaattggagttttcagtgagtcagaattgcgcttacaggtattctgaattttttcatgtaattttctttgtgtgagtaggtttcaagagaaattttgcttttactttttgtttgttcaatttataatggtgggagttactgcctggatttgcagtagtgttcatgcgtcctacataataaaaatgcagaaatttttgtaatgatatttttcttctttctttcttatattccgcagccaaattttctggataatatgatttgaacatttccatcttcatattctaactctgatataatttctagttcctgaggtgcagggaagcttggctttctgggattcttgaagatctggaccaaaggaatgtttatgattacctgaaaggcatggtgacttgccacagagtacatctatttgatgttgttaatcaatatcgagcaatattcaacaatgataaatctggaaatgacgagaactatgacggtgggctgcttttcagctgggcaatgcaacaagttagtaatcacctcactactcttcaagttatgttaccaaacataacagaaggtgggtctctgtccaacattcttgaacaatgcatggtaagaaatggcttctcctttttctatctcaattatggtttgataattgatacaagatttagcagcgatctctggtttcattcataaatctgatacactttcatgttgcagtattgtgcaatgggtcttggcttagttggattggatttccgtggcctccttccaccaatctttgagaagtaattggtgtttgaattatagaactttattagtgactctaaaggggctttattattgatgctgttatctgcatttcgcagtgcggttctaaacttattctcaaagaatatgagtacagcggttgaaaattttcaggtaaagcagtgttttgcaaccattatgcatgttgaaatgctgagatcaactataaactgaattcacgttactgtgctgtttgagcttttgaaccaactttctaattctttggactctgcgtcttacaactctattacttactggagtaccatcttactattactgtaatgcctttgaccatgctaggttgttttggattcacatcgttgggttccgatgccatctgttggctttgtagcaaatggagttgtcgatgatacttctgatgatgtgactccaccttctgttttaatggagcatccacctctcgcagtgtttgttaacggtaagttgtactacatcactcttaatatttctcttcggcactctactcgagcatatcttgtggttaactggtgtgtctagcgtcatgttttggaactcttgtctgcaggtgtttcagcagcaatgaatgagctaagaccgtgcgcaccgttgagcttgaaagtcgtccttgctcaggaggtggtcaaggcactacatgcagtctctgactccctagttagatacaaagccatgcg

SEQ ID NO: 4013 - DNA, 2713 bp, Sorghum bicolor
ttcatgcacgtggcagttacaaagggaactctgcagtgaggaatgaagtgggtaaagttaattttgtccttaaggacatgtgctctcactctcttgtggttagcttgtgtggtggtggccggaggttgaaggaaaagctaatatgtggagcccatgcgtcagtgagaggaggaagagggcatggacagagaagcagcgagggcaaacaggtaatttcgcatgtcccacagaggtttccaagctcactggcatgcccaccttgtgtgccacatctagcaaaaacataggaggttcgatggcaattatgtaggagtatgcataaagctggcaaatggagaagtgtgacaaaaagttaaaaatctggaccatctgatttagttacaatgtaaatatataaaagggaggtgcagggggattgccaccatctagcagtattttcaaatatcattgccaaaataccatccaaatatatgcactagataactaattaccaaagtagggtgtcacacatgtggatggtatttttgggaatcacacgtcagcatgcattgtactgtggtggatttaattgatcataaaagtaaaatgagaatgatatttaaataaaaataaaatatggaaacccatcaatggctccatcataacagctactaaacgaaaacgaaatatacaaaaggcaagaccttcatttcacacacaccatggacccgacaaggccacaatcaggactttaaataatatcctagtcaccagaagatgatgcgtggaaatgctggaaccaagttcttgaaatgagaggcaatcatgcatggcaaaacattcagtgcaaaccacatcttcgctaccgctctcccactgtcatcttcctccatgagaaattcgatgggaccaagggcattgcgctcgtgctctctctttggggtttcgcctcctacctctggtgagaaggcgcaaaagaagatggaggctcagaagatcaagcagcagttggctatgaagacagacctggaatcaggtgctccttgaggtggatcattgtttttttttgttttttttctagggtcgtgaacacatatgtacaggtatagaaacaagttctctttagaggattggtacagttatatacattttgcacgacattgattcatttgcgattaatttgcaaaaaagaagaagattcattcgcgattgcaaggtagcagagataaaacaaagtgctacgattatgtcctctgcaaaaattgacggcataagctgtgaacagagaagtgcagaaggaaagagaggcaaagataatgccatgagctttgttcttgacttgtcacggtcacaaacggataaacgtgcacagttttagattaccaacaatacgacgaagcaaaaacattttgtacagtatgttacagacgtaggtacaaatcagatttacctacaaaagtaaaataaaacccacacgtggcctacccaccgaacctcaattttttgtacagaacatacagaaaagcaacccctggtcatcaactgtcgccatgttgtggcatagtggcggaattggctcagctactgccttgtttggctgtactcttatccatcatccacatatattcaggtggaaaattagtatggaatgaggtgcagtcaaacaaaatcttaccaatataacttgatttatttctcccctttctttattaagacaagagacatggaatttcatctccgggagaatttcgatatgaggtacactagaaagaagcagccaagggcaaacaggacaacatggacaagatgatttgaaccattctgaatgatgctttggttcattctcctcatgttgttgttgaccccagcctgggccttcgccagagtcatttgctgcagcacacaaaaaagttggacatcagacactatcagaggcatcttccaagtttccatcacaagaataagtggctgcacttctttggttctataggaaatattttatagaaaaaggacaggagaaaaaaaaaactcgacctgcggggggtaagacagcccccgggcattgcattaagaagaaaaccttctcacgcaggtcgagaaaacccccgaacccctgccccacccatacacagcggcaccgtagcccatgtgagaacgaccaacgacctggaccggaccttagacctgtgctttggcatgggacagacgaggggatttttttaaccttagcctgaaaattcgctcccacggggagttgaacccaggacctaaggagtgccgctgggttcctctaaccaactggactagaggccctttggcaaggacaggagaaaaaagaaagttatattaagaatgatgcaccctggtaagctagaaagaataagtggttacattctgatttgcaatactaaatagtctttattatggcccattccaaagtatcaactcacttgaaatgaactataatgcctgcgaaactgaacaataaactagatccagagcaaatcatcatattttaagtattcacatatgaaggaaatgaccataaacaggaacttaggcttctgattcaaaatataaatataatatatgacactaaaacacatgtttcctttaactccttttgtttttggaaacaactatctagtaaaactttaaaataacatggcagcacaaggacaagatagtcaacaataaaaatagcctcaaatcagaccaggtcgactttgacacg

SEQ ID NO: 4014 - DNA, 4142 bp, Sorghum bicolor
agctcgcggcgcggggcgtggccaacggcgtgagcgcgggttcgcggcgggcgaggcgcggacaccggaggttcgcgacaccggaggttcgcgaaaccaccgtgggttcgcggcgggcttctggaggcgtacaccggagatcgagaggagggagataattgcgtgtgtttcctattaggccagtaatccatttcaatgcactgtttccaaaacaaatctgctgacagagcatcaatgaaacgaacaatgaaacaacctccacaatacatgagtttcaccttgatgtttcctaggctgggcaaagcatttaattactacaaatgattggatcacatgcaagatggtgaaacgatttagtcctcagtggggatttcatcctgtttcaccgcttgaaaaacaacgccagcagagtacttccttctctctcctcttcgtttcatgcaaaaagtgcagttttgctgacatggcgctctaataaatgtgcatgacatcctggtaaaacccccactgagactggccttagagccgcgggttgcaggtgcggagcgggcggacgaaaagtttcgcgtcgcaagtgcggagtgggtagaacgaaaatttttgctgtaccaaaaagatgtctaccttctactctttttagttgtaggagattgttagagagtagagacagacaaggaccaccctgtaagccttgaccctgataagatgggatgacttgacaatgccaagtccccggtgtcgacaaacggataactactcatatatcacgttcacgtacgcggggctccgatccgatccactctttcttttgacttcttggttggcaggcgctgtcttgatttttttttgtctacatttgtgataagcttccgatttgtgtaatattatgtgaacaagaatacaaccaaaataagctctctgctaaatcgcgtttatttaccaacaggctacgttgcatactctaccaccggccacaacgagcttgaactccccaagtggagtgcccaactacttcccaaaaaaaaaaatcaaacacaaattcagtcattcagatagtgggagacggagagggagagggtgattaacgcagttagcaactgagcagagtaaacagtcttttaatcctttgcaccacatctttgctttgtaccggttttgatccccaaatcatcaagatcttgattgcacaggaagcaagcaaaaggaaaaaaaaaaaaaggaagcgagcgagcgattaaagcacaaaactagacttggaactgaggaaaattcagatcggagctctcaagaatccccaaatcttggagagtcccaaattgtaagtcattccaagaatcttggagagtcaaacttttctaagtttgactaaatttatattatgatacgaactaagtatcattagatttttttttcttaattatattttcatagtatactcactttacgttacaaatcttagtatttttatttataattttggtcaaacgtaaaaatgctttgactcaccgagatttgcgatggatggagggagtatatctttgccccacgttcagcccaaatgctcatctttccccccacgttcttcgcagtcggcccaaacaggctcgtaagagtagttgggctgagcgtgcctccgtatgggccggcaaacgaaatcctcctttcacggccttttctccccacctttatggctttatcaccgaggaacacggacacaaaacaattttccgtgtgtttcccccatgcggccacggcccacgcctttgtgcgtcagaatttaccgttccaccaccccacgtcccgtctccaacggtcgatttcctcccttctctgccggttgccctgccttcaaaacccaccacacgtcgcctccccttaaaccctcctccccaacccctctagtccaagtccacttctgtctccctccgcgtacggcacacctgatcccccacttcattcattgaagaggccgagtcgggggaggaagggggcagggggagatggtgacggcggccgcggagacgatggggatgtcgccgtacgaggcggcgagggagcggaatgtgcaggagaacaagcgcaagatggaggcgctcaacctgcgccacctctccgccgtcatcaaggaggcacccaagaccccttcccctctggtctgatgcggctgccttccttccttcgttcgttcgtcttcgcctgccgtttgtctgactggccctttgttttgttttgttttgttttgtttttgtttttgcggcggagcagaagcccaagaggcgcaggatcatcgagaacgcggtcgtggttccctcgcctcctaggaggtcccgccggcttgcgcaactccctgaggtcaagtacgcagaggtatctgttctgtcctcttttgcctgctccgttttctttttgcgggtcaaatgaatgcacatagtattatttcgttatttttagttattacttccagacgtgtttctgttgctgctcatttgctcagcatggtagtttcttatttccggctcaaggcttcccatttctttccaccggaaacagagcaacattttatttctccgctcttattaaattgaaacatttgtggtgtgtaccaagttgccaacccatgtagtgtaactgtgtaagcacaatctgttcactgtaccgatagtttttgaattttttccaagatttatgtgtcgcaacagattgttttctttcctttataataaaatcgtttcaaaaggcatttctttataaatgtttcttctaacaaccatcctgtaatgtaacatggcacaataaagaacattacatcgtgccgttttgcctagcatccatgtcatgaactcatcatcaatttcaaccatttcttttttactgacaagttgtatttaccaacagatagcaccacacactgcagaaagaatgacaaggtatgtggatatttgctagcggtagcggcctagtatgaccgatcataggagctataacatatggtctgctcaacaatccttttcttccgtttcttccatagatctcctagaaaaccagctgacctcatctacttggcaagaagcggaacagtttccatgaaagctaggttggaggcaacaagaaaggccgaggagctagaatcacaacttgaccctgacatcccatcctttgtgaaggcaatgttgcattcacatgtggttcgaggtttttggctggtgagttagtgaatactcatctctatgcagtttgctctccagaaacttcttagctcatttcatgttttctctttctgtatgcatgctcctcccagcaacttccgtgccatttctgtcacacttacatgccaaagcaagactccattatcaccttggtggatgagaagggtgaagaattcgccaccaactaccttgcctacaagaaagggctaagtggcggatgggctggttttgctctatgccatgggatgcatgacggagatgcagctgtttttcagttgattaagcccacgaccttcaaggtactgaataactcggagctccaagcatgtttttgtttttctctttagaatgttcggtgctcattcacaatgaattcgtctcccaggtgtatatcgtccgagcagcttctgatgatggcagtgaggttgatgagtgagtctgcatcacgcgacagctgtactaagtactaacttagcaggaggtttagcaggaggtggaaagtgggatttgggtatttttaggctttatctgtcaggattgccctagtatgtgttttatctgtatgtctgtcggtactcgatgctactagtgagactcctaagatgcagaagtcataacttgcaaaatgcattatgagctattttctggccacggcatgttgttgtcctaatggaagtttcagaaaatgcatgtctcgtgactattctttcacctaatacttatacctaaattgatgcttcttgatgcaacatgcgccaacatgtacaacaaaactctaagaataggacagagatggcgcaaaggcatgctagatatgaaatcaatctttagctctcatacatcagacatcaatgtcatcctacaacttttgaagccttcagtcctctcccttcatcattgaactgtatttgcatgggtgcagcatcatgttgagga

SEQ ID NO: 4015 - DNA, 9638 bp, Sorghum bicolor
aactgtagcagctttctgcagatcctgggagtaccgtgggacatgcatgaaccgaccaaagagattctatctattgctgaccgcagggccttttcgatagtcttacaaaatctgcaattgcaatagcaggcaacgggccaaaatctccgttccctatcagcaaacttccagaatctgcatattataacgtgagtctccacggactagtagtaaagaaaccaaccctttataacaaaacctctgaatttttaactgtccatcaatctctcaaattcagaaaagaaccgacatggaaaatactacgcgaaaaaagcagcatataattgtggacttgctacatccacagccacctaccagaaaagggacattctaaaaaggaggcactgtattgtcactcttggctacatggccatgctcacggccactaattcctcttcagatcaaatccatcatccatgtggaaaagagggagggggagggggacacacaccaaacaaatgcaacgtctcgcgcgccgttcacaggtgaagcacaagcagcgcgcgcgagctgcccaaaaaagcaagcaggtcaaaggccaccgaaaaggaggagacgcatccaaccaaaagtactctcaggaagacaggaacgcatgtacgacattcagagctcgtgttctaggcgccctgctcccaaacacctgtctggaaactatagcacctagtaggacagatgggttaaacagtaaccatgtaaaaaaaagctgtctttggatcatgcacgccggtgttgatgggatggtttgtagataagcatcgagtttaatggactgaaaccatacgctcaaaagagaatttatgtgttcagaatgacttccctgccctcggtgtccagatgctttgttttcttcagcaagcacacatcatcgacctgctgcattttctttagagctatctgtgtgtgaggaaatgatttccagtggtcctggggaacaaatagaccgctagtgctattcactccacacatgtaaagggtacaaagacttcgttgtcaattcaggtagttggttaattgacattgaactgcacctctggagtaacaacgattgattcagaatataccgtgtgtagtaactttgcaatggctgagcgaaatcttgcggtaaaagggtccttctttcttttactgaccaacagatcatagtagtatatgtttatcatctttatcggccactgattgcagcaaatgctcagcttttaatggccaattaagataaactagcttccagttcttggtccctctttcagaaagctatgtgttgttcttgcttacacgcttcctccctcttctcttcttttgtccgtcgatattgcattaaaagtaccatatgggatgtttgctcctctagtggctgaaccaacttcctaaatccagtgctctgccagatccatccaagcttatattaatgttccagctttaaagcttgtcacatgcattcttttttaagaaaatataacatctttttaagaatcctttcatgaagattgtttccaccattgatgtttccaactaattttgctagtttagtcattggaaagatttaaaggaaaaacccacaaagtcaaaggctcaaattcgaatatcagattgaaaaaaaaacatggttgctagaataatgccacgtggtcttggattcttctttgtaccgctcattttctcgtctctttcgcaaaaaggaaaaaaaaagagtatcctcattttactccgtcatgcatgccggaaaaagcagacatttaccgtttccctcttggacgaggcgaaacagaagttgttcgctaaactagggcgagccggcaaaagataccgaaaaagatactgttccttcaatgattacacggttttgcccctctcgctcgccgttgcgtggcgcttttgtggacgacgccgtcgtcgccagccagctttcatgtggctgtgcgctgccccttccctccctccctctccgcacctccagaaaaatccattctttactccgagtatttagcctcgcctgttgccggtacatctcttcccgcggccgttgtttgcgtggaaccactcctccccaaatctctcctgtcagagttgatacgaaatttcttgttgttcggttttagatcgatttctttacggcgtattttggttgcatcgcggaccggctccggagccatccggtcctaagaccgtaccagcgaatttgtttggcttgaggtgcgggcgctgagcggtcctgtgccgtagattcaaaggcgcgggaaatctctggtcgctgggttgagttgaatcgatctggatccgtttatcgctagtttgggcgtccttgatctgaaaggtggaagctttggttgggttttctcctccagagcatttgcgtttctgaggggctaagatgctctatttgaagcagccgacgaggagctgagtctttctttttttaatcacaatttctctcgtcgtttgttgatctgatccgatggaggctatgacgggtggcaaattccttgaaaagtttcggctctacgaaaccagatcggtacgaatctcttgcaaatcttgcttcctctgttggttccagtttaactcagagatccctatgacaccaaacattttgtgtttgacttgttactagttgtgtttttaaacttctgtttatgatgaattcttgtgtgatttaatattaccatcgcgtgatgggtatccattatgattttttctgttcaattaggttactagaaagggaaaaagtctggaaaaaggttgcaaaagatccttttgttcctttttgcaattgaggaacgagaatgaaaacaaaaagaccgtttccctttttgctaattccttgcaattgtttcagatgtattaaaccgtttgctagaatgatgttttcgttttactgttgtgtagtttggctcctaatgtgcaatagccttctgctttgactgtgttatgccaattcaaaaatacaaggtttcagctttcatttgcatatgcatatgccttttcaagtctccaggttatctagctctgtgatctagacatgaagacctcaatgttgatacaatagacaataggcatttttagatgttttttccctgtatactgttccattggtttactgcagatgaggcttgatattgaaagctcgtttgcattttattttatttattgctcaattttattgtacttaatatgtgtatgcctttttggtgtagaaattttatcttattggaagagacaagagcagaatacactggagggtgctaaaaattgatcggttggagtccactgagctgggtgtcgaggaggatccaactatttacacggaggatgaatgccaagaactgctttgccggattcatgtggggaacatgttgactggtggactgaaatttgtcacaaaatgttacggaatagttggtaattgcaacatttgtcgaacatatcaatcacaactctcttgcttttcacttcgaattataacatttacttatctgtttattcaggttttgtaaagtttcttggtccttattacatggttataataaccaggagaaggaaaattggcacaatatgtggccatgaaatttactccgttggcaagagcgaaatgatcgcaattccaagtgttatagtctggcccaacgtggcttattctagggatgagaacaggtcttttattttttcatcaacatgtaaatattgtgtattgcctgttgtaattccatcagtggttcttaacattaccaataatgccagcttgctatgtagtgtacattttatagctttgctattcatctacctcattgttgctttctttccacatatttggtctcattttggttgctatgttgtgttgaggcactcttggtgtttgatgtaccccctccctccttcgtattgttttgcataatggcattccagttttcttcatttgttcgtgttctagtagaacatggacaattccattttatgattttgttcgattgtacaataatacagtaatattttgttcgttgtgtgcatttagctccatttctcctatgtatataaatttgtttgttcagaaacaacatacatccaactcatatagccaatatacataatggaaattcttgcagttccgagccatgtgtaagttgctcgtatgattggaggtatatagagaagtttcaaatttccttgctcctgtagtattctacttattaacattcatcgttccatatccataacaatatttttcaacttcttttttcatctttgttgtatgaagagatttatgttctcgtctcttaatttctgtaggtataagcgcctgctttgttcagttgatctttcgaaggatttcttcttcagctactcttacaacatcatgcgcagccttcagaagaacatatccgagaagaatactgggcaggttgtttatgaaacaatgtgtgtatggaatgaatttctgacgagagcaattcggaatcatctcaagaatacctgttggactgttgccttagtccatggattttttaaacaggtatattcttctgcggtagctaaattgcaagttcttttgctagtgtgttaattgatccctcctttaaaattctgattatgagcttatccatatcaccagtaccgtctattcatcattgaagaccacaagtagggctgctgctaactcaatgacaccccactaacttatgcgttttactccacgtctcatgactgatatatagtgaaagcttgaaacaaggtttgcaaaggcatggctttgtataacctgctgacatttttcagtttgagctgcttgaggctttcctgagtcgaaacctttgctcgtaagtctcagcagactgttattatttttattcagttcttctaatccatcttttatatatgttgctgattcagggtaacatcatataaacttttttccctaatgcttcattatgaaattccattgctatattttagccattttgattttctcacaagtgtcgggcactgtctcttgatcctagtccaaggacagcaaaaacatctaaaaaaatggcagtcctggttacatatgcaaataaagtgccatataaagacatgctaatacatttgttttggtgtgacagtcgaagctctctgtatctggcaaggatttttggttgacccttatagctaggcgctcgcgacattttgctggaaccaggtttgtgttacaattttggagccaagctttgtagtttaatttggataaaaaacacacactcaagcagccaattctgtcattctgtgttacttttatttcaggcttttaaccttttgctgaaagtttttgcattcactttgaattatagattcttgaaacgtggagttaatgaaaagggcagggtagccaatgatgttgagactgaacagattgtttttgaagacacatctgatggaatcccaactcagatagcttctgttgtacaacatagaggatcgatacctcttgtctggtttcaggagacttcaaggcttaatattagaccagatattatatgtaagttattcagttacgtttattatgagtttgtatgttgactacctcatctgatattctaaatgtgttgctgtacagtaaaacctgatgtggactacaaggcgactcgccttcattttgagaaccttgcacttagatatgggaatccaataatcatcttgaacttaataaaggcaagtccagcatcaatgttgtttatactttgatgtgaatgtcttcacttatactttgaatcccttaattatatttcaatcagacccgcgagaagaagccccgtgaatctctgctccgtgcagaatttgcaaaggctatccattacattaacaagagcctacctgatgacaagcgtctaaaatttttacacatggatctgagtaagctttctcgaaggtaatgcattgtattccaagtgaatcttatgtaagattgctccttcaacgtaagacaatcatcctgtatgtacctttgtgtgaagtactacctgctactttcaggaaaggaaccaatgtgcttgcactgttgaacaaggtggcatcagatgtgttggatctaactgaattcctccactgcgaaataagtacatcaacaaaacctgatgacacctcaaggtagcctatggtctacttaggaacattctaaagtttactacgatatttttttccttaaaaatgcacaagttcaagttgtagtatttatgccaaattcatatgttagagatcacattttttttgtacatttgtaattggtcgttttttcagtcctaatactctttatccttttattacagtggagaagaaactgttggcagaccacttgatgacagaagtagcagagatcaaactgaatgtgcagctaagttggcacctcttttattacagaagggtgtcctcaggacaaattgcatagactgcttggatcgcacaaatgttgcacaatttgcatatggtttagttgctttagggcgtcaacttcatgtattggggcttattgaagcacagaaaattgaattgcatgatcctctggctgatgatctgatggatttctatgaacggatgggtgatacattagctattcagtatggtggttctgctgctcacaacaaggtatatctcatgttatattagcttttactctggaacatgttctacatttttcactactgaaaggcttaattcataaggctatgcttctttcttttgtaaatataagcaacataaatttgtggcatctgaatactctgacagctatgtaaaatgctcttaactatgtctacagttctttcttctaaagtggttctcttgtatcaaagtcaactagtcataaaaagaccatttgatgttccaaatctctttgttgatatcagtctgatttcatgtgactcatttgccatagatcttctgtgagcaaaggggccaatggaaggcagcaacccaatctcaggagttccttcgaacccttcaacgctactacaataatgcctacactgatcacgagaagcaggatgctataaacatgtatgcttctgaatatattgcaaaataatattctgtagggataactgaaccagtggcaagcattgatatttgcatgttcatcaaagatagcttattacctgtccttaaaaaattgcaggttcttaggtcatttccaacctcagcaagggaaacctgcattgtggaagctggactcagatcagcattacaacattgggaggcaaggaactttaaaagaagagattggaaggtgcagattacaagcttccaatatttcttgaaatggctatatcttatattcacctattatttatacacttgtgcattatagtatgatagtttactacttaacacaagcatttttctctactcgtgaaaatcagatttttccacatgaaaaagttagctaggattttgatgtattgaccatggatcaatagaccttatttcaatgtacaaatctaaaggcctcgagaacttagagcaacaaaaagtactttttttaccctgtttcaagaagtaccactacttattccatgagagctgtcaaaatgattatgcaactgatgtgtaatgcttgggaacaccgaatattgtttaaaactgcaaaatatagggcaacaagaacttaggacagcaaaaactagatatttttgcagtctagactcagctggtagttctgtcaattgtgctactcttgtactggttctttagactgttctaatttatcaatcctcatcttgtttcaccagatcattcataaagaggtcgctatcagatggtaacatattgttggagaacagcttgcctataactaactgtaacaatgaaacaaacagcacagaattgctcccaatgcaacagctggatgatattagagaaccttctgattctgcgccagagatctccatatgcgaacctaacccgtgctccaggtgcgtcattacctgcatgaatttggtgggccactggaatttgttttgtacatgaatgcaatatgagctaattgtgtctttcttttatatatattcagtatgaactatggcacagtgcctggaagacactccatgtcagaagagcggcagagttatttgaaaagattaggttaccctgaattgcattcttcaaatttccttgaccttgatttgttgtcatcttcagggaattcgtgtgatgaggaagtttttgagaggtaacataaatagacttccagtaatttgcatatcctactactcgccgtgcactgttaagatgtatcgcatctgtgatttgcaggtcatcactgatcaattcacctatggatgtgatcagtgttgaatcatctacgtcatacagtgaacaaggacacatagatgaggttagcctcattatctgatcttctttttccgagagcatgcaatgagaattataatcaactgattttttggttactcggctttcctcatatctcaacttatgctgtgaacattgttcattttaccagggcagggatgacacagatctttcccgttctagcagccagctctcagacgttcgggactattctgatcgctttgcgcactgggtcgcaaatggaggcatgctttgctactaggccctgggttttgtcttggtgaccgaatttgtgacacagcaagaaatggatgtctagcggatagagcagacgaaaattgctgacggctagccggctaggtgcatctgcctgcagaggcggcgtagcggaagagattgtggacatgggagaagtctcgcatcggcttggctgtgatcacttgaaggcttgaacctgatattcgtcgaatggagattttggtggttggattgggtataggattcaatttgctatggtgaaaaattttgaccatagtttagacaataaataggcaaaatatatctgattcttttagtttagcttaccctacgttccccttcatagaaaattatcaaaaagaaaaaaaatggaaaatctattagaaaaaggagaaaaaaccttagataaagaatacttttgatgtaaatagttagtatgttattacagaagtataaatatttggtacttgttcggtttcctggcggtgtctttataattgtttttgtgcgctcttcgtctacgcttgctgacgacaggttatgttggggcaacgttgtggtttagtttcaaaatgctgtgtgccgatctaggatatcatattatgtcttagaaaaacattatgaacttttcattattatatgttttgtgtgatattgtatctctagtgttaatttattattaaatttcctaataagctactaaaataaaggagaaaaataagttatattttttagcattacttgacgtcctctatatatctaaaaaaataacaaattagataaactatttaaaatagctggagggaataaattgaaccaaatattagtttagaggttatcttgacatagatcaaggggagtaatttagattttcttcattaatttatttattttatgtctcgggtgtttatataggctaaacctgagaggattaatttagttttttttaatttatttatttaatatgttctctcgtgttgacgtgttatttctggagttccgctgat

SEQ ID NO: 4016 - DNA, 5881 bp, Sorghum bicolor
tattcagattatcatcttggatgtaatgccaatgcatatgatgacatgtcacgttttagtctgcttaacaccagagtgttacagctccctagctagccagccgctagattgcccttttgcctctagtgattgctggaggttagccaaaaaggtcatactggatcacgtggcaaatttttaaaggtttttggcacacaaaaatagcgtgacattggaggaaatttttttggcaccaaaaacacgtataaacttcggtagtgagactgtgaacataaatactcaattttagagtgtttttagttatgtgcatctacctcataaattttgtagataaaacttataatttattaggtttagtatatataagaagttaatggtagagaaaacaacctataaagtagagtaactcttatttattaggctactcttgtggatcgggttgacattggttgtgggctttggtgcattgatgagacactagcttgtggatggttgggatggaccaactttataagcaagactcgtagcctgttagaacgggaccaactataaaaatgaagagtgtttggaaatatctatttattcgttgaaattatagtatatgttgctcgattccattcatatacattttggaaatccatcaatcatccccctagagccctctcgtcacaactgttgtgctcaccttacaccatccaccatctatatatacccttctttatgttgactttattggctcctactcaatctccttgaaccatgacatatcctccttgggtgaaaacctaactttgctaggttttcgaaacaccaattgaagtttgtggatatgggagttcaaagttgctgtttaacttcataatctgatattattttttgaggcatcatcttgttcggattccaatttccaaacttagagatcctgaatcacatgtgacttcttaattctaaactagtttctctagtccattttttgaaattatattcgagatggaagttcaatgtattcagtgcagtgatgcgatcttcttatctaagtgagtttcaaaagagatagaattcgatggattatattagtacaaaagagtacaatggggtttttctcccgacctcgactcctcccgagtcccaacacgctcctctcctcctgacacactcctcttctccccacgcgttgctctccccggtgagctcctcttggtggccgtgcccaactctctctctctctctctctctctctctcccgcccaacaagctcctctactgtgtaagccccactcgcgcgcgagctccctagccatggtggatccgtcgaggtaggcctcctcctccccttcctccccctagattttctagttagggttttggcgagcttctccccctctttcttctccaactccgatgggtataaaaggggccaaccgggagaggtaggcaggccttgcggtgggaatggtggtcaggtggtttagagacctgacagcggtggaggcggtgggaccagggaggggcgagggcgtcgtagcggagttggcgaagatggcgacgatgggggaaggggaagggggggggagtacgcactccagagctctagccattcctagcgctcgtagtgagacgatggtcaatggcgggaaagagaaagaagataaatagatgttgctatgagccattagatgaccagatcaacgggtctagaaattgggtgttttggggcctcaaaatgcccactgctctctagacagactattttttaatagttgctcacaaaactttgccatcaatcgtcacaaggagtatagtgagaaaaatggtatccatggataacacggtccatcgcgtaggcccatcatgtagccagcctagccgccgcccgccgtattcgtatggaagacggcgggccagcgtgacgatgacgactgacgaggcttttgggcgcgtgcggccgaagcaagcactgcacaaatggagtggccatccggcaccggcgaaacacgaccagcaaaccaccggaccacctccgtcaaggcccacagaagaagcgaaacggatagagggaaaaaaaggaggaggaaaaaatactagtagcgggcgacgcggccgcgaggcaggcaggtagaccacgccgcacgccagccagcggccagcgctcgccccgccgcgctccggcatttcccattctcccttcctccctgccgccgctcccccgtccttcccgccgcggactcgctaccccgcctctcgtctcgcgcactaaggagccaggtgccggttgccggctcgacctctccctcatcctcgcgggggctgctgctgctgccgcgagcatggccacaggcgccatcacgccgccgccggtggccggcgcgcggcgcgtcccccgtggacggggattcctccaccggcgcctcgccgcatcgcctatgtgagcacttccttaggttgctgttgtgtttcggttaattcggtattacacatccgcttcgctgttgttggaggaactctcgtggtggtttttagatgctagaaataacggcaatggaggaaagggagaaaatcctgtctggagaaggaagagaaaaatcagtgagatttcaaggcgtcgttggagcattgggttagttaggttgcgcctccttcacgttagactctgtgactggaaagactagccaatcggttcaatgcaggatcacactgtcttcatttcctttctttgcgcaaaatttgtccggtactggttcattgcgccaattctcatggcacgtgttccttcaatccaaaggggaaaccataaatatgatgcggcgctctgtttttttaatgaaaaataaaagaggaaagaaaggggataaggatgtccacatggttgtaaaaatagaaaataagaaggaaaatatgtggcggagctattatagggtcttgtagtcctgctggctttttggttgcttattatggcttggtggtgtagttcgaatgttatactcaacattaggaccacaattgaacttattattaggttccactgaagcaaagtcttcagtgattatgttcttgcttttcagtcatagagcttgcgttgagcataacttcatgcttagatcttatgtccattgttcattattttcatgcatagtcatttttcttccccaggaaagatgaatccatgatgatttccacagatggtagaaatgaggagacagacactgacagcctcaatgttgccagaggattgtctcaccctgggctttcctcaagtttatccaataaggcatcagtggccccaacccctttgcttccttctggaccatctgatctccggttcaatcgtcttcgaccctcaattgatgaaagtgattgcaaatacaaaagattatttggctgctatgttgctcgtgaggctgtaattgatgaggaatattgggtattactcttgttattagaacatattgttcatttgttctgtttagcagacatagcttccacatgaatttgtaatttactgattgctaattattgattactaacatatgctagctatttatagcttacatatccaccttttattcagtgacctacaattatgatttactctacctaccactatgccttacaagttacatctctccttactaatgattgatagattgctgcatggttgagagcggaagatcactatgaaaatgagtcaggcaatcggtaagactttatctttatggggaatttctgtagtcttccttgttgtctgtactgctatacatttactgttagcatggtccttgcagctactttatcattatttttttcctgcagctatgttgaaagctttaaaagaaagtttgcatcaaaggtacttgcgtaaacaacttagtagtgttttctgtgtgcttaaaagtaattgagataggatgtacatcttctttgtaacaagtaaatattaaaaaattacagtgacctctgttcaaatagctttgttgatgcaatgttataaattattcgcattaatttgtcacattccgatcattcaatagtttctgttctggttcaaatgtatcagagtctgtcatctcactgcaggaattccatgcattaaagaagagatgcagcaaacagcacggagaaaagtatatctgttttgtcgcagtacgtgataaaaatctctgtttgatttgtttcaattgttcctcatatttgccactagatctttgttgcagcatattttgttcataaagcatgtcgcagggaatcatgaacaaaccaaatggtctctcttacaattgaccaataattaatgaaagcctcgctcttggcaactatctcagtttacatttctgttaaagctgtctttattgattttttcttcattttttccacagctgaaaatattggtgccttatgcttaatattgcaggtaaagaatgatgacctcaggcgaaccgtcctgaatagtgttgttggtaccttagatgtatgtgtaagacatcctctacatggtgagaaatttcctgaggtacggtataattgtaccttctctatgtttttttttctgccgctgtatttagaagttatatctacaagttatccacaggagcctggaaagtcgtcacttcactgtcgaatttatcagcctgatcagccaaaatttgggtacgtaacaaatgtatgtgttgctaaatatgcgaggcgtcaagggattgccagcaacatgctgttattggccatagatgctgcaagactcaacggtacagaaaacattgagctattctagaataccctgtcccaaatgaaaatgcacaatccgctgatatcttcaacccattacaggtgctgaaaatatttacattcatgtgcataaagacaacttaccagcatggaggctctatgatcagataggattcaaggtacatgccttgtctcagtttagccctgaaaaatcttcagtgaagttatagaagtataaattgaaaataacacccatgctatttgtttgtagatggttgaccaggatggcggctcttgtcgttcatcagatctgtgcttactctccttcagttcatagggcttgctgactagataggaatggaagggagtagttccatctccctgtgcaaggaaatgccatcagtcctcgcgatttggaaaggcgggatggtatgtgccaaggaataccttcaccaccttgtacatgaccaaagtgatttcaaatgtttgtgactttcgatattgtcactaaatcggtgacagttctgaattctgatgcctcagaacgttgaggtatctgaatacttcaaaagcttctgtcatgtatagtttgcgcagccagcaaagtgcaaatgtttcttttttcccatatgattttgcaatgaaaaaatgaaaatacatgatcttggtacctgatactgtggctgtactcttgttcctggttatatgcaattgtcatgtttgagcaacagatgaacaccaatgcctcgcatgtcaggtaaacagatctatggtagccatatgtacaaatcgaatatgttgcattgcccttcatagtgagacgtgaggtttgttattacttcgctggagctgtgccgagcgcttatcctggtaaataaaattacaaaaaaaaaatcacttatgaattcataagtcacgtgcaaattgcataaaacgattggatgaccgagattaatgagacttattcaacggcctttacttataaaattttctgaaaatttacaaaatcgaatcgaattcgtactccttaaccaaaaccagtactgacctcgaaggctccacctccacgcgtgtgggccaacctccccgtgtggtttacacggaggaccggaggagcaccagagttatctccggctcgaacccgagatcggaccgcacaaga

SEQ ID NO: 4017 - DNA, 2839 bp, Sorghum bicolor
cacccgacagacttcttgagtcatttggaactcgtgcacgccgatcagaagtctttgagacaatgatgggtgcagggccgccagcgggggagggggttgagtttatccgtttatgttgtcaaaaaacggtagatgtttaatttttttaaggctctcttggaaaaactatttttatcctgaaactaattcgttgcctaagacctgtttagatccaggggctagagctagtttgcgctagtttaggctcaactagcccaaaagtagctaaacaggagggttagatagctagtttttttgcaattagcttaaaaaactatctctccaaagagatgattatttaggttagttttggttggacctacatcaattcatttttctctccaactcaggccacacgggatcgagcttatcctcttccctaacgattgatctaccgtaccgatccgccacatttattgtcattttaacccttgcatccaaacacattttcagctagagctagttcagggctagttctgagctaaaaactaactctaacctccagccgagctagagtatccaaacacaaacacggccgttgtaaattatgtgttcacccctattaattagcgaggctgttttctagaatcaattttatgacaacgaaggaaaagaccaaattaatacaaacttgtaacatgtaagtagcaaggagtgaatctcgccgatgtattggttaacaaactaaatgctttcgccttatgcaaattttgccaataaagtttataaaaagaattggcaagaggaattaatacaaacaggtttgtctgtgaacccacaaaataataagcctaattgtgggttttgcagacaaatcccgattgcattcctgtataagaagcaagagaaactaaacaacgccagatgttggtaaataaaaataatacaaagagcttgtattcaatcaaacaagaataaatgcggtcttcctttgttgccacgttagcagcctgcgtgacgttgggaatcagctcacttgcagttgcagggcggccgcgtacattcttctggactttgatcacataatcacacttgtcaacttgcgcctaccttgtgctttcagttaagtacctgctgtgacatgcatgctagtagtaactgctaaactagtttgtagcaggaccttttgatacaccttattccgcttctttttgaggaactactcatcccaggcttactttgctgaccttattagcttccgatttcatggtttcagacgaaataaaccaactcgtcaaatcgcgctggataccaaccttagggctcacgcttgtttttgtttactccccaaataaacagcaggaatatgagcagatgaaagtgatgtgtctgtctctgccacagtgccactgcattgttgcctaccactgcttgcccctaattaatgccaacacagcacgtaccgtaaccccgtacggattatatatccagatccggtgtagtaatataatcttgcagatcgaacctatgacgtcgaattgctactatgctttgcatcttccagaacaataataaagctgaatatgatcgcacaatcatagagctgtagctagctttacttcgctgaatatgatcagagaaccgtctaaggctacaccatctgttgagcacttgaaccactacctgcctctgggcatctgattccaagctcactagctctgaagaatctcctttacgtcgcagtccaacgcccaccaccaatagtcctctgcattgcatgcatgatatataggaatcaaaagctatgcggccggattggtgatagatagatagatataaccaaaggctctctccttgcgtctgaagattggttggttcatagttagcataaagaagcattattctcattctcaagaagcaagcagctacacgcgcgctacataggcaccagactctgagagagcagagcgcgcgcgagagagagaggccgtgcacggtgcacctcgtccatcctcgtcgccatggggaggtcctcttccacggagaagctggtgtgcttcgtgctggcggtcctggccgtgctgtccccgctgtacatcgaccggcggcccgcggcggagcgcgaggaggatgaggacgaggacggcggcccgtcggcgctgtggctgccggcggtactcgtcgcgctcatcgcggccatcaacgtcacgtgcttcatggaccggcgcgtcgtcaggttcgacccctactggatccaccgcgtgtgggggtcctccggcggcctcctggccatgctgctgctcctcggcttcgtgctcaggtgcaaggcgtcgtccctgctgcagtataccagcacctagctatacctcgatgcctcggtcggtcgtcgtcgtcgtggggctttttctttggatcggagaggatgcgggcgtcaggatcagtcactgcgtgttttgtcacacaaatgtgtacggtacccgtgatgatgtagcggtctcgggctctctgcgcatgtgaattctctttgtgcaggctctgcgcatgtgaattagcttcagacacggtgccttctcgcgaattatgcttctggctggttcagttccaactctccgctcttggcaaatccgtaatccgcgaggttgatatttatctttgctgctattgctctgtgtggtagtagtactatgttactaatatcatacagctgcaaaacgaactagcaaagtagcgatagtgttagcaactgtgccaaaaattaagactaatttactggcatcagaaaacaaagttatctatgacaaggatggattggtcatctccgtggaagtggcaggaacaatgcacaatcttttcatacctt

SEQ ID NO: 4018 - DNA, 2732 bp, Sorghum bicolor
agtcacggcattagtactagagtaggtttcaagaattggcaggcaggcagccagacacagctccagttctctaataacgcaatgtaagtgatggcgacctttcgccgacgaggaacaacagtagcataattctagtattttctgtaaccatcacttgcattagggcgtgtttagattgggaacgaaaattttttgggtgtcacatcggatgtgtcggaaggatgtcgggaggggtttttagaaactaataaaaaaacaaattacatagctcgtcagaaaactgcaagacaaatttattaagcataattaatctgtcattagcatatgtaggttactgtagcacttaaggctaatcatggagtaactaggcttaaaagattcgtctcgcgattctcaactaaactgtgtaattattttatttttttatctacatttaatgtttcatgcatgtgtccaaagattcgatgggatgggtgaaaaatttttgggtggggaactaaacagggccttagagaattggagttggaactgtgcgtccaggtccagcgttcagctccagcgtgccgccgttcgcacgggaactaacaagtgtcagtcagatcagatggtcagaaggcgaccgtttccggttcccacgcaatggcagactggcagtgataagcccagaacaacagggagatcagagtttcgcttaaacaatatttttctatctaaaaaatcagccaaccttatttccagtggtggtttttaagccaagtgaataggctgatcatagattatactattccatccggataaaaccaggcatgacaggctcgtgtatctttgtttcttttccttttaatgaaaaacgggcacaaatccaccggtcgcggaaaaaaaaaccaggcatgattgctacagttgcagccatcatcagcccatcactaccggagtaccgggcgctccacagtatttttacatgtaacaaaaaaagcaaaccaagcgatagttgtcttcagcatcagcgaaagtttctactgcttggtcttctagaactctcacatcaccaaatcattttcttgttccatttgtgtaccgcgcgcgacctcaagttcattatttatggttccaggatttaagggacccagatgatcagatggacccgttgacttccagtggcgagcgcacgaagcagcttcgccagtggcgtcgcgaagctgcttcagttggcgctttttttcttttaggccttgtttagtttgtaaaatttttgagttttggctactgtagcactttcgtttttatttgacaaacattgttcaattatggagtaactaggctcaaaagattcatctcacaaattacagataaactgtacaattagtttttattttcgtctatatttaatactccatacatgcgaccaaagattcgatgtgacggagaatcttgaaaatttttgcgaactaaacaaggccttagaatccagatgaattgattccaaatgaattttggttttggctcagctgtttaaacacagtttgaaatttgggtgactacagtaggtaaaagtaaagtacggagtatatcgattcaaaaaaaaaaggaaaatccagctggctcattatccaccacctctttcagtgccacttgcactgaatggtcctccagtactcgtacttcaagaattccagaaggcacgagcaagatgctactagtactagaaaaaggtctgcctcacgtgtgtcacgagctcctctaatcaggatttggaacagaatgcgtgatcacaagttttaccaaatctgtcccaagcaacacctgaatcagattcagatgcagtacgagtagtcagtatcatacatctggcgggcggtactgtgctgacatgtactacacgtcgcaccgacgcaagtaaacaaaactatcatcaaaatttataatacaacgtcataccactatcatacaacgtaacatttccctgtattagtttactgcagtgccgcagactactatgaatgttcgaatccagatcattccactcaggagaagacgtgcccaaattattgtgtgttttcccccacgagatcgtaaaatcactgtcaacagttaattcaggtcaaccatatccaggcacgaagcttcatcgttcctctgcaacgccagctcaccaagatgccaacacatgccatgccactatgtcgtccttcaaaaacctgctagagtttttaactgggggtgcatatccgtcgattctagaacaccttgattattcgatttcctgggcccgtgatactgctgatgaataggtttacagggagggcttttaccacaagtaagcctcctatacaattcgagttgttatgacatctagattgatttcacacaatcacacgcttgcaactatacaataagctataaagctaactagagagctagttacaactacaagctactctagagctactctagagctacacaagcactacataagtatactaatgaattgagttacaagaatagagctttataccgatcaggggtaagagaaaatatgaacactaagatttatcttcgtggtttgattgcttgccggcaacctatgttcacgttgtggcaagtccaaaatagatggttcacacgctaatggacattacacatcaagctctcactaggacgtagtaagaaccacactagagagcacgtttcgcaccacgatttctctatagttgctttttgcaaatctccca

SEQ ID NO: 4019 - DNA, 6319 bp, Sorghum bicolor
gtcgacagagaccacgacgacgcgacggcggcgtagcagcagcgctcagccatctcgagcgccaccctgatccgctccagctccgccacgcccaaccctcgccgcggctcccgcctcgccggcgacgtgacgtcctcggcgacggaggccttccgcttcttcccgccggcctccccgctcgccatgatcgccgcgattttttagatatagttattacctatcgctataagctaatccacgtacgtccacctagcggcgccggccggcgctcatccatcgccgagttccacgtacgcgcttcgctatataagcgggcgggcgggcgggcggcgacgccattcttgatctggaaactgagctgtatctcaacattgacggcgggggcgatctgacgcgcatgaatttcagatatgctcatgctcctagctagtaaatctcttctcctttgtgcgcctcctccacgggaacgggatcccggattcggtcccgatgcggtaagtgtgttggatgcggctaagatttgaaccatccagcgcgtgcgagtttactgccgcgatcgccatgcatggaaacaaatccctgccgcgatccatctttgcttttactcgctagcgcctccgcgcccagcgctgtcggtggggcgatgccgcctccacggctccccgtccgcgcgctccgcagcgtctggatcccttggtaggcagcacaaggcccgtgcccaccccacaggcccacagccatcttgtggttcttaacgcgcgtggccggccctcggatcagagggaatccggaagagcccagtcattatttagctccagaaactgcaggccgtgacaacttatatactatgatgttggcgaaatctaaaaaaaaggatggaatagattatgacaagtcactactgctttgacagattccatgttaagtactcagattaggttaccagttttgggggcagaccgggatcatcatgcgggaaccactgatctcgaaggcccattgtggagagcagagtggttacccaagcagaatgcaatgactctaccgtactcatgagtcatgaccatcgggatgtgtaatatatttgacacttttatccatataatatgcttgaacttgtaatctaagtgcaatggccccgctaaccatttcaaaaaaaaaaggctccgctatatctttcgacatggcaacactatgtgctgagtttcgtacgcgctatcacatactaaaataccactacaatacttgtgtttgtgcatatataacgtagctttacaacagcagttagcatctaataactcgtacataaaatatgatacgatgcacagagacgtctggatttggttccccgggcgcgcgactgtggaatgaggatgatgcggaaacggcaagtatgtcaggcagcatgggcccagctggtgaggatgacagctgattagctgggactgggacaggcccccaccccacactcccacaggcccacagccatcttgtggccatcggatcaaaaggaaatccggaagagcccccagtcattagctccagatgatccacagctttgcactctttaaggggcactcacaatgcagactctatcatggagtctaaagttatttattacctcaaacaatatggacttggagtctaaataagacttggagtcttgtattgggagtgccctaattactctacacaaccgtttaccaacgtgttcgattcgctaatcctcaacccgtgtcgtgtgtgtgacaagcaaaaagccaaaaacccgagagggcgagggtttattcgccagctctagcatatgaaaatgcccagcccagcatgtggctcgtgcatccggtttgtgttcagcttacctggcaagcaaagcatccccccatttcaaaacgatttcgaagcggagccgagagccgaaggcccgaagccagctgcagcgagttcccgcttcgcctgcccccaccaccattccccaagtcctccgaggtcgacgccgacacatggagttggaggggctgtgggcacgggtgctgctcgacgcggcctccgccgcagcgccgggggaccgggcggcgtgggcagcggtgcgggcgcgcgcggtggcgccggtgctggaggccgcggtgtgggcgtgcctcgccatgtcggtcatgctcgtgctcgaggtgtgctacatgagcgtcgccagcttcgtcgccgtcaacctgctgcgccggaccccggagcggcggtaccgctgggagcccatgccctccgggaccgccggcggccagcaggacgatgaggaggccgcggtgggcagcggcggcggcgaggcgtacccgatggtgctcgtgcagatccccatgtacaacgagagggaggtgaggccccgcccgcgtgattctcattatcgatcgccacccgcttctgtatgaaggcattcatccaaccaacaactcacgggcttgcattgttaattaggaggtttcacattcaaaatgcgacgacacttcaggcacgcaagcattgcttcaattctagctcttgtgaatttctcttatattcagaatgcgacggtactaggttcatctttctgtagtgctggtgctccgagtccgaatttctcttatattcaagctgcttgtgtttttttttttgtttccattcgtggtgggaaacttggggctctgtttcgatgtggagttctgtcaacgatttttttgctgctagtttgtacattgatgcggggcccacagtgctaacatgccaaaatgcagagcacatgttaaaatgtcttcagcaatgtcccaggtatacctggacaatatgttaagatgcagcccacgatcgcgtcagataggtcgtttgatctcaactgttggaaccgtggatgccagaatgtcgagtagccatgtttcctgcctgacaggcgcctaaattttattctcagggggtcagcctgttcattacaaacacataacaatgcatgtacctttcgtttgcaggtctacaagctctctattggagcagcatgtgccctcacatggccgctcgaccgtattataatccaagtcttggatgattccaccgatccattcattaaggtgacccaaactgctgcaagataagctgttttttgtttgtttgtttcatccaagcatttctataggcacatgtttgacatgttctaaagataagatgtacttcatccattcatctgatgcaacatgtcaaacaggtactacctagtagttctcgtgatcaataattaaatgaacactagatcagcttggtaagcacatggtgaggtcgtatatgtgcttagcactgcttactcgtactattttgcttgagctatctgtttctggagattacaactcggtggtagcctggtagcattagtgaattgcattgcaagagtgtgcgtgcaattgtatcaagctgtaaggaagtgaagcaatttgctatacgttttatagtgaagggcgctatctgaaaagtcaatcatttttttcctgaacaaactattcaactgcaagaaattaatttcatcaaaacatgactcagagccacagccatatgattagttgacccctatcgaaatcagttaacaatatgggacctttcaatttcttgtaaaatcaataattagttattacctagtaaactccaaagaaccccatttatctttctttagcttattgcgactttctgttcgttttcattgattgaccactttctttgtttctgtcaattttgatcaaatgcaggaacttgtggagcttgaatgcgaggattgggccagaaagaaaataaatataaaatatgaaactcgagaaagtaggaagggatacaaagcaggagccctcaagaagggcatggaacagggttatgcccaagaatgtgattttgtcgccatctttgatgcagattttcagcctgatcctgacttccttttaagaactataccatttcttgtgcataacccgaagattgctttggtacagacacgttgggagtttggtaagcaagctttccatttgtgttctctaatgtgagactacgtacagttgttagctacaaaacattgagttaggctcattactgctaatagttggatgcaatttgctcagcctatgaatgggtaatgtggttgtgtctataatttgaagtgagaacttttgttcattctgaatacaggatgttcctgacctggcctttgccggggaattttgcagtgaactacaatatttgcctactgacaaggatacagaagatgtcactagattatcatttcaaggtagagcaggaatcaggctcatctatgcatgccttctttggtttcaacggtatgaccggaagagcctatgtcaaaagcaatcatgtgagtttgcaatcatatctgactgaagcatttacaggtactgctggtgtgtggcgggtatcagctattagggaagcaggaggatggaaggatcgcaccactgtagaagacatggacttggctgtgcgagcaagtctcaagggatggcaattcctgtatgttggtgatataagggtgcgtctttctgcacacttgtaatagagatgatatttcgatacacacatgcatctgcctatatctgtctgttataacaattttttgtacaggttaagagtgaactcccaagtaccttcaaggcctaccgccatcaacagcacaggtggacttgtggtgctgccaacctcttcagaaaaatggccggggacattgttagaagcaaggcaagcgttcttgaatcaatgtgactgatgaagttacagtatcgtcatttaggccttgtttagttcccacaaaaaaccaaaaacttttcaagattccctatcacatcgaatcttatgacatatgcatggagcattaaatatagatgaaaacaaaaactaattgcacagcttgtaaatcacgagacgaatctgttaagcctagttactccatgattggacaatgtttgtcaaataaaaacgaaagtgctacagtagcgaaatgcaaaaaaatttcacaactaaacaagaccttagtaggaagcatctttattactgtctatatatatgaatgatgcagggggtaactgtatggaagaagcttcatcttctgtacagcttcttctttgtccgaagggtcatcgctcccatcctgacattcctgttctactgcgtcgtgatcccactgtctgttatggtccctgaagtcagtatcccagtctggggaatgttctacattcccactgctatcacggtcatgaacgccatcaggaatccatggtaaattggcccatctttctcctggttcgttaatctcgcctgtttactaatgctaccagttatctcgtgcatgccaggtctatccatctggtgccaatatggatcctgttcgagaacgtcatgtcaatgcaccgaatgcgcgcggcactgacggggttgctggagaccatgtacgtggatgagtgggtggtcaccgagaaggtgggcgaccatgtgaagggcaagctcgagatccctctccttacaccggtgaagccaaccgagtgcgtcgagaggtatgcaggcgatccagcaccagcgaattgtacgcgttgcgctctgtacactacagtgtgtagcactggctgatctggtgtgatcactgcaggatctacgtgcctgagctcctggtggcgttctacctgttgctatgcgcgtcatacgatgtcgtgctcggaaccgggcactgctacctgtacatcttcctccaggccttcgctttcctcgtgctgggatttggcttcgtcggcaccgcgacgccctgttcttgtccatagaccatagtgcatagcccatagctgttgctgcattctcccctgatctgcctcctgtaagtctgtaattagaaaacaagaaagcaattctttgtgtaaatggaacagaataaacgctgcacgcgaacaacgcatttcagtaatagtactccatgtgtgagtgaaatgattttaagtttgatcaaatctgtacgacaaaatgcagaaatttatgacactaaaaataagtagcattaaaaaagattaattataaaatttgtattcatgataacctcagtgctgtctgcatttgacgacagctgcaggtaaaccagcccggtgaacaacactagccgtggcctttgggtgcctggccgcctgggtgggtaagtgggcatgggcctagagtggaccagaagctataagccagtggaagcccatttcagtttgtctgaactgaacccgtcgctgcgatggacagcacacacagcacggagccacggactcatcgcgcgtcgccgtcg

SEQ ID NO: 4020 - DNA, 2968 bp, Sorghum bicolor
  misc_feature (1010)..(1109): n is a, c, g, or t
gtgctagtgaactttaattgcaaacgatagtggactgttgaggtggacaccttgcttattaagagaaattgatattgagaaatgactgctgaggtggacgttttgtatgtcaagaaaaatatataatgtagttttactttataagagttatagattgcataacatgattgtatagagaggatgagtggattcttaatggaatttcaatgattatagaagcaatcaagatcatgatactcaatagcttgtcttcagataaattgtgttcttctactatctatttctcttctgtattctgtataagccggtttagttttcctatcacatcgcgtgtaacccatgtcaccgaaccaagatgcaaaataaagtgactgcatgcatgcttcatctagtttggccttttattacctattttcctctcaagccttccaatggatcctcaaactttattgtttttgttaatactaaagcttccttcgtctaaaaaacctgaaacaaaacaagaccattaaagcataagaatcaagaggtgattcattataatacataaagttaataatataatattagatataattgtttgtttggcagaaaagttgtagctgaaagtagaaagaatatacaatcttgcagtgcagcaggaaagtacccgttggctaccgtggaagtggaagcagctgtcctccatgtccagttccagtgtcctgaagcgtcctgcactcctggtgcagcgttgcgcggccatggaagatgatgccggcccagcttgtgcttgtgcatgcgctccagttgggagctgggactttcgcgcggccacagtcaacaataatgccgttggcgtcggtgtcgtaatcctccggcgatgctccctcgatcagccgccacccccccacccttttggcatggaggatgcattaccactgtcatctagcaaatgaagctcttttcttatacctctttcttccaaatctactctagtagaaactgtgtcttttgtgttgtttggaatnnnnnnnnnnnnnnnnnnnnnnnnnnnnnnnnnnnnnnnnnnnnnnnnnnnnnnnnnnnnnnnnnnnnnnnnnnnnnnnnnnnnnnnnnnnnnnnnnnnnccccccccccccccccccccccccccccctcggcttcctcgatcgacagcaccgccttcggtgtccacgtacttcgacgacgtcgcgcgcgagcttcttccggatcgacatatagctcgccggcgtcgagaccttcacccggtgctcacgagcctgcgtggaccgccgtggatcggcatgagaggcgaggatgcggcggcgggcgagcagcggcgagatgccggtggtccggtgggcgtcgtcgggatcgagacctcgggggccagcggccgcgtgatcatccaatccacgccatggccgcttcacaaaaaagcaccactcccaaggcggggcccacgtaggatccggacacgcgtcgtctccgatcctgggccctggacgtggagtatatattccattattattttttcctgggctcatggcaatcgctgcatccatccacccacgtgaagcgaacgtgtaccccgaggtttggttggctggttcgccggacgcgggccctccctgtcagccgcgtagcgtggaggtaagcgacagcgggtaagcaacggcgggcggtgactaatgcattggggtgttttccgtgacgtcacatcaagacccacagctgacgtaggatgtaggccccacctcttccgagtgatgcctgccgccccatctccctcccggccattactccgccacgctgcgccgccagcgcccagccgcccacctccgccgcccagctaaaaatccccgggccgtacgtccctgagcacccgtttgttcagacatggccggagccagccagacgtcgtcgtggtagccgtagcccacgcccccgctcgccgcccgcttcctcccgttcctcccactcctccgggatcgccgattctcgagctgagctgtgcgatggatcaggagcgcagccccaggggcaatgctcggcggagcgggagcggcggcgcgtcgtcttcgaagcacaagagcgccggcggcggcaggaagccgatcaaggtgctttacatcgacaaccccatgcgcgtcaagaccagcgccgcgggtttccgcgccctcgtgcaggagctcaccggccgccacgccgacccctccaagtacagccccgacgaccttgactccggcggcgtcgcccaggggctgagccccaggggcgcggacgcgtcgtcggaaaccatcgtcgcaagcccaagccccaggcctggcaataataaggcggcggcggcggacggcggggactactacgatggcgaggacgacgacgaggacggcttcaggtcgcagctgctgctggagaacaactatacggtgttctcgccgccgacgctgctctacgaccatcacctgcacaccaaggtctgatatccccatcgatcgatctcccgtgccgctctgtcgtactcgtacatgattctatctttgttaaccgctccataccaagttgcaagcaaaactgtatagcacattagcactacaacaggtcaggcccaccgcatcaacgggaaagaagaccattttgttactattagtagctgattagctcacgataccaatgtataggtgatttattttagaataattgtcctagtcttaagccaacacgcgtacgttgtgaagcactagtagttaaatttattattattaggaaaaaatgtacacttttccgtgatcctggaactagcatatccagttcttgatgagctacagtacactcacgtagtcgctttagtttgtacaggcacaccttttaagtttataattctatcaattttgtcctttcattactatttgctacacacgagctgatgcttgctgctcttgttccctgatgactataatctcatgtctttgacgttgcttca

SEQ ID NO: 4021 - DNA, 8626 bp, Sorghum bicolor
cactattccgacagactgaatgtgtacacaggtgtagtaccaacgcatcgccgtccatgtatttcgggtatatttgttttttctctcctttattacacgtgtaaagccactaacaccataacttgcaaattaatgtgccaatatggaatccagcgaggctttgatgctattgttcagatgaaactcagcattcttctatttatctaaaagctgttagttgccggcgcattaacgaataattatctatggtctatgcaactaatgtaaccgtaccttgctctgttttccttacatttcaaggatagtgtaattgcatttgagtaatcgtatttccacaatgaatgctatcatatagagcacgtacaacatcatacttttatggattcctaccgtagagtgtccttggtaacacaagttccacgctatcaatgatttcacctactaatataatgaaggaggtaaaaacaacccacaaactcgaggtttaatccctaacaaacagttgttagtaagtatgatgtctaaagtttagttggctaaggttaaggactttatgatatagtaaactaaaggctttttttttggtaaggatagctaatctttaggcaacactttagtacgctatttgaaaccttaatagttaaagtggtttaacatttaatccctaaattttagaccatgaaatttaaacatgacctaactatctaagtttttaattggttctatcgagggtagttggtacaatcacctcttctaaccatctaatatatggttgattctccacttggtaagtgaatagccatgcagtgaatccacataaataatggtatgtctgagggcttacacaatatttcttttcatacgaagcgttctatatgatcgggatttggcccatccgatttgagaattataccttatttggtgtaaccttcatcaatgtaattttttcacttactccttccatcatctaatatagtgcattcaagtattaaaaaattatatgcaaatataaaggattctagaaagacaaaatagttttgcttcaaatagttatataaatttggtaggcattatattgttaaagaaaactactcctatttaactatctatctcaacccagttcatagcagctatagattgcacaaaaaacattttttcacattttcacctgcctctgtccacatgtccaaccaatattcataaacaagactacaaatacgaccttttagctagtgggttaaaacacaaactaactataatagttaaccatctaactagtagttacgatttactactattaatcagccaactattggcttttagtgaatgacatcggtacctaaagttgctaaacaaagccaagtagaaaaaccgagccttaataatttcttccgtcacagctttgacttttacctctggaaacagctttgacggagtagtagggagcttgccagcttggagcatgggccccctctccggggcttttttttcaagcagagtgctggttccgtatggatttgcaacgcaaaaaaaaaaacacgagcgcaaggccctactgtcagaattagccatctctactgtagagatcgcagtcgcaagaggagaggggagaggggccctgcccagacacccagccagccagcagcatgatgaggtgccatcttttgtactgctcctcccctccggtgcggagcggcggtgcccttcgccccttccccgtacaacacacgggccgcggctagccggctacagtctatttccaatccccctttccctctctcctccgtcctctccctcttgttaagcggacaggagggcctgggagggccacagccattataatagcacgccatacgccaaaagctccactggagccgagcaggttgcactcccactgtcgttcctcccaagaacccgcccaaagaatcctagaatccaagaaaggcagcaacaaaaacagggggggaggtctgagggaggaggaggaggagccgaggaggtggtgctggaggggaagaccagtgtgtgaagaccacacagtctcacacactcgcacacccagtgtgtgctgtggtcttcctctttgaccaccttcttggagcggggagtttcggggccatggggaggtggtggcaggctgccctgctgggctgcgcagtggcggtggctgttctggcggccgccgtggaatgcgcggtgacgtacgacaagaaggcggtgctgattgatgggcagaggcggattctcttctccggatccatacactaccccaggagcacccctgatgtaactgcattcttcaaaatctcctctttttttttttcctatcttccccggggaggttcatggctgtgctcagctgtttcttgtgaatgctctggaaagcaaattgctttcctactttagcggtccctctttcttccacggttagtttcttggttggggttacaaaagggggtttgagattttctcgggatgctgtctttctccgttttttttccctgttttttttctccagcaaccatgtttcttggttcttcattgcactgcacttgggtgttctggtgttctaagctaagaaatttttgaccaaagaaactattcttggtggttttgtggtattttttacagtctattggttctgaagtgagtgcttcttcttgcttttcttttcaaatcagatgtgggaagggctgattcagaaggctaaagatggaggcttggatgtgattcagacctatgtcttttggaatggacatgagcctacgcctggaaatgtaaggatttttacacctcttctgctcttccattccgctgtcattatgaactcatacaggattcggatggtattgtttcgcttcgcgtagtactacttcgaagagaggtacgatttggtcaggttcataaagacggtccagaaggccgggctgtttgtacatctccgcatcggtccctacatttgcggcgagtggaacttcgggtatttctccatttcctgaaatcacctccgtaaaatggagtattacagttaaagtttccagttttggtgtatatgactatatgcatgcagtactcctgtctattgacttctatcgcgatgcatgtaatttcgtagtggcttcccagtttggttgaagtatgtaccaggcatcagcttcaggacagacaacgaacctttcaaggtcggtcagtgaaatcacctcaacatttctggatctagttgaagacaccttttcttttgtcaccattgtaatgctgctttctgtttgtgcagacggcaatgcagggtttcactgagaaaattgtgggaatgatgaagagcgaaaaactctttgcatcccaaggtggccctattatcctctctcaggcaagtataatcgttttccttaggtttggtgcaaaggtttatggtggagttactgcatatggggataagcagttgcgcctagtggctagtacatcatgttaatagcttaatacacttcaagttttttaactattagtattagcaaatttacaagtcagcgctcttgctagtttgtgctgttggcctgttacacccagaatcctcgatacaagtctgaaactagcatttggtggatagtgatatctagttgatacatcttgatttgcatgtcccagtagttcatgctactcacgactggtactggagacaagcaaattaacttacatcttaaatgatatttcattgcacagattgagaatgagtatgggccagaaggcaaggagcttggtgccgcaggtcaggcatatatcaactgggcagcaaagatggccatcggattgggcactggtgtgccgtgggtgatgtgcaaagaggaggatgcacctgatccagtggtacagtaatcttgcactatgccaataactccattttcactgtgttatttatgttcaatgggtggtcaaattagtaaagtgtctggcatgtgcttctgataatattcccaggtgcttgtccattgtctttctttactttctgcagtagcataattcctgttagaaaaaatgatgctgtggtttctatagtcataataggggggctcatcgcctgttctaaagaatgtcacttctgatgtttattcaaatgcttacattctattatattagttacataattcgtaacaaggaaactgaatctcaatgcatttcctgcacacatttggaggaccaagatcaaatcagtgccagctcacttaatttgtttatgattattgtgcactgtagcatgctatgttttgcaaatttgtccgtcttgtagaaccagttcttgaaatttcttttgactcctaacagatcaatgcatgtaatggtttctactgtgatgcattttctccaaacaaaccatacaagcccacaatgtggactgaagcttggagtggctggtaagttttctccttttcttttcttttttttttcgaatgctactctttttgtcaaattattttatccaatagtttttgatgcggtgcagatctctttggtttttgtttaatcttagcagccatatgcactaatatttgcaacatctgccctaaaaaaatgtcacacattttaggttcacagaatttggtgggaccatccgccaacgaccagttgaagatctcgcatttgctgttgctcgatttgtacaaaagggtggttcttttatcaattactacatggtatgacatgaaaagaagctgttatactgttgttaagaagtttatctcacactttgggagatactcatggttggtggtttactggtttttgtcgatagtatcatggaggaacaaatttcgggcgcactgctgggggtcccttcatcacaacaagctatgattatgatgctccaattgatgaatatggtaagtttactaggagatttgatttttttatgaccatgacctatatgtgccagtgcttttctacctattaaagtgtatggtgtatcattttttttaaaagaaagttgcctgtaactgctttttgtagaataaatctcttttataagtttggttaatattcggactcattctctgctttgttatgtccaggacttgttagagaaccaaagcacagtcatcttaaagaactccacagagctgttaagttatgtgagcaggctttggtttctgttgacccagcaattactacccttggaaccatgcaagaggtatgtgttggttagcttttctcctccctcagtgaactgtatatcatattgatcggtgtgtaacttacatataccatctatatcaggcccatgtcttccgatctccatctggttgtgcagctttccttgcaaactacaattctaactcctatgcgaaagttgtgttcaacaatgagcaatacagcctcccaccttggtcaattagcatccttcctgattgcaagaatgtagtttttaacagtgccacagtaagtttcacttttgcttattttcagtatggcacattctcctcttcttgcacttttcaccttttgttccccagagccatatgatgacctggcttacctgattacaattgtttgcccctgcaggttggtgttcagacatctcaaatgcaaatgtggggagatggagcctcatcaatgatgtgggagaggtatgatgaggaggttgattctctggctgctgctccattgctcaccacaactggtttgcttgagcagcttaacgtcacgagagacagcagtgattatctgtggtacataaccaggtaatgatgtatccatgtcttgcagatatcttaccaatttgtataaatgtataatctccaattggtcccttttcttcacgagggtttctttggatttcctgattctggtagccaggggcctttattctttatttagtcttgctctacttctccatatggatgaggatgtttttgtatctgaaaatctcttattaatgtctacagtgttgacatcagcccatctgaaaactttctacaaggtggtggcaagcctctgtctctcagtgtgctgtctgctggtcacgccttgcatgtctttgtcaacggagagcttcaaggtatccactgagaaaaatcacctgtttctgaacattagtgtcgtggaatgtgatttgtgaatcagatctttttatttcactcccgtaggttctgcttatggtaccagggaagatcgaagaattaaatataatggtaacgctaaccttcgagctggtactaacaaaatcgcactgctgagtgttgcttgtggattgccggtccgtcctttcatcactttcaattatatttactcatcttataacctagtatatgactattcagatctttgtcctgatatagaatgttggagtgcattatgagacatggaacactggtgttggtggtcctgttgggcttcatgggttgaatgaaggatcacgagatcttacttggcagacttggtcctatcaggtatgtttaacagcacatgcctttgtcaatgaattattgtcaagaaagaagctaaacttgctttctccatgctaggttggcctgaaaggtgaacagatgaatctgaactccctagaaggctcaacctcagttgaatggatgcaagggtcgttgatagctcaaaaccaacagccattgtcctggtatagggtatgaacaaaatttcatgttgataccatttacttgtggctacattttgcacctattctcaccacactgttttgtaggcttacttcgaaactcccagcggagatgagccattggctctggatatgggtagcatgggcaagggccaaatctggataaatggacaaagcattggacgctactggacagcatatgcagatggggactgcaaagagtgcagttacactgggaccttccgggcacccaagtgtcaagcaggctgtggtcagcccacgcaacgttggtaaggacatttgtaacagcattcggatttttgaactaccacctattgagtgtttattttcattgttatggttctctgatctcagtttgtgaggtcctggcttcgactatgctctaacacaaggttgaaattgtggtatgtgtaggtatcatgtgccaaggtcctggctacaacccaccagaaacctattggtagtttttgaggaacttggtggggattcatcaaagattgccctagtgaagaggtcagtctcaagtgtctgtgccgatgtatctgaggatcatccaaacatcaagaactggcagattgaaagctatggcgagcgtgagtaccacagggccaaggtgcatttaagatgctcacctgggcagtctatttctgcaatcaaatttgcaagctttgggacacctatgggaacatgtggaaatttccagcaaggagattgccactcagctaactcacacactgttctagagaaggtttgtaaattccactagtcctgtatataatactggcacatgcatacacttagccacatgttgttttagatccataacatcatgttatgtttcatgtgaacagaaatgcattgggctccaaagatgtgccgtcgccatctcccccgagagctttggaggagatccctgcccgagggtgacgaagagggtggcggtcgaggcagtatgttctcccactgcttagccctacttctcttaagcaatgaatttgaaggcggtcgtcggtcgccatctctgcaatgaatttgaaggcagtcgtcagtcggcaaaaaagattggccgaaaccaatgtgggtagagtggaactgtaagtatcgacttcgattagatgtgtctggctggagagattaggtcttgagcttagcgttgttcgtcgtcagattccagatttaggattgtttactctgctacatctccatgaattgttcaaagtggccagctggatattgtagctggtccaggaatggagtgtagagaggagtgaaggcagaagactgattatgcattcttttgcttggtggtagctgttgtacccgtgccatctcgtctttcttgaaacggagaaagatgcaggtgaagtgtggcattgtgccttttttgttctactactagtggtaagatggaggtttaaagaacaggctttggaattgtctgtaagactataactgaagttcagatttaatagtgccttgatttctgatgaaaaacccctggattcgtcttcgttcgtgataacaacataggagtactcctagtggcgcgcattgatacagtcagcattggatgcgcaattcgcgctttctccagctgagcgccatcattgttgcagaaatctgtgtcagtcaggataggaccagcggtgaagattaatgatccttcacctcattggaggggcacaggctgccatgaacatgttcccctctgcgtctgccaaatcctaccggacctaatgatcgcagagaagtgccgagtcgaagggcattgtttactgtcagcggcacgtgaaatcactgctggtaaacaaggccttgtttagttcaaatttttttgggaaatggacactgtagcactttcgttgtttatttgacaaatattgtccaatcatgtactaactaggcttaaaagattcgtctcgtcaatttcgaccaaactgtgtaactagtttttattttcatctatatttaatactccatgcatgcgtc

SEQ ID NO: 4022 - DNA, 11496 bp, Sorghum bicolor
catgcgtcaaaaaaattgatgtgacagataatcttgattttttttggaaactaaacaaggcctttgtttagatccaaaaacttttgaaatttggatactgtagcgctttcatttgtatttgataattatccaatcatagactaactagactcaagattcgtctcgtgatttacagataaactatataattagttattttttaatctatatttaatgctttcatacatatgtctaaatattcgatgtgacagagaattttgtaaacttttagaattttgaaggcatctaaatacgccttgtgtgtgtgtgttgggtggggggggggggatgtggactacgttctcctgatttgagcttttccctaggtcagcgactcggcggcaagatcaattatcagcatcattgcttcggttgcgcagggcttcggcgtgagaaaccaagaacttgtgacatatctctaaaaactttcaagaattagatttaacactaagaaaactggaaaaatatccaaaattatttaaaaatctaaaacattctgatcaatgtctaaatgtgttttatagaaactttccatgacaaaatatgagatgcaagcaatatggatatgacatacattaatgttgaatgtatacatgctggttgcatcttatttttgttgtggaagttttaaaaatgcatttaaacatcaattagaatgttttggtattttatttagatttttctagacactttttcattgttctggggctaaatcaaaatttttaaaatattttagagacatttttatgagatataaatgttttatttggattttttgaatcctaatctatctttagttttttatcgatatttttagaagtttagataatttaatgtggtctttttagaccttatccaatatctaattgatttcctcaaaactactctaaactagggcatggatgtgattcaaatgattttgagattttaagggtacgatatctgattttagatttttagaagaaaaattagattaagctcaacgacaaaatcaaacagacctactttggcccaggcacggcacggcccgactactaccgggcccgggccggcacggcccgacgcaccgggccgtgcttgggccgccaccgtggcccgtggcacggctcaggcacggcccgacggcccgatgtttaatatcccagtaaaaaaatatagctttttaattctaaaaaaaaaatataggtctgttggctcatccatccattctaattggcctgttaagaaatgtggcttgctaattctaaacaaaaaaaagaaaatatagacctgctactggcctggcacgaccttggcccggtggcccgccgtgccttcgggccggcccgacggcccgcgggccgtgccttgggccatacccccggcacgaggcacggtggtggcacggcccggccggcacgacggcacggcgcggcccggggcaggcacggcacggcacgacctgatggccatctataaggtcccgtgtggtagggcttctccagcgacttcacaagccgtttgaagccattttatgccaaacatggtaaaataaaatggagtcactgatgaagcctctaaaaacgtgctctcacagagcattgaggtggggaagaagaaaaaaataacggtttatcccgattttacctcatcctacatagcattctgtaaaatatatatttaaagaactttatatgtggagctgttttaccaaacaattattaaaacaactttagttacagcaataaaactgtttatagagctaaaacccataaaaatagtttcactaataaagtggagccgtcacaagcataactttaatggccagcgcccccacagccacagccactcatatatgcgtatgcgagtatggcaccccgcttcgccaaactggaaatttcaaaaccattccaaaacgtcccgccccatacgggttccccatttcccctcctcaccccgccgcgccacccctccctctcccgatgcagcccggcggcggcggtgcgatccgcgtgctgaacgtggcggagaagccgtcggtggcgaaggccgtggcagagatcctgtcgcgccgctcaatgcagtcgcgggcgggccggtcccagtacaaccgcatcttcgagttcaactacgccatcaacggccgcgcctgccacatgctcgtcacctccgtcacgggccacctcatggagctcgaattcgatgagcgcttccgccgctggcactcctgcgaccccgccgagctcttccacgcccccgtccgcaagtccgtgccccaggtatgctgctcgttctctccgttccgcacgagcatttcgccgaagagatggcgggcgcgtctttgaggcctgcgtaaggcggttcgggtttgattggttagtgcgtgggttcctatcggttgtgatgatgtcttacatggtcggcatccatactattgttgcgctccgcactcgtggatgtgctggtgtcaggggcgggaatcccgctgaacagtgggtgtgtgtttcgctgtgtacagtatcgtgtgcctggcggactgggctgtttggttgcccttcagtcaacgttttacctggcgcgagcagtgccctgaggcgtccgatttaggatgctggggctaccatggctgccaggccatgggcagcaacttgcctgggaggcctccaagcaaacgagcccttaaatgatctctgatatttggagtcgttgtcccattaggagagggacactaggggctgtttgcttggtggcctgccaggcagcttgcccaccaggcatgcaccccagccctaggcatccaaaattgggtgcctgggaatgcatgctgcaccaggcaaagctgcctagattacaagcagataggctcttaaatgctaaacttgtaactgcaggcatatcatgatggttgtatgataagtgcagatcagcccatttggcagttaatcatctgggcctttgtttaaacaggttacatagagatcaaagtttatttaacacaatcatttgatatgtagtccttgcagggttttagcctagaatgatatcctcgtaactagcaacaactgcactacatgtctgcatgtagctaaatatttatgctaacaaggagaaaaataactggacgctttaggtcaaatgatttgcaccattcatgtagttaagacttaagagcataattggccacctccaccaatatgttgccatggattcggtgctaacataatgcttgcttggtgtccttcatgatgacacaaacagtcattttagtacttctatcttgtaaacttctctctccctgtatggatgaatttgttcatgaacatccaagcatgagttgactggcatgttcttgtctatctttggctgtcatattttgcatatattgagattattttcttcatagataaagattgtggcatggtcatgatattattataacttcatggatgttgttgcagttgagatatattcttgaatttgtcccttcaatatgcaggacaagcaggccataaaacagactttggaagaagaagctaggagatgccagtggctggtgctatggcttgattgtgatagagagggtgagaacatagcatatgaagtgatcgatgtttgtacaggtgccaacagtcatcttaacatttggagggctcgcttctcagctttgattgacaggtattgatttctccggatggtgatggtctctttccctctgtctattacaaggattttctaaaaatattatgaaactgcagggaaatacatgaatctgtgcaacatcttggcaggcccaacaagctctttgcagatgctgtggatgcaagacaggtgatttgagttgccacttgccactagatttaaatattgctgttgatgtttcacatacttgaatcacaactttctactatcaaccaatgtaaaatgctctggttctttatcaggttgaactccatgaagagctttttacttcatgtttcctctaatacctgtagctttataatccaatcaaataaatctgaagcagcagatttgctagtatattttctcttgccaattttgttgtcaaatggatgagcatttgcctgttcattcttgctttcttgataagctaagataagtaataagaaactccgtacaggaaattgaccttcgcattggtgcctccttcacaaggtttcaaacaatgctgttaaaagatgcatttgtaattaatgtgactggggatgacaggaatttagttctgagctatggtccttgtcaggtacttcacttatcaaagctactacacgtatgctgatttccatcttgtctaaaattttcttattcattgcagtttccaaccctaggattcattgttgagcgtttctgggagattcaagctcatgaacctgaagagttctggactataaattgtactcatacttcagatgaaggcactgcatcttttggttggatgtaagataccctttagaatttcttctgacatgtttgttatggaagtcatgtgaccttttcttgttcttggcagacgtggtcatttgtttgattattcatgtgctattagtatctacgaaatgtgtgtttcagaaccaatggcaacagtgagtgctttctgatctattctgttaacatcaatagtttgaaattcaaatgtcttcgttaacaatggatcagtagtaacactttttttttgttcattgcaggtacaaaatgttaggaatcaagagaaactaaaataccccccatatccactaagtacagtggagcttcagaaacgtgcttctaggtactttagaatgagttcagagcacacaatgaaggtctaaaaatatcttttcttattgttctaatttcccttccagttccactatctaataatgggcatacctctatagcttgattatttgcttgctttttatttggtggtctcttccctttcaacaccaggtggctgaagaactttatcaagctggattcattagttatccgaggacagaaactgataacttctccccaaacactgacctgcatgttagtattggattttactagcttgacttgtttcatattctttccttctgttttcttgatgatctggttacagttaacagttttttgtttacacctataaccttgcttgacaatggacattgttaaacttaaacaatatgccaacactagtttttctgaaaattgataagaaatatgttcagacagttggtctacagagtatgtaagatcttatttttgacctttttgtcagtcacagcaacatgtttctcctggttgtttccatcacattattagtcattcattgatgaaatcccactaagaacattgttatgttctgtgtcatactcataatgattgcacttatttacctttccttatttattttttctcaatttgttgctcttgctgtatcatttttccttttaaatgtatgtctatccttgacctaggcaattgtacgtgaacaagtgaatcatccagtttggggagcatatgctcagcgacttctaaatcctgaagcaagactttggagaaatcccagtaacggtggtcatgatgacaaggcacatcctcctattcatccaaccaaattttcagaaggcgaaagaaactggagcccagaccacattgtatgttgtgtttctgaacaactgacaaatcaattgctttttcaagtgttgtttataaaatttcctatacagctctaataaagttttgtttatctcattatatctggcgtccagagattgtatgagcttgttgtccgacatttccttgcatgctgttctcaaccggctgttggagctgaaacaactgtggaaattgacatagctggtgaacagtttaacgcatcagggcgtgttatacttgctgtgagtatcctgttttgttgtttcccttcaattggccaccaatactatcaaaactctacatgtcctaggatctgttgaaaaattacttctgccattatttgatacatatgtagagtagtaggttaaaatatgtaatcagcaaggtctaatgaggctagttagtacacagatgtagcattagcaaattttgttaatgtgaagctacactataaggcctgaatagtttttttttgggtacacaaagttgtgctaatatttattcaaaatggaaaagaaatgtccaaaaaggtattttagtgacaaaaaattgctagtgttattgttttatttgaaagttccttcaattgtacatttcaaaaaaaaaagttccttcaattgaatatacagctttaactgatctgctgtgagaagcgtcaaagttcaattcaattatgcaattgtgctgggtcagttatactccatccattccaaattataaggcgttttggcttttttcgatacatagcttttgctatgcacttagatatacactatgtgtctatgtctagatacatagtagaaataatgtatatagaaaagccaaaacgtcttataatttggaatgaagggaatacctgatatctttgaatgggctgagtattttggtaacaaatgcttgattcacaattgttccttccttatactccttccgtctcagaatagatgacgttatgggatgcgtgctggtcaaactttctcaactttgactagatttgtagaaaatgcttgcaacatttgtatctccaaataaatttattatgaattatgacagtatattcagtgatctatctaatgatactaattatgtattataaatattaatattcttttgtatataattgatcaaagtttaaaagggctgacttcttgggaagcgagaatgacttctattcttttgtatataatttggtagtattcactaatatatttttttgaaagtatagtatccattaaatatgtactccctcctttctaaattataagttgttctagcttttctagatacatagtaaaagctatgtatttagaccgtgtgtatatctagatgcatatcaaaagctatgcaactagaaaagccagaacacttataatttgtaatggagggagtatttgacaagtctattagcaaaccagttaaccgtatatacaaggaaaaactgctgtatccaaggaacctcagcaagtggctttttttttttcactttgatatttatttctgtattatcaccaaacttcctgttgataataagatgctttcattagctgcttcatctgaatctggcattgatcttctttcaaagaaatgttttcttcttctgtagaaaaattatctggatgtttatcgctttgactcatggggtggaacattacttccaacatacaacattgggcagcaggtttgttactaatattttattgtgcatgatggttacaaaaactggttaaagactgtagattaattcataatttgaattgaaaatatgttcttgtctattaataagttaatattactaaagatgtatatgtaaaaatatgcaatatgtgcagcagtgtgtaattcgtagcaatatgtaaggagttgctcagtattagttgggtcagttgattgatttatcttagagaataacattgatatccaactttttgtatcctttatcactgaaatacaaaactaacttgagctatcaattcaacatcatgcagtttgttccgacaactttaacacttgattctggagtgactcggccaccccctcttcttgctgaagctgaccttcttagctgtatggataaagtacaaaaaaaaatccttcttttaatccatgatatattcttttttctggcaataactttgtattcagaattggtggattgtgccacttagtgcatctacatatccataatttttttggcattttcttattctatttccaggcaggaattggcactgatgcaaccatgcatgatcacataaagaagttgcttgaccgttgttatgcaaccaaagatgaaaacacacgtttctccccgacaaatcttgtatgtcattccaaaaggctatctattgactattggtaacctataatacatttccatgtagatgtcatgtaactatcctatctgatcattcttttttcaacgacagtctccactatggaatgcttgcttcttgaacaaaatatgctaaaaaaataaataagcttagaattagaagtgagatcacaattacttaatccaatttacataagcttaattgtttcaattcatgagtaacatggccaacttttgagtgcatttgtcttgaaacattacctcttttctttttttaataataaaacaaacttaggaaatgacgcacagttcttgtgtggcgagtctataacttagtgttcgaggtgtggggtgtgtgagttgggtctcgttgatccgtgtaccatttttctaccttaatgaaatgacacacagttctcctgcgctgttcgagaaaaaaaaataatgaaacaaacttctgatttttgggaaaaatgtagggtgaggcattggtgatgggatatgatgaaatggggtgagttgactcttaaagttgctgcacttactgaaatctataaaggatggtatgattgctttgctcaaagactactttctaggtatgagctgtggaagccttatttaagatcaatgatggaagctgatatgaaatcagttagcatgggtactaagagtaaatcagaagtactcgagagttgtttgcagcagatgaaggcctgttttcttgatgtaagctgtaaatttcttgtatttcatgatacacgtacagactattgtaacattaaaaccattgcaaaagaagcaaatcaatggcattgtgactattttattagctacatttctgaatttctatactactctactgtaatttgactctatggtgattattggtgctacacaggcaagggtgaacaaagcaaaactccttgatgcaatggggacattcttcgcaaggtgtttgattgaattcataagtcattctttactttgtatgacttcctaccttgaacttgcccttttattttgtaggtctaatagacctataaatgaaactcaaaatccggtagaggttgtgaggccttgtggggcgtgcaatggatctgaaatggtgcttaagcgaagggtggtaagttgtctccttgtgacacttttcttaatttttttttctagagaaactggcattactctatataaattcttgaacttttcttcttttctgtcagactggtgaatttatggttgggtgccgaagttacccacaagtgagtaatatggtcttttgatagaactaaattatcttattatgccggaaaatggaatgtaaaactaaattcactgatgttatttgaatttctgcaacgagtttggcattaaatgtgttgaattttcagtgtagaaacgtggtatggctcccaggatctctttcagaagcagctgtaactaatcaagtttgtcctatctgtgcaccaggtcatctttagtgtcccatttgctgaccccgatttatgttggttattgtttggtgttttcatttgccattctgcttaaatgatatgacaactctaccacacctacaggccctgtctataagattcaattcaagttccgtcgtagggacattccaccaaatttcgatgttgatcacctaggtaaactgtccgaaacgcattgtccagactccagacacaattttattatttttttctttatgattagatctatcggtttcctatgctgtgtggttttatttgggagtactgttgttaactcttatagccgtttttgtgataggttgtgttggtggatgtgatgatatcctcaaagagcttatggagctaagtaggtttggaagtcgtagccaggctgcaacaccaggtttctgttgaatctctgctctctgattgatatatgggctcatcttttttattgctctaactgcaatgcactgtttttgttgaacctacctcatctgtctccagtatccatgttgtgctattaaaacaaccagtgttattttcattctaaaatattaatttacttttatgaccatattacttcacagcaagaggaccaactccaaatggtgtgggtcagaggactccaagacaggatttacatactaattttcgtccggcaggccagcttaataatgagaacccatcggttatgcattctcaaggttttcgttcaacccatacccaaaatccaagtaatgcaccaggtatctgactatctatgctgctattttccgcaatggtacacaaagctgctatcttattcacgactcacgagttacattcggatgcaggtcaagtgctgtgcacctcatgtggagcggcttgcatatcactaactgctaatacagaggctaacagggggaggaagttctacaaatgtcaagatcctggctgtggcttcttcaagtatgtggtgtccttgacctctagcatattacattgccgtgtgcatattcatctgataccatggggaatagatttagtttatctatacagttgaacccgtgctatacacgttgcatatcatctgtgtagttggttcggcaagggtggcataacttgctcttgtacatgttatatactttgagcaaataatttatgtatttactctcacatttgtctttaagttgttggttttacattttttttagagatccatttcatttcgtgctagcaaccttagcttactacgtcattgatgattcctagatcacacgagtgcccaactcatttcacttgatttttttgtggacccagatgggaagacgaattggacaatggtacggggagaggccgccgcgggcgtggtagcagcaggcaggcgactgcatctgcatctgcaggacggagaggcggaggccggagggggagaggccgtaacgctgacggcgggatgttcgtttcagcgacgggcgacaccgtgcccggctgctgctttacctgcggcgatccttcccacttcgccaacgcctgcccgaaccggagatagtcatcagggagctgctcgctatgcgtgtacagagactggcagtgtccgccattcggatgtttttcatgtacaaggtgaggtgcatacaattcaggtgtacttgcactcctgctcactgatgttcgagacagttactatttttaaaacaaaatgcgtgggggaacaatcgcggtcgacagaagtcggatcggaagcgcattgtttgggccgtttcctcgccttttttttcgagcagaagtcggagagaggttgtcgattcgaaggcggtgtttggttccccgccaacgcccacacttctgtgacgccgcccacaacttgcatggctggtaggagtagtggccaggaacaaacagtccggttctgcagtacaccggggtgatgacacgaggcccgagcggcggcgggtggatggcgcgcgtgctggtggacccggagcggggctcgtgccgcgccatcgggccgttcccggacccgcacgcggcggcgctggcgcacgatcg

SEQ ID NO: 4023 - DNA, 5845 bp, Sorghum bicolor
actagacaacaagagctaaatgaataggattttaattcccaaatgacaagttcacaaacactacttgtgcaagctaccttgtaggagaatctagacaagtatcttttctagtgcggacaacaaatgaagttacctttagggctttctaggatcaggcaactaaggaaacccaagtggagcctgtttctttgacttgcaactctcaaaatgcaagagtaaaaagcatgcggcctgtaaaggcctgtagcttttaatcatagaaaaataaaaaccaaagtgtgctattttgataaaatgacaaaaatgacctactacaggcaagattctaacccatcaaaacatcgctaagtgtcatgaaacggtatagtcaatctactcaaataacttcttctagcaccaatcacggacggaatctgtcgccatcctcaaggttcatgcatccatacaaaatccaaatacgagctgagtttatatgtcagagctactgatgccgacgcagttaggaaaaacatgaaatggacagcatgatagaagtgttttactagctggatctcacagtcccatcactgagaatttaagccccaatttttaggccctggtgaacccaaaactgagcagcctaaaggtgtatatgcaaagcctagctctaacaccacaaagtctcacaagcaatcaaggtggtcgcacaaggttatccccaagcatattgtccaccccttattgacatgctcatttctttgccaatattacagtttgacagggaatgcaatgagaaactatttacgttcatgtaaacaagtagttcacgctatgctgctgaacctccaggggacataaacgccagacacctccctatgaagatgcaggatcactagctacaactgaaatgggatgtttctgcaactatatccctcacatgtcgaaacagcataactgttactgtcttcactgatgggccctttgtgtttataatttgttgcccagaccaagcgccatcctaagtaatccaaagccgtgcacctttgttgaccttaattaatgagatcaaaccaaacctaagcatggcaattggctaggaaaaagatagatgttgacacgccgagcttagacagaagggaaacatttcagaccgaattcggtgggaaggaacagatgtaatggttggtggtgcctggtgggtgctgaacttggaagactggcactggtccaggtctcgccctcactcccaagcccacccaagccaaaagagcggccaaaaagcaacgctgagtgagttgcccaagccaattcccagtgcaacacaactctgcgtggattgcaacatttcccctggagaaaattcgtaggaggagatagcaaaactggctgcatgatccagacacccacttgcccagcagtaaaggttgtcatcatcacacgggaaagaaagcaaattccacgagaagattagaaaattccttggagcaaggaaatggggagatataattagtgcagtgattagtctcacctgtggctacagttattggttagtggggttgagatgggcaccaccaccaccgccgctccaccaagaaaccccatcatttcatatcccctgaaagatcaagcagatggcgctagatgagtgcattccttgcaagtcccaaccacagcccagaaagcaattcggaaaggagtgagggcaaagcaaccgaggtcaagggcctcagccctcagcaacaagacagtggaatctaggatgattgcaggggagcggagagagacagagatagccacaacggcaatccccattgccccactcaaactcgagtgcaccctcgtcttggtgctctggggcctttacgtgatgtctggtcgctgcatttcccatcccctttttcttctcctccacaagcccagaaatgcatagaggaaaatataaataaatacaaaaaaagaaaaatcttccatacgcttcttaaatgcaatatttatggcatccatataaggatgcatatagaggtaacggactaccagcactgagctgttccgtttcttttccacctttgcgttttgtttccattcaatagagaattcctttgtgcttgtgccttctctgtagctttcaggagaataaaaatttggaccttctctcgcaccagcgttctttccttcttccttggtttcatgctgacaactagggctgatcttcaggagggcctgttcttggtttggttcctgagagtgattcataggtctgggattatatattggtgtcgttcttgtttttttggtgctcatccgttgctaaagaagcaaaccatcaacccatcagctttactgcaagcactcttttgcctccttttctgttcttggtgttcttggtgagtcacagtgccagacagagtttcttctttaggagtcgtgcactatgggtaattgctggtttaaggggaatccatactttaacagggtttcttccaatgcaaccaaatcaggtaccactattatatctttggtttgatctctgtgattatgtaactgcaactgtagtatgcagaagtttcagatatttgtttgatcccctcaatttaggcattaatgaaactgctgttttttttttgagagagagagagaatgttctctcatctcgatagatgttccctgctcttgcttaatccaactacagatattttagtactgaatattttcttcacaaaaaatcagtcctaatgtttaatctgatccaatccaatgatttttttttaaccttgacagttgattttatggttattccatgtaatggtcagatacttttttgttctgccatatgaaattcttgtccatcttttggtaactgattttacaaagtttctgaataatctgcatcctgtatttcagtccccatatttgacttgcctatttgttttctgcagaatctcccaaaattcagagcccatcggagagaactgaaaaggaggactgccagctaccatccaacccaaaagaagtggaggcgctgagaaaggatacagcctgcaatcctttgatagcattcacatttgaggagctcaagagaattaccaaaaatttcaggcaagattcattactagggggtggtggatttggcagagtctacaaaggtttcatcaccaaggatctccgtgaaggattagagatagaagagcccctgagagttgccgtaaaggtccatgatggtgacaatagcttccaaggccatagggagtggctggtgactaactactatttctgaatatattatgatgaaagcatttttttcagttgttatcttcatttatttttggcaagctttgctttgctgttttcagatatgaagtttttgtccgtgtttgcaggcagaggttatatttcttggacagctctctcacccaaatttagtgaagttgattggctactgttgtgaagatgaccacagggttcttgtttatgagttcatgcctctaggaagtgtggagtctcatttattttcaagtaattcttatcctattcttgacagattgttgcttggttttctaaaatttctcgtcgccttgtcagaacactgactatggtatatccacacatggcattcgtgcaaattctcatacccataactggaaataattaactgaaaacgagcataaacctgtccttcactcctatcctgaactagcattatttaatctctgcactgcatcaagtggcagcattatcaatttctgcacgacctatgtggtcagttatgcattattatttgttcatttgagattaaccaatattttatcagatcattgaagtatttgtatttataatgcaggggttatggtgccacttccgtggtcgatcagaatgaaaattgcgctcggtgctgcaaaaggacttgcttttctgcatgaagctgagaagccagtcatctatagggactttaagacatcaaacatattgctagatgaggtaacttattttttttaggttgttacaattgaatgccagttgctgtaaactaaaacgcaggaaacaaaggaaaatccacatgcagtatgatactgtcattcattttgttatggacatgggagtatgggacacagtggtttcttgcttatcagaatcttatttgatacccaaaaaaactacaggaatacaatgcaaaactatctgactttgggcttgcaaaagatggaccagttggcgataaatcccatgtttcaactcgtattatgggtacctacggttatgctgcaccagagtacattatgacaggtaatgtgatcctcacagatcacactgtgtatctaagtcaagagcaagcttaactacttcaaagtgagtttcaaaataaaatatatgctaggttcatgcaactgcttactcaggagctcagggccttgtggtcatgacctgatacggaactttacataagcaaagagaattggcactggatcttttagaatcagctagccatctgattccagaaattccagatttccagtgctagactgaaccaatgtgttgctttttttcaaatccagggcatctaacagcgatgagcgatgtctacagctatggtgttgtactactggagctcctcacgggccggaagtcactcgacaagtcccgacctgtcagggagcagatgttggcagactgggcattcccgctgttgacacagaagaagaaggtacttggcatagtagacccaaggcttgccgaggactacccagtaaaggcggtgcagaagacatcgatgttggcataccattgccttagccacaacccaaaggctaggccgctgatgcgtgacatcgtggcgactttggagcctcttcagcagctggaggagacccctagtgacagtgtggcgatgacacttcaagggacttgaagtgttcatcacttcagagttcacgcacagctcaggaaatacaaagtgccacgtacttaatacatgtgtgtgataatagtagctaactagtgttcttgatctgcagatgatttcttgattgtttaattaatccatggagacagtagttttgttgagcagaaagttagtatatatctctgtaggccggtttaggtgtgtatccagatctagtcctggcatagcgatttccccgacatttcggatgtgggcaagtctgtgcaatctgcaatgtttgttgcccacaaaggaagtttgcttaccagtgtttgtaacctagtattgagcagctcatgatctatgcatgctgagtaatgtagatatatctattcctgggattgaaacaaaaaccacacgctttatttcctctttgtgattaaggggttacaggttatagacttatagtcgttattggttttgtggctgtaattgtatcaccaccatcacctgatctttatcgttatttggttactgaacccccaccctcttagacggttagacctgcttcccatgtgcaatagtgggtcatgatcaaagcagggtctaccgttcaatgatggattagtggccaaggcatacgaatataggaccgatcctagcctaatcagcaatacgatttttcactggagcaaaataacaaacaggtgcagggcgagggcgtgcatgatccaagttccaagtaacctcaccttcagctcaacgctccgagcggacgagcactcgtagtcgtagcctcgtcaagacgtcgttcgttgtcgttggcgtcctccggcacgtcgagctgcgccgcctacgccttataaacaccgggcatttgttcgacgggcacctcatcggcgccgggctctagcctcgcgcctgtccctgtctgccgccggcagttggagccgggaggtggcaccgcccacaccctctgttttggcacta

SEQ ID NO: 4024 - DNA, 7167 bp, Sorghum bicolor
ggcccttacctcttcttggaattggatggaaaccgtcgcggtcctcgcaggcaagcaaaaccccacgtgaacccctcccttccgcgatccgattttctgccgaggacgacgcggaccggtcgcggagccgctgcgcaacgtgtccacgcccggcgccggaatctcacgcacgcgaaagggaaaaatcgcccgcggaatcgcgcgaccggccgggccagatccaaccaattcagatttcgctcgtcggagacgccatttctttttcttttcccgttgtgctctgtgaattttccttaccgttcaagggaggaaaaaaaaaggggaacagattttcctctgggcctgtggggttgggtcacgtacgacgacgcgatcccgttcgtcccgcctgcacctggtagggataggcggcaggcagaggcagcaagttgcggaagcggggcaggcgctgcacgtgcgagaccttatttctccatgtgcctgtgacggagaaaactagaaaaaagaacgtccccggaacaaaagagaagccggcaggcagggcagctgccgcccggagaaaggagaggccatgggcgccggcggctcacggccatggcccttgttgggcggctgggcgcgcggtgcgtggcggcctgcgcgcggcacgctgctcgcgccgcggccgtccagtccggtgcgctgctttgggttttttttttctcttcccctccttttcgctgcgaaactgctggagcgtttggcatctatggccttgtatccaaaaagcaaaaagttttcaagattcaccgtcacatcgaattttgcggcacatgcatgaagcattatatatagacgaaagcaaaaactaattacacagtttagctggaaatcgcgagacgaatcttttgatcctagttagtctataattggataatatttgtcacaaacaaacaaaaatgctacagtaccgaaatccggaatcttttcggaacagacctatctgtgactgcagaaacgctagcgacggtctggctggtctggcgacgactcacgcaattattggtagcctcgcgcgcggcaactggccgcttcatcacgcggcaactgttgccgactagtagtagtaacacggatgagctcatcccttattcatcacaatcactcttcgccaccaaaactgtacaccacgagcgacagattgtcaccagaaataggcatgagcacgtaacgctcactgtacacgatttgtaacaaaaagaagaagaagaatatactccagtagacaaaataaaacaaaggcctgagctaaacgccaggttaggcgcacgattgagaccgccggccggagcgtgacgagtcacttgccttgacatagtcggctgtctgcctggctccaaacccacccggctaaggaaaggatctgatctgaagctttcaaacccaccacccgcgatcacgattacccactaaactaatctaatccaccaatacaccaccaccctcagatcactcgagcaagtttaataatacaacccacttgctggctgtaaggtttcttgcagccttctcccagcccacccatacaatagttagctattcactattaatacatgtctcacttgtctctctcacaaagttccttggttcctgtgcctaagctggctgtaagcttaccgcccacttttcttctctttcctcttttctctcctccaccttagcatttagccagcttacagcccatcgtaatacttgctctcaacgaaaccagaaaaagaaaagggagtacactactgcagggagcatgacgaaattaattattttttattagagggaaaaaaattggagcggcgccgggaggggaatccaaagcggacgcccgccgagcgagaaggcagacaggcgggcgagagagccgtgcggctgccgaactcccctcctatccgggtgcagtgcgggtagccgggcggcacctgctggctgctgccctgctatatgacccccgcaccccacccaaaacctccccttttccccttcacagccctgtaccagtagtgtactactatcccccgctaccgctagccgccgcgctgctcctctggtggcggctcgcctccctcctcccccaccccaacccgccgccgccgccgcctcctctcgctccctcctccttaccccgagcttaagctctacctatccgtaggagaggaagaggggagaagggccggtcggtcggtcgggggctctcggatctcgccgctgcctcctcgttccttcgttgggatctcgctcgtcaagcgctatggccgccgtcgcgccgcccccggctcccgcgcccgccgcgcctgcaccggctgctgctgctgctgctgctccggctccggctcctgccaccgtccctgtcgcggatcgtatcctttacttctgtgctgctgagcgtcaaaggtttttttggctttacgaggatttcgtttgcgtcgttggggtcaaaggttttggcttggctgcttagttcggggttaaaggttttgtcttcccatggcggctgcgccggctggtaccgtgtcaagtgctctttgtctgtccttctgccttgttcgcttgaattgtacagatctatatgtttttaccgtgttttcactgttgtttgcaagctaccaggataaaaaaaacatatttttacatgcttttgcgattgttctattgctactgctattgctactgctcgtcagggtttagtagcttgcaacttctgggatctagaattaatcttgttacgccttaattctttggtttgctgttgtgcaaagaaaccacggatctgctgcagaagctgtcgctggatccgcagcccaaggcggcggatgcaacagagcctactgctgctgccaagaaggtagagataaaagcataagctctcatgggttctcatcttgtccgtgttaatggtttagtcgagatgatctgtgattctgattcgatcgcctatttgtgctgtttaaaatcagcagggcgctgtgacgagccagccgctaagtgtggccataccgccggagcggtccatcacaccggtgcttcaagactttatggatcccaacctattctatctaccagcgtattactatggaggtgaggagcttatggtgatcttgtcgtagctagcacgagtattttatccctctgttttgttgctttcgtggctcctgatgataacataataatttgaatatttgttgctctgagagtctgtaatttgctaactgaattgtctgtttcttgccttgtcttgcaggctacgacagttccatgagcgagtgggatgattatccaagatatctaaattcagatggagtggagattgccccagtaagttatcctataagatcttatcccttaatgtatcatgtgatgctttgcatgattgtttgcatcctgtgtcttattctcaatgtagaaatgctggaatggtcaaattgcttgctattagtgtctactggtacctgtactgtcgagtctattgttggatatgtaataagtggaaagctatttcccctctttttggggtatggtttctgctttggttggttccctcttcgttatgctctctgcactgtgaactcttgttggcaaggttgtttttcttgtctgctactatcatcatgtcatggaaattctgtatcttgtatcgtgtggggttgttggactggagcggaaaatgagctaatttccctcaaaatctctctacacatattatggactggaggcttttttttctctatccaaacaggccctgatgcttctcatatttatgctactcttggaaacatcaaggttaaccatttcaatgggtcttttggacttttgcaggcagtatatggagatatttatggatatgggtatgctccttatggggcatactctcctgccacttccccagctccaacggttgatggccagatgtttggtgcacagcattaccagtatccaactgcgtattttcagcctcctacaccagttccttctaccactcaaagtgacctccagtcttctaacaatactgaaaagccagcagctaaagcagatcctgccaagacaactgctaacggtgttccaaatggtactgctcatagtaacagtggaactgtaccccttgcgtcaagccaacaaaattcatcactgacgcctgatggaacttatagggcgccattgctaggtggagttccttctgctggttacctggacatgacatatgggtatgacagcacaggggcacactttgcatggtatgatggctctgcttatgcaaatggtcagcaaagaacaactacaactaatcattatccatcctcaacattcagtggtaatggttcctcagcaagaaatcagaacaagagctccaccacgccgcagatggtgagttcaaagaaaatatcttgataatatttttactaaatgcagctgtgttatttatgtatttttcttctgcttatgtatgttcccttccggctaatgactccactgtttcatagtcactataggaaaaatgctattgctttttcgtggctcttcttagtttaaccagataggaagcataataatgttctctagaattcaatgtgttttaacacttcaagggcagactgggcttgtcgatacaagaattatgtgctttctgattgagcatattacgaactttaggtttttgattctaatttgagttgattatgatgatatactttgattgtgtattacatctgttggcaggctaactcatgtttctttctctgtattgtcttcaagcagggtatgcagaacagaagacctacaactacatcagcaactcctacttataccaataggatgtaccctagctcccgaccatacacccagtatgggaattcaataaaaactggtcttccctacgggagtaacggttacgattccaggatatatggtcgatggggcgttggtatggataacaggtacaggcctaggggccgtaatggatactatggttatggcaacgagagtcaggatggaacaattgagttaaacagaggtcctagatctggccgtttcaagaaccagaaattgtatggtcatactgtcactattgctgtgaaagggcagagccttccttctggtgaaagcaagaatgatagtgccgtgcccgatagagcacagttcaatagagacgacttccctgttcagtatgatgctgcaaagttcttcgtcatcaagtcgtacagcgaggatgacatccacaagagtgtaaaatacaatgtgtgggcaagcacaaccaatggaaacaagaagcttgatgctgcttatcaagaagctcagtcaaagggctctgcatgccctatattcttgtttttctcagtaaggatcttttcctcatttggtatttctttatgaatgtcaagttagttttctttgcctgatatgctgttcacaatgaaatttcaggtgaatacaagtggtcagtttgttggtgttgctgaaatgactggtgctgttgattttgagaaaactctggagtattggcagcaggacaagtggaatggttccttctctgttaagtggcatattgtcaaggacgtgcctaacaatattctcaagcacatcatcctagagaacaatgagaacaagcctgtcacgaatagccgtgacacccaggaggtaagcatagtcttttttttttttcaagtttcctgaattgtaaaacttgccatcttgcctccttacttacccttttgatgataatgtagatacaccttgaacaaggccttcagatgctcaagatcttcaaggatcatgtcagcaagacatccatcctggatgactttaccttctatgagagccgccagaaattgatgcaggataagaggtcgaaacagcagcaggtccaaaagcaggtacatttgaaattccaaatacatgctttatttatcaacaacagatttcatcaccttgcccgtctaatgcatgtgggttgactgtcttgaatcatctaggtctgggacagtaggacccccatttctgtcaccagcgagcaacagcaggaagctgctaatgggaagcccaatccgtctgatgtaccaaatggtgtcactgcagaggtgaaggcggtgaaggctcctgcagagaaacccgtcctcgccaatggagtcaccaacggagtaaccaccactcccgctgtttcctatgcagctaaggtggcccaaacagcaacagggaaacccatcctcgccaatggagtcgccaagaccggttagctcgaccgccaccaatgcttccatagctagccgcaagcgaggttggatgtcctgacaactcgactgaggcgcaagggaaaatggtgtgaccaaccaaggcaggctgtggaactggcagcatggcccgaagagcgttgctgctccatctcatcgctactggagagcagttggctagttagcgtttttcctagtttctcttttcgctgtgttctccgtttgaagactcttttctacggtagtatcagaatgccagagacccgtggctggacaaaaggatttttgcgaaggccgtctggttggttgtgtgttgcgtcgtcggggtcgagtataccctgttctgttcgtcgttatattgagtggatctgaatgaaagtgggttagattggagcttttcttcttttccccccgtccttttccggtttgattattgcttactgttgaatggtgatggtgctcggctgctggattcgtttcggtgctccactagactaccaccgcattgggctagtggggactagggagttgttgcgaagatgacgaagcataagggccgctttttgccgtagtctgctttgcgtaaaatggcttggcacactgcattagccgcctttctgaaattgtccaaaatcatcacctctgtaaagttgcccaaattcacgaccatcaatttggtgacataaatttgggcatgtcaaattttagctcggatagaggtgccatgtaagacacatttgcgccacaaaatagctggtgcaggttactgctatgtcctgtgtgctgtccccggggcaaagggaggagagggagatttttcttcgacggtggaaactggaagggatgggcctgtggctggtgaatccggttggggaagctctggcctaatacgggtgttcaatttcattccatcaac

SEQ ID NO: 4025 - DNA, 6541 bp, Sorghum bicolor
attcctcatcccctaaacccctcaagggggaatttagttaacatatgtctttcgtaaaacctataccgcccctaaccccccctgcctagggaggggactcaatccaataaaaagatgggttgtctatgagtaaagtagatctatgcagtggcatgattttcatggataccacttttgtcgctttccataggatgacgcgaggggacaagtgtgatcctaggagccaagtggtttgcctgttgtttcattagcgtacctccaattaccaaacttaagttagtattagataccacatggtgtagagaaaaaggtaaatacccttttgatctagtgggaagaaaagacataaaatctctgtgtgccataatgcatgagagagacataactcctttgaccttttctcagtacaaaagagaatatatgaacaaaaaaaacatgtgagaaataaagaataaagatgacatttcagagtccatgcctaactctgcccttaatggttggaacaagaatatagccagtaaaagaagatagttgcaaggatttacatatgttcaaggcgaatgtttgcttaaacaaagcattgtattgatttattgactattttttagtattctgtacattataggataaggctgactcagaagtctacaaaagtttttccatattgtatgtgccacaataaaaaaattctagatttcattatgggccatttcctgagagccaacgattaagcaagaacaaattgaagaaggtgtgcctatttttgtgtgcgagctagagaaaccataatgaaaatttaatcccacacttattgtttcccatttttaggcgcatctgcactcaaaatcaacattatagcttcaccgttgctaagagtctatcaagtcctagatcaacatatgagccaaatatatttttgtatatcatatttatagaagtttctactatttttatcaatattcatagttttaccttggttacagtgtcatatacaaagatactcttgcctagttattcattacgcgtatacacaatcatacataagaaagcatttatttatcaatgaggaagagacagaccgaaaaagtcaccactgttgttgcttagatagggctctgttccattgcctagaggcccttcttcttattcttctccgacgaggttgcttatctttagattgcttaggtttagtcaaaataaatctactagcaaaagagagtttgttacatgcgatgtctttgacgagattattgtgggaagtcatttttataaacaaaagtcagtttatgattattatctgtaagagcggggtgctcatggacactctcggagtcgctgaactcatcctcgatagtgcatgcgtagagaggaaagcaagggttggtggtggtgaatctgaagtctatgctttactcgatgatttaatcgtcattgttgttttgtattgtagttttagatgttctcgatatggttccaaaatattatatctcgcgatgtgtctaatctttttgaggttggttggtagattcgatacgagcagtgtactctggttttgatttttctacaaagctctatttgtttggagtgtcgtctttatggactaaactctgaaagcattggattaaactggcttgtttccacgcaagcccaacaacaaaacaaggtgagaaaaaacatcttaatgtaatttaagggtaatttaagcagcataaagtaacccctctaccatagaagaacattcccaatgatatcgtaaccttggttttacaactaacaaagtatagaacgtatagacatgaacacatcctttgtgtttttcacacctagataaatggaacttgccctgaacattctgccgcagaccttccgactccattccaaactccaaagagcaagaggggggcacggatgcaatatcgaagaaggcgagggggttcgtcccagcacaaagggctaaacaaaccaccgcgtcgttataagtacagcgtgggcctcgcctcggacaagcccccggccgtctcgatcccagaatccgagagagagagctccacaggccaggtccccatcgccgcggcgcctgccccccctgctcccgcccggtagtagcctcgccgccgccgctgccgagatggggttcgtctccttcgtcgggagggtgctcttcgtcgccgcgttcctcctctccgcctaccaggagtacgtgcctctcccatttcctctccctttgcctgctcattgccgccgtgcttgctcgccgtgtcgtttcgagtccggtttcggtagatctggcgcggagtccgtgggagaacgtgggctgggagctccctagtgcgtggatctcgcggtggatcgtttggtttgtgaggtgtaggggcgtgacgtggttggatctgctcacattttttcggcctggtatacggaaacgacgtaattttggttttaggcccttcgatctgcatctgtgccgttgaattacgggtgtatgtatccgtgatgtggaagtcagaacaattcattatctgaaaatctgggtagttgaattgcggtagtgatctgcagatttggagggagctgaagtagaacaatgtgtgcatttacttatttcaagtttcttcttgccagctgtactctgatctacctcgtagattgctggatgtgatattctagttctacctcgtagattgttggatgtgatattctagtgtaccatatgtatcacaaccactgcccgatagactaatattggcaaaattcaaactaggtcattctttaacttgtggtcctgaagcctcaggagatttaggatatgttgattctaagcatgggttgtgcccttgtggaaccacattgagtttgctgttctaataggaaacaaataaatcataatttgacacctcatcttgtagttaaaataccgccaaacatgtacgcacagcagaataactaccaatcatggacaattttcatttagtgacataagctgaactgcggaggtgtgtgaaacatcacttgaccaaactggtccactgccaaatcttccacggctattcattatgcctctaggtttacggaagttgcaacacaattgtcatgaactcatggtactatgtgggaagggggattttttttgggctgggtggagcgaataaatggttccattccttaagagtgtttatttcagttgctatcatcaattattatgcctccttgggagataagagaacaaacaaaacccaagatcttcattttgttgctgctgtgtgagggaagtttgttaaagtgacggtctccattttttcacttctcaaggaggcatcacaatcgtttgcgttggtttaaaccagtgtcttgcattttctgtaatagtatctgcacttaagctctttgtaacctccacttggactataaaacatgagaatgctgtgagacctatatctaacctgtgattggatgatctgcactgagtatgaactgttgtgtgaacagtcagtcagtcatattttatagtaactggttggtgttttggggttgtgaatctaaaggtttgataagaatcataagatatgattggttcatagccaagtcctatcaccacagtgttgtccacttacttttacaattgacagggtttaagtagtagttagtgcttagtaggaaatatttatagagcagagaccatccattcaaaggggttgctagttcagcgtttttatgggtagtgacatcaggttttacgcgagatactgtttctgtctatatcaggatcagtattggtttcacccttagtcttagtttcaattgagatgaagcttgctcgctcaaagcacatctcacaagtaatctaattataaccgttgtctagaatctttctctgcatgtgctacccatgcacatgcaggagtcaagtctagcttcaattatttgctcttccttcttggccatatctcaaatgaattaatagtcttggcacttcatttcacctggatgcaggtttaatgaattcggtactgatggtgggccagcagctaaggcgctccagcccaagttcaatgtgtttgtcaaaaacatctctgctcaactaggagtagctgtgccgcacattgaggtgagaatttgccttttttccccctcatgacatgatttgtggtatgttctgtgggtcactgatttaggatgcttacatcattactttgatttatccagctgaagcatgtgattgctgctacaattggtcttaagggtcttggaagtctcctttttattttgagcagctctctcggtgcttatctcctggtatgtattatgcttgcgctgctgttatttatttcctttgatcttttacctatcctattttaattaaataatcaccttcaaattcatccttctttctatgaccctgattgtaaataaatgcagtatgtatagagccacacaacacttttccaggtctcatggcgttcattgctccatgtgtgcatcatggaaatattactccttgcctagtaaatattgtcatacaagcatcgctgtgtagtgtagtcatgtgttttatttccagttgagttgaaatgtccgcaacttagacacttagtttagtttcatagagtttcatttgggactgcagcacacatattttggttatgtgattaatttatgctgttcttttgactattgaggaacctggctacatagatattctttgactattgaggaacagataaggacacccttaggccatattttctttatgccgttggcttttgcaatctgggcttaaaaattggtatgcatttgtatcttaaaagctattgtgtaatgacgcaatttgtatcttaaaagctattgtgtaatgatgcttatgatacaaacatctggacctacctggtgtacttacatgtcttgcatatagttttgtatccaattttttacctggtaggtcttgtttctagctgttccattctggttctttacttgataaaataataaaataattgagataatatatatgttcgataatttgccttagttaagctataaggcaccatatatgttccataatttgccttagttaaactatacggcaccatgccattcactgtctgatatacgtactcccaggaaatactgaggatcaatctttgatcctaaaaaccgaagtgtatttttttaaatgtttcttgccttgggtccatagcccctgctccctttttttcctgctgatttgctggttattgaatgctcaaatgggggtgttcctttatctagctcccatcgttttgctaagggtcatcactcactcctgcgaatatgttgctatgatagaatgctatatgagttacttctggacctcccgcctttactatcttttcctgctatccttactccttaggcactgaggtcacacctgctgttctttttattatgaacctagacagatctgatcttttagtttgtctctgtggctaccctagctactagctaacaaagtcactttatctttgcagttgttttaccttgctttgatcactcctatcattcatgacttctacaactacgatatggagaaggcagaatttgcgcagctctttgggaagttcacccaggtaattatggatttctctgttgaaaaaaatgttccatgcaacaaacattctgttgcctatctaaatagcctatgataacttgtgactgcaggatgtggctctgattggagctctcctcttctttctgggcatgaagaactccatcccgaagcggcagggcaagaagaaggctgccaaggcgaagacgaactaaggctctttagatagttgcacgccacaggcggtgtcgaggagacaggtctatttgaagcaagctgcgatgcagtcaatgccatcgagctgcgcttttacatgtatcagattccattttgcggggcacggcccgaacgaaggtgtgagcggcggattaggcgactagattgcacaattatgtacttgcgattggtttgttgaactaggttgccaattgttaatcttatctatttgatttatctttgcactgggccttgttagcactgattcaatggttggtagtttcttttagtttctcgcttgtcagcttatgtaatgttttttttttcgatttcggcagacgtgcaaaatccaagcagactttggtgtggcgtcgtgacttggtgtgtttggataatgactgcgtgttgccactttttttttgccaatcttacttagtttttttttttttgcaaaatagatactgtagcactttgtgtttgacaaatattatctaactatgaattaactaggtttaaaagattcgtttcaaaatattagtgcaatagaaaagaataaaattaacacggctggaaatttaagaacagttatagccttctaggcacatgcaagttggaatagatattgatctggttagtacttagtatactggctgctccgacctaacaaaaagcagcttccacaaatcacagtgcaaacatgtttagaatacaaacttatctcaattaataaattgaagcaaaata

SEQ ID NO: 4026 - DNA, 3548 bp, Sorghum bicolor
agagaaagaaggggtaacgccgccatattatgatgcaagagaaagaaggggtaaactcactaaaatcatggtttgccaaatttggcttggcttgtaaaatatgccaacccaaatctggcaaactatgattttagttgttatttagtttgttagcaaaacttgccaaccttttacattggttttgcaaatccatgacaaatttttttgactaacttttgcttgctaaatctttagcatggcaaattttggaagttgattcttactcttccatgatgtccatcggacatgtgttccaacatctagaaaaaggagactactagaataactatattttgggatcacttaagaaacatagaaaacttataatttcgtgcaaaacgttagtactagaagacctatatttcggggctactgaaaactatctaagatctgaattgttgagaagcgttggcatgtatttttctctctatgagtattaatctctttgtcatgttagattactaggggatgtgaatttctgagaagcgttggcatgtatttttctctctatgagtattaatctctttgtcgtgttagattactagctggggagctactatatatggttggttggcatttgggtcaacattttgttccattttctgttgacgtaagtttgactgagttgacttcaaagttttttttatttgggtagaacaaggagcaccttcaggtttgaagggtgctcaagtcacgttgaacgtagagaccctaagtcagactttgaagtattactcttggaggatgaactgttgaagcatttagagaaagcactactctttggatgagttgttgcatgcaagacatgatgactatcatatgatactgaggtatgtatccagtaaatatgatgtgccttttatttagcttgcattagttctcatttttccaaagcacaagtgcatagctcagccctaactaaatctggtctgtagatttttgaaagcgaggaaatttgatattgacaaagcaaagcaaatatggatagatatgctagtggtagagggagtatgcactaatacaattgtggaggttagagtctaagcttaggccttgtttagtttcatggtgtaaagttttggatatcacatcatatgttacataggggtgtcgcatagagtgtttggatagtaataaaaaacaaattaaccgcaagatgaattattaaatctaattaatttgtcattagcacatgtgttactgtagcactttattgtcaaaccatggactaattagacttaaaagtggaaactttttggggagaaactaaacaagactagtcataagactttaactttgtttgacttttatatgcctcctgtcctaaaacacaaacctatgaagattgaaaatttagtgaccgaatacctttgtacacaaccgagaggtagcctcaatacttttttacactctttttttgctttttttttcttgcctagaatatatttgatagaattaattttgaacttaatgtgatccgtagtgttaccacgagtaatatactagttattaatctaaaaaattcaattaaaggcctgcttgcttgggctctaaaatatgctaagccaaacatttggcaagccatgattttagttatcatttggtttgctaccaaaatttgccaaccttttacattggtcttgcaaatctatggcaaatttttttgactagcatggcaaaatttagtcgtaaactaagcaagaactaagtttatatatggatccaaaatttgccaaccttgctatctgaagtttacttagccaagccctaacatgattcggcccaagtatcgtgacaacaagattcggttccgttcggtccaagtatgtgcagccacacataaattccggcgcatgcacagtgctatccttccggaccacggcccatgggcgctagtggagcagtggaggtactataaatactacagtacacggtattgcagctgtactcctcccctcgcagtacatcatcagcgttctccaggaagagcacacatggctgagaaggtgctgccttcttctatctccgatcactctgcttttcttgttgctgaatgtctcctgcatgatctctgatctctgtgcgtttcttgttgttgctaaataaatgtctcctcacctgcatgtttttatctacttgatttgatgatcatctattcatctgtgtttccatgattttggtttatttggctactagctagctagcaccacttgcagtgacacacgcacgcagagtaatttgttatagtatcatgcaggtgtccacgttggtcgtgacactcaaccatggctgctgccgctgcttcaccaagatccggaaaactgtctgcaagctgcaaggtaataataatcacttgttgccctcccgattcagtagcgtgcgccttatattgtcgtccggtccttgtgatcggaatttcttgcgtggtggcagaaaccgaggacatccgggtgatttcctacgacgaggtgtccgggacggtgacgatctctggcgccttcgacccgctggtgctcccctgcaagctccggcgcaaggcgggctgtgtgatcagggacatccagctcgtggcggcagaactgcggctcacaccgcagccaccaccgcgtccggcgcagcgaccagccatgctactaccaaatccgtcgtgctcgtgctgctgcggcatctgctggtgcaggaactacggctgctgctactgcggttgccagccctgcgcctgcttcgtgaaccacccgccgtgctatgggctgccgttggggcagtacccaaagatggtagtcgcctgcgaggaggtgtcgtctccggcgtgcatgatcatgtgatgtttgcttgtcttgaggagacgtcgtcgtctccagcagtccagcgtgaaaggacttgctattgctagttattagtttgtcatctcgtgtttcgagttgttactgtggttttagtcttttgtggaaagaacgttgttactgtggtcctgtaatctgtagtttatagtggaaagcaccgagcaacatggaagggtgatcaaagagttactgtggttcttaatgaaagggataacgcatgcatccttgtttagtttaagaattgaatctcgtattagttcatatatgcatactgttctgcatcctcgctcgttacagacttacagtgtatcaatggccgagactgttctgtatcctcgctcattacggactatcaatggccgagtttgactttcatatagaatgagaaatcgtagtgtataagataagtgtcctgctatttcgaagaagaagaattcccagaatgaactggtcctgctattttgaagaataagctgggtaagatggttttaggtgacatattttccaatttgtttgctcctttatagtatagatagatgaaatcccataatgataagtatatgagctagctctacacgcgagtgaccgatgagcagtcctcgttaccgtgttctgttttcagtgataactttttttttcatccttcatgttctggcgtttacagat

SEQ ID NO: 4027 - DNA, 4729 bp, Sorghum bicolor
aaaaataactaataatataatttgtttataatttacgagacaaatcttttgagtctaattaaatgattggacaatatttgttaaatacaaatgaaagtgctacagtgtctatttaaaaaaattaaactaaacaagacctttgtatacttgctctcatccaagatgagtcagatgaccctacgtggggtcattgttattgtccagatgcgaagaagcatttaatagtgtgcaacgataaacgttggaattacaagagcgaagtatctcatcttgctcatttcagtggcaaaatgttacttcgctcttgtttcggtcagtggtagttgtatcacgcgtgcatgcatctagcttgagcgacgtggcatgtaaaagaacatgagcacgacaaaccaacgctaaattaattcgcggacttgtagcgtgcgttggtgccttatttatatatatatatatatatatatatgaagtagatagagatgaaaacggatcggatacgatcttatttgtctcggtggcaaaatgttagtaagtgtgacaaggttctgaccgatgtgaagggatagatgctaatatcccccacctccaccacctgttgccgccccgccgcgggcgccttgttccactcctctctcctgtatgccgctgcaagctctaggctggacttccttcttcccatgacgagctccggctatggcagccctgccctgacctggccaccgcgagggcctagaagacattcagccgccattctcatcgtttggccagcttatctctccccaaaatatcccgaccggagttggagaaaaaaatatgaggagatgctaaagagggagaccggagttggagaagaaggtggccggtgccgttgggcgcaggcacatcggacggccacgcatcggacgacggagaaacagtgcgtgcgctaagagcgtggattctacacgtgtgaaaagaataactccccataataaaaacatagatcttatgggggtgtttgagactgctctgctccacgtttttcagctccactccacgttttttagccaaacggtttcagctccacgcactgagttcgagaaaaaagggtggaattgtgaggtactttttgtggagctactccatggtggagtttgtggagcagtcccaaacaccccctatatctatttcggtattgatctcacctatattttggtatcatctttaccttttttggtacttttatgtactttcactttgatctcttctattttacaccgttcgatttctctcgttagacggtctatattttttccaattattgtaaaatttctcagtctttttatactactagtatatcaagaaaatttatatatttgtatttgcaccagacaaaaattatgataaatgggtgatatttgtaactgattgtatgggtatttaagagcaactccaagagcttaactattcttattgtgaaagctattttaaaatttctatagcaaaaaataggcttcaacacatgtgctatctggttttttaaaatagaaagttgactatcccttgattttcggtagccatatatagccaaccactaacactggtgattttgtaaaatagcaactgtgttgtagacttcttcttttttaaagaaaatttctatttcataaaatggctaaataataaaatttggctactaattttagtttttttaacttactaattttagttaaactcttggagttgctctcatccgttttcctcacctatgtctgtgtctgtgttgtctgtgtgcagtcggttggatggttggtggcagccggggcaattgcgcatgcacggcatgagatacggaagcggagcattggtggatgtcgtgagcacaccgttggtcgttgggggcagtcatgatcgcagagatactcctatatagtactctaacagcaggggtagtcagcctcaaaaaggaaaagcgtagcaggaaggaagacggagagcgtttgtacgtgctgagttttgtgaggatgacagaacagcagttgccaccaccgccagcatggttcttcttcctgttgctcgctgtcgtgggcggcgtctactcggcgtcgctgtcgttccgcctcctctcctacctggctctttccttgcgccgcccgaaggacctacgccgccggtacggcgcgtgggccgtggtcaccggcccgacgtcaggcataggccggtccgtggctctggagctcgcgcgccgcggcctgaacctcgtcctcctcgacctcgacgccgccaaccttgaggagacctccgacatggtcatgtctcgccatggcgtggagaccaagaccgtggtgttcgacctctccctcgtcggcacctctcgaggtacggtatactatacgtgcctcctccgcgtttggccacgcacgggcaggcacttgcatcactgagtcttgttggttttcaggcgacgagtccatgaggcggctccgagcagcgatcgaagggctggacgtcggtgtgctggtgaacaatgccggggtgttgaggccgtccatggtgtacctgcacgaggccgacgtggaggcgttggtgcggatggtgcgtgtgaacctgtgggcgctgacggaggtgacggcggctgtcctgccggggatgctggagcgccggcggcggggagccatcgtcaacatgggctccgcgtcgtccgaggccatcccctccttcccactcaacaccatctacgccgccacgaaaaggtacgtacgcgttcgtttcagcacactacgatgctgtagtacgacgttacatacatacaaagcagaggctactggttgttattgggtttcattttcatttcatcagctgtctctcttgcaccgtcgtctgttcatcttaagcgcaggtacgttgccatgttctcccggagccttcacgtcgagtatagaagccaagggattgatgtacagtgccaggtaattaatattgataaccagcaaatttccgtagctcaaaaagattagttcctttttttagagtgtgcgtgccgcacacaggctacagtaacttaggatacgctaggtgtgcttataaggagagagagagagagagagagagagagagagagagagagagagagattagttccttaacctgctgcttattaagtcgagcaaagaaatttcgccgcgataatatatgtatatactttgacggcagtcacacatcaaagtttttgtacctcctttggggtagtaaatgttccaaatagcccaatatagtcagatttagcctcaaattaaaggctgtagctaatccacttttagttctaaacgctttttgccgctattagatggatttatcccgctaaatagcacctcatttagcccgctaaatatagggagaaactgaacagagttgttgaaccagctgtgcaaagataatccactttgaacctatgtgtttatgatagtatttgtaggactatgacttgttaattggtatttgcaatatgtgattcatcttttatgtttatatataggtagaatccactaatatttgacatatattttgttcagccgctaaatggcttagtccgctatttagctcgctatagccttttttggcctttgaaagaggcaaccactaacggtgttagggcccgctatttaaaacattaggtagtatatatatgttgtggtacgctagcacgaagtagcatattgaattcttgtgacatcaggtagttgctcacattcagaggtgttaaaacttaacatatattgtaacatttttgttttatttaacaattagtgtttaatcatggactaattagactcaaaaatcatctcgtatattattttctaactgtgtttttagtcttataattagtatatatttagtactatatatatatatatactaaaacatttaatttgatgaaagtttaaaaaaatcgggagaaaccaaacaagctctctattcactggtctgacactgcactccaggccccgttcttcgtggcgaccaagatggtgaccagctgggccgtgcgagacaattggctctcggcgctcgtccccacaccagacgcctacgctcgagctgcgacgcgctggatcggccacggcccgctctgcacccctaatctcggccaccagctcctgtggtgcctcgcgggcatcctgccggacggcgtgcacgactggctccgcctgcgcgagcaccggcggctgagagcgctgttacaggaaaaatgagggcgtccaaaactgggccgaatgcaacaaactgacacctcagtttttaatttgttatatacaattatctcaattcgatcgtgcacggacagtaattttagaaagaagatgaagtttattgcaacacacgagaagtgatttcgtattgtcagcagacaaaaaaaaattttattgactgatggacactttggtttatgataagtttgatgaaatactctgcacatgcacccattaaaatgttcatttgtagcttgagagaagagagaaaattaatgcccagctcgcgttcccgccggcgtgtgtgcgcgctgtcgtcctagcttggcttcacgcgagctcgctcgtcccgttcgctccagcccagctcacgttcccacccgcgttcgggagatccggcccggtgttcacactcacgcaggaaccaatcagagatatgaaaaattagaagaataaaggttgctggaatcacatgtaaaattatattatatgtacaactaaat

SEQ ID NO: 4028 - DNA, 3674 bp, Sorghum bicolor
gcaaatttctcatttttatcttctaagttcctttcgtgtttcgtcagcaaagatgcaataagaatacagatctgcagttacgttttcaagcagaaatgcatatctttgcaaaaggccaaattgccgaagcattataatatattctaggagttacctgtgcatatgcatgcctagctggtaaaagaaaacctaagagatcttagatggccaatttcatttacactgtatggttcatctttggcagagtcaagggctatttgccgttacatatgtgatcagtatgcggaccgtggtaaccaggcgctctttggcaagaaagaagatggtgcggttggccgtgctgccattgaacaatggatagagtctgaaggccagagctttaacccaccgagcctggctattatcttccagcttgcatttgcaccaatgatgggccgggccactgacctggctgtggttgagcagaatgaagccaaactcgctaaggtgcttgatgtgtatgaccaacggctgggggagagccagtactttgctggtgatgatttctccctggccgaccttgtgcacttgcccaatgcggatttccttgtgaacaggactaacaaggctggcttgatcaccgaaagaaagaatctggctagatggtgggatgatgtctcggctcgtcctgcatggaaaaaggttactgagatgcagagcacaccgaggtcctcttagagccttttttccttctttgagcagcttctgatggcaattagttgcattctccttgttttgtcatcaagtccttgtttgtaccttttcatgttctcttatcggtcttattggtcttaactcttgatctatgtatcgttggatctgttcttctggtcctttagtttatacatgtatctacaattattcatatggtatgccatccagataatgaagtagcctgattctgtcgcaaatgcactgattcaagagcttggtttggaatgcttatgaatgtaatctacctcatctctcgagtgtgcaactacttgatcttgatcaacatattctatatctatggattaccccaaatatggagtgggttactgtagttacctgtttatattgcactggtgaaataaaactataaaattatgatgactgaagcagctctatgagcaaaggactgtatagttatgactcatggaaaactgaaggcatggttattgggcaatggctctggagcagcgcattagagatttttaaagaatttactgatactgtaagatgctaccactacagaatgaagatgaagaaaatggattttcccacttcatttatttatcccacctgataccattagtatcatgccaaagaaacaaaacagctcaggatgccatttcatttttttttactggcattagtcctgacaaatcaactttgttgttgtaactttcttttggttagaaaaactagaacttctgaaatacctgatttaaagcagaagaacacgctggcatgctctttattctttttaaagcctaagcacatgtagacatgtcctttgttcttaacttgcctccatttaatattttgattctatctgactccataggcagggacactgcttttgcccaaaaccttattcttgtactctgacagaagctacaaaatcctctttgctgatgttagttgatgtcatattcttttttatctgaaaccagttctcatgacatatggccataaaccttctatgcattatgcagtttcccaaacttctgtgctgtatattgtatgtttcattgcagtgcagaagtgaaaataaataagactgttttgtatgcattgttttactggtagagacaatatgattgtcggcttgttgcaagcaagaatccataccttcccctttgtctttacactttcccttttccatttatgtggtgtcaggtagcaaggcaagcatttcgcctttcttgtttctttaaatacctggtagtgagacatgttggcatcatccctcattgtcatttcacagcttgagctagagatcaaagaaatcaaagggaagcatggcagcaggtttgcaagtgtttggccagccggcatctactgatgttgccagggttctgacatgcctgtttgagaagaaattggaatttgagcttgtccgcatcgatacatttaagacacatcacaagcttcctgagttcattaggctgcgggtatgacacttgcatcagttttttttcctttttgtgctttgtttcaattctcaaataagttcaaagttgctcttctcctgtttgttatttacaggatccgaatggccaagtgaccttcaagcatggcgacaaaactcttgttggtgagttacgagtattacattggcttatatgaataaacattgagcacaaaatattcttggtttcatttcttatagagtattgaaatgcgaaccttaattttgtgcagattcaagggatatatgccggtatgtttgtaaccaatttccaaatgacggaaacaagaccctttatggatctggtgctctagaacgggcatcaatagaacagtggcttcaggcagaagctcaaaactttggccctcccagttctgcacttgtctttcagctggcatttattcctcatctcagtcatctgggcattcgtcaggaccctgctgttattgctgaaaatgaggataaactgaagcaggtccttgatgtttatgacgaaatactctccaagaatgagtacctggctggtgatgaattcaccttggctgacctttctcaccttccaaactcgcactacatcgtgaatactgaaaggggaagaaagctcttcactaacaagaagaatgtggcaaaatggtatgacaaactctccaagctcgagacatggaagcaggttgtcaagatgcagaaggaacatcctggcgcatttgagtaattgcttaacttggtgggttatgagtttatcttgaatggcttcatcgtttgtgtcggtctggctctgcagtgttgttagtcatccattgttttgccatcagtgttgtcgtgtcaaccaaaataatgtgaagccctactgtgatgtattatccttttgttctgaaacgcatttgtctccatgtattgaagggtctgatgaataaaggtgaattattgcctatttgttctatgtgccaatttatcatcacatataagctcaatctcttaccttgtcatgtatatgctcaaacttcagacttttactgatgttatcgagaaatatagtagaaagtctgttctaactgtcagttggtattccttttgttttgataaatcaaatggctagtttgatgcgcctttgattaattgtatgccataaagtcaagatttgacgccttttggcgattcaaagtacatgaacaattttgaagtcgaatgtacttgcaagatatccaagtacactacagaaagcacacagtgtctgcttgactaaaggcattttgctgatgttagcggaactttgaagcgtccaaatcaccgaaactttttttttatcgaaaacgcaggagaactgcgcttcattgtattaagaaggtaaaaaaagagggccttttccctgtgtgccattataaaagatgctcgattcccctgtgccattaaaaagttcgctcgtccctgtgtgaccagacacaaatttgttttgccctgt

SEQ ID NO: 4029 - DNA, 10865 bp, Sorghum bicolor
gaccccactaatttgtgaatgttcacttaattgtagaccaacgatcaatctgacatgccccacaagtttcgattgtaagagaaaatgaattcgcaccactttccctatctggacaatgccatgcatgcggttcgttctcttttcgtgcactctgttctcagacctagctaataagtgattctagcagtccaacaactttccttttttgaaaaatatatttttataactctccttttggaaagttataaagttatactcacaacttttatgtttaatgtttttgtacaaaattattaccatattttcttagaaagttgcaaagctatgcacataaattttacatataatattttgtaaaatataacttaacaacacaattttatttttttaaaaaatcatttatgaatttttcctttttgtaagttacaaaattatccatataactagtatgtgtaactttgtacgtaataacttatcatcataattttctatcataacttttatttttttagatttttttcataacttttcattgttaaaaagttataagttatatacataaattatatgcataatgttttatgggacaacttattattataatttgtcatcatatttttttgacttttatgttttgaaaaaactataactttttattttttgaaaattacaaagttatacacacaacttatgtgtataagttactatgtgacaaattatcatcacaacttcttattagaacttctgtagatttttgatcataagagttaattagattagaagaagagaaaaggtgaaagaagaaagaaaaatgatgaaaacaaaaaaaacatggtgcactgttttgtactatatgtttacaggcataaccagtttttatttatgtcctagaatataaaacgtgctgtttttagacacacgtaaatcaatgtagtagtactattagtgttgagagagagaattaaatataatcattagtctttgaaaagaggtgaaccaaaaaggcccaaacaggaagtgagagacaaggaacagcggaattaggaaacaaacactattcgtgaaaatggaatttggaaaaccgacaactcaagtacaccacatcctaatccaaaaacttattttatttagacactatatcattttcgtttatatttaacaattattattcaaccatatactaactaggcttaaaagatttatctcacaaatgtcaagcaaactgtgtaattagttatttttttacctatatttaatgttctatgtatgtgtcgtaagattcgatgtgacaagaaatcttgaaaaagtttttagattttagggtgaactaaataaggccctgctagtagctgcatttttgttttcctctcaaggcattgtttagttggtgaaaaatatttgggtttgactaccgtagtgttttcgtttatagtatttgataattattatttaattatagattaattaaacttaaaagatttatcttttaaattacaagtaaaatatatagttagttattttttatctgtaattaatgatttacgtttaaagatttgatacgataggaaatcttaattttttttggtaactaggcgtctaggcataagccagcgaccttgtctggctctggcagccgggatttcctttcctgctctagaattccccacagccagacggcacgaaacacgcagcccaggcccaggacggcgcgcgcgttccagctcatggtcatggcaccatccatacgtccacgggccacgagcgcgcaacgtttccgcgcaccacacccacacgcctcgagccccgtccaccgacccgcggacgccgcgccaccgtccgtccgcgccctgggcccccggccgaaaggcgtagccagcacagggcaaagcaaagccgtggctgccgttgcagtgcattcacgccgcacgccccacgccgccgaccggccaggtccccaccgcacgccgcaaaatccccgcgaaaagctgtgaccagacagcaaaaaacgcaacccgccaaaaccctctcaccgtcaccgccctcgccgagcacgcatccccgtacggcgtctcccccgccgtcagtggtcgtctcggcgattcggttttgctcccaaccgctcttttttctactctactcccctgtgtgcgcctttgccgctttgcgcccctccccacctctgcccctgccccgccccgcctgcctggccgcacgcgctcggctcgccgcgtcgggccgccgcaggggcgaacgaaacccttggatcagggaggctccgggcatcgctgctcgacccccatgacgtcctgcgggtgcctggtgctcgagaaggtggagggcgacgcggcggcgaaggcgagggtgaaggccgcgccgggcgccggcgccggcgctgggtgcggctcgtgcgccggggactggcggggccggtccgaggccatcttccccatctacgtgatggggagctcgcgggggagcaccgtggcggcggcgcgcggcatcgtcgactcccccgaggaccccatatgggtggccgtcaaggcggaggccaagtctgaagtgagtatgcttcgggacctcgattggagtattggttggaatggatcgcagcttgcgcttctgtttgcgccacgcatataatgaattaataaagctacgtttgttttgggtggttgtcaattgtcatcagcttttggttttgagcatcttatttaaggacctgtttgactatattctctttagtttctggtggcaacacgccagtatactactattagtaacttaaactatttgattttcactgtaaccagctcttgtagttcttggatttgatggaaccgttatctccttttgcgcagagtacgcaagtccacatcttttttccttctttacttcaacggtagagtggattggccacgataatctattggctaagcttagttgatgtgacaaaaggaactgcctttaaaactattggtagttctgatttgtttgtgtgtgtgtgtgtttgtaatagtttcagcttagccaaggcaatcaagagggcaaaaatggattcgatttcaaactatgtgttttttttctaactgtatatgtgcatatgccattgcgtttataactttatatgttgcgcaggcaaccctagtaaaaaggaaacgttgctggcaactcaattttgatgatgctgtgatctgtttctaccaaaatgtcatgtgaagatgcatatctcttgcatttattatgtagggaagctaggtattactcagttaagcttaaaaagcagtaacacaatccagttcaatgcaactaacattaagcataactacagtctacggaagagctttatgtctacctaataactgaaataacaaatcttgtaaaaaatggaaaaacaccattttgatgttttttttttcactcatactattctaacgttatgctctcacatctttatgcaaggtcatgtttgtcatgattttactgttgtattggttacctgatggctgaccgtgcgatgcttatattctacaggcagaaaaggaacctattttaagtagcttcttgtacgccagtgtgttgtctcatgactgtctggagcgagcgttgagcttcgtccttgcaaacaggcttgaagatccaacattgcttgctactcagctaatcgatatttttaacgatgttgtgcttaataacaaagatatgtgccgttccattcgccttgatgctcaggtgagtcactgttatgctgctatttcattttgttttatgtttacatattaattcttctatccatcctgttaatgaattgataactatgggaactgctttgctaattcaggctttcaaagacagagatccagcttgttcccaatatagttgggcactgttatacctaaaggtgtgtagttatgatatccattccaggatgctgtctgagtagggagaatttggttgctcattttactgtgtaggatagggttgaattgcctctcgcacccttctgtaccttgttacatgtttctgacaatggtttatcatctaattcttacaaacatatacgatactgatgtctagtgtcttgtcatgctgcttgtgcgctattttcagggttaccaatcgttgcagtcgtacaggatagctaatgtattatggaaccagggacgtaaagttttggcattggcactgcaaagccgtattagtgaggtgaagcatgatttcttaatcagcagatagatttctattgtatccatatggttttcctctgtgagtaacatttgctatcattattgctcgcaggtctttgctgtggatatacatccaggtatttcatctatgaatttagaagactaaatttatgtaatataataatatcaaatttatacatgcaactcagaacactagaaaatacacagtgggccttgatagatcaatctacttagtagtgacttgattactattcattttatctgttgatctgtactgtttgatcttaaagttctgggtcatcatagaagttttttacttaatgcttatgtagctatatctattgacatcctgcaagtgctttgttggtttgttcttcaggctagaaaataaatagcacgactctacaatgggtgcttacaccttctaagttttcagctgtgaaattcaaatgcttggttatttatttatttttaggttgtattctttgataaattattttttaggtattcagtgttttttatttttaacatgcagctgccaaaattggcgagggaatattgttggatcatggaacaggcctagtcattggtgaaactgctgtagttggaaattgggtttcattaatgcaggtgaatgcatgaatcaaccatcttttttccataaagaaacaacacactttttgtagtatgatttttattaacacaatttggcatgttcctttcttgtttgagagattgtttcattcttgaagtccatattaaatgctgagtggtttgttgaagtatggtccttagcgctttccaagatccttttggttgttactttcttgtattcttatggagaatggaagataaagtagttgttattttacgaagcgtctttgtttaaccattggttgttctttatatgtaagtcaagctggcgtgctgcaaaatttgttgcagacatacttctatcccatcgactcagtgtttgatatctatcttgagcatcgactcatacttattcacaaaagtagtgcatatgcagcacataaaattgatgatggtgttatggtagctatcaccttagcaaatttgatgtgcttttttctcggacacggtggacagctgcgtgtaattatattaaggaaaaaccgggtagagaaacccttacaaaacacaaaccaacaccccaccattcccaaacaactagatcgcccatgatacaccacaaaacactaccatgaccaggaggagaaaaacgtctttaagtcccctcacgagacaaggcagctagataagcattgcccttagcccctgccaaacccccataatacaacgtgatgctctcaaggtttggtgaagcgcctaaaaaacacagtagttacgatggtccaagttctgagaattataatggaatttaaaccttgccgaacctgtccgattacccctcattgattctaccagccatcgaaggaaactctcttgattgaggggagaggttcaggagccccatcgtttgtagcagcccaaaccaaaactgcagagagtaaacacatgccaccaaaaggtgattaattgtttcaccttcctgattacacaatggacagcaagggggcatattgcaaaccctggcaagccagcgggtcaaccgtccaacatttgttgtgggccgccaaccacatgaagcggcatttactcggagcccaactcttccaaatgctcaaggaccaaaagaaactgatccttggaagaaaccatcataagctgaccttactgaatattccttggaaggtgcagatgccaaatgtgatcaaggaattcagcaaggacactgatgttcaaggcccctgtaagtaggtgatccatgtcagattggtgagactccagaaccatccagctgttggcccaatagcttcaaatttgcttccatgtatagcaaatttgatgatatttcaaacaattaaaaagacaggtaggttaaaccgaagcctttagtcccaggcaaaatcatgtgtaaacaattgaaatggtttggttattctccattcatccgttgttcctttcatatagcaagttgcatccttaacagctaatcagttatagaactaaagcaggcagcaggcagaaatgtctaggtttttatcaactgaaactaccgatcttccttcgataactattttgacagccatgtgtgaataggaaaacttggcaagcctatgcagtattatcctatgatataatatacgaactagatataaactttagactgtaatatgccaaattaagtagacttgttggattatgtttgttccttaaatgatttctatgcacacatttgtatttattcaataaatattttgtgtgtgtaattgcgacccattcaattaagttcagaagattttccatttttgtctagattctataggcatgagaaaccttttgatgtgtgcatatacaagtaaaatgggaaaaaagtggggaaattttaggggcatatgtatgcttgcttcgcagtatcgcattactattttcctgtcatttttttcgtaaatcttaaatgaacttagtcctcgcttggctacaagcatatctgtatcctataagtatgccttgattgccctatttctatatattttcatgccggtccctttttcatatcatagaccaacctaggaggaactagctggcgttccattttattaatattaataagaaaatagtcacccaaatttgcctggacgaggatttgaacctggatggtctgggtatacatgcacacccttgaccaactgagctagctcagcttccttttttttatcatagttaaactctattaagattccaaagctttcttagggaaagtcggaagttcaccatcttatgagtctgacctttcgtacagggtgttacacttggaggtacaggcaaggaacatggagacaggcaccccaagatcggtcagggagctcttattggagctggtgctactatccttggcaatatcaatgtaggcgaaggtgccatgattgctgctggctcccttgttttaaaggatgtacctccccacaggttagaaactatactactgtattacaatcttacataataacacctcaggtgaaaactttaaggaacagatctgaacttggatgttctaatgttcctgcagtgtggatagtccttgtaaagaaagaaaacattaagaaaattattaaaatggtactgtccagtgtccagcgcgtgttattcatatattaactgattgagtgttttcttttaaaaaatgattgagctcctagaggcggcacctatgctcattttatgcaatgtccaaaattaactatgtaagttgcagggttttaaaaaaatggagcagagctttggttggaaacttgattgtactacattgccaacaaatagcctggcaggtggcagcagtacgacacctacatcatcatgtgtctaaaggccctagatctagtcttgctaactaatccctccatttcaaattataggttgttttgggtaatatacatagttttttactaggtatctagacatagtgtatatctaggtgtacaccaaaagctatgcacatagaaaagccaaacgacctataatatgggacagagggaatatatgatatgcgattttcctggattttctgggattcaatctttatctaaaaatataagcatttgacatttcaacacttcaatgtcctattgattgatctgctacctccagtaaattcggacctgactttgctggctatcagtaaagaatcagataagacagtccatccaaagtgctggtgggaatcaggcttgtatgggcccatggatcctttcctctccccttccaattggacgtaccagaaaagtctatatttttcttttgtgtaaaggtgtccttagtggtgtttaaatggagatctgtactgttaataagtgtccagtgaaacttagggagcccagggccaggacggcgcgcgcgttccagctcatggcaccatccacacgtccatgggccacaagcgcgcaacttttacgcgcaccacacccatgccccgagccccgtccaccgacccgcggacgccgcaccaccgtccgcccgcgcccggggcccggccgaaaggcgtagcacagggcaaagcaaagccgtggctgccgttgcagtgcattcacgccgcacgccccacgccgccgaccggccaggtccccaccgcacgccgcaaaatccccgtgaaaagctgtcaccagacagcaaaaaacgcaacccgccaaaaccctctcaccgtcaccgccctcgccgagcacgcatccccgtacagcgtctccccgccgtcagtggtcgtctcggtgattcggttttgctcccaaccgctcttttttctactctactcccctgtgtacgcctttgccgctttgcgcccctccccacctcttcccctgccttcccgcccccgccccgcctgcctggccgcaagcgcacacgcacgcccgcctgcctggcctatgatcacattaaggccttgtttagttcaccctgaaaaccaaaaagttttcaagattccccgtcacatcgaatcttgtggcacatgcatgaaacattaaatatagacaaaaacaaaaactaattgtacagtttagctgtaaatcacgaaacgaatcttttgatcctagttagtgtatgattggataatatttgtcacaaacaaacgaaatgctacagtaccgaaaacttttcacttttcggaactaaacaaggcctaatatgcattttcgttagtgcaataattagtttgttaacgatttggtcaccatttctgctatgacagtggtctttgatcatgtatattatgtatttatgttatgtacctcaacttaaccattgatttttacattattgttttccttttatttcaaagtatggctgtaggtaatcctgcaaagatagttggttatacagagaaagaagatccttctttaactatgaaacatggtaagcatgttcagagatttttacaagataggatttctgggttacatgatctacaatgctaggtgcttactttatgttgccatttttctgattggatgcagatgcaaggagagattattttgagcatgctgccgtcagattcagatgattcatacagctaatgatgagtcttctctctattcgtctgtggtgagcttatcgttttagccctagtaccaatgttcctataacagtccatttttagttagttagtctccaatttataaatatagcaaatgcacttgtaaagaaatggttgatgcatgaatgtcgaagttgctgctgccctgaatgaacctgtcttatttgcaggaatgttgtggagtaaaaaaggtttcgctgccttattggcaagaagtttgttgaagtaaaaagaaaggtttcatcgtctcattcgcagaaagcccagtaaaaaagtttgacgaaacgcataccaatggcattctggacatttcgtcactggcacaaggctggatagttgtgagctttgtgttcctctttctgtccaggcaacctaatgaagatggaaaagggtcacccaggactccagaatctgccatttatagttttatccccttaaatcttctgtaataacaccaaacattgtgttaacaaatgtggtaggaaactaggaacggtttattttccagagtatgtagagatttccagttcaaacatatacagcagtataaagcaggtcagcaacaattcggcgtagacatcgagacgtggactgtgctgactaaccttcatgaagctaataagttatatcaagtgtttgtggtagaaacagagaagcattcttcagtggtctttcaaagaagttaacaaaattttgaatgccggagttatcactgaaccagtctttttctttgacggggcagtccttccagaaactgaggtgccctatcatctgaaattttatctattccctacaggcgttatattgttcaatgtgtttctcgagctgtacaagagttcagtctacccaggagaattggctgctgggcagcgatctgtgtgactgtcccatgcgagtgcgccgccgtgcgcgcagcgtcaggcaaagctgcctgggtgtaaccaaacaacatctaaatatttattgtgatgcaaatgaaagtggcatactagtaaaaaaaaaggcttttgttttgcattgttctgagtctttagtacaatagtctcttcgttctaaaaagaatgtaattatatgtgagataagtaagctttcttaaactttactaatttatttccaaatagatttattgggcatcataaatataaatattttcttagatgaatttgatcaaacttaatttatttgactcattgagaagtgagaattatatatgatttttttgggcggagtgttcgcaattggtcctataccttatcaaatatttatttagacatttttggcccctttcagaacataaaattgcaaaaccataggaataggaaaaatgtaggaattccttaggaatgtaattgcagaacagagtatttaaaagtagaaaatggatgtttggatacttataggaaagccgcagaaataggaatattaggaagtgcacaatcgcatttattgatttaactaatggcgtgagactttacccatttcaaagccga

SEQ ID NO: 4030 - DNA, 5881 bp, Sorghum bicolor
gctggctttaagaaggatgataagcagctggatgctgatatccaccgcaagtacatctatggtctccatgttgctgagtatatgaaggtaagttgtgcatgttgcttgacagattatactttttcccatgtaatgatttggatatcaatttgtaagttaattttcataaatatgtaactatcccacatcaggtgctctatttgggggcgctgactaaatctcattggtactattattctcgtgaactattccagaatctggctgatgaggagcccgagaagtaccaggctcacttcagtgagtacatcaagaagggaattgaggctgatgacatggaagctctgtacaagaaggtccatgctgccatccgtgctgatcctagcatggccaagtcaacaaagacgccaccaaaggagcacaagaggtatggccctactagactactagctgactgatgtttctaactttctatattctatatagtctacatctgaatgtttctgcccaacctaattacatagtttgcttgctactgagtcactgacctgtgcacatcttctgtttattttaggtacaaccccaagaagttgacctatgagcagaggaaggctagcctcgtggaaaggctcaacgccctcaattcctctggcgatgctgatgatgacgaggatgacgagtgaagtgctagtcgcgtcacagtagtgctatcttatttggagatcagaacttgcgcaatggtgtttattgttccctgtagtcctgcaacaagcatttttgtttgagttttgagctggagacatggagttgatggattatcttaactaaagatgtggtgtctgttgaccttgctctttttgtcccttgattttgtcagtccttaatggcttcccttggtttatagtgtcaggataattcagtctgtggctttctgtcctgttgtttggcttttcgttttatggtggattaatgtggtgttctgtattttattcgaatgcctcttgtagctgttcaggttcagagtatgttcgattgttatcagcagtttagccataagtttttctttgttgcctgttgtcctaagaggtgatgagccccgatgcagcgagacatatgtactaggcgagtttgtaaagttatgtttattcgggggtctaggtaaggttgatcccaccagggcacggtctaaacaatcattttggttgcgagatgtgtttggatggggctgagttcggaagattttatatggtgcaatgcaaaaatctgggcattgcttactggtaaccatcgtcttgagcgcaagtcgcaaccctataatggatgggggtgatggatgcagccctccttttcacgtgacggcccatcgcaagcagattgttcgaggagattggcttgttgagcatgggcaggactgaacggcctcagctgaggatgcttgcgtgcgtcacgacgctcgtcttttcttcattttcccctctctttttggtgcattattcattcgtgacacggaaccgtcccggaacgagaaaaaaaaaatcgcggtaacgcctccaaagtgtgcgccgctggtcgcgaagtagccgtgtcatgttttaccgcacattggccatggccgtgaaaaatccgagggtgcttttccggcttttgggtaggcagatcggccacatagactctacagtaggattactatttattacgtcccgtgcgcatgtgcacccacacagatcttccctcgccgtcgcgcccgtggccatgcgctgcgctcgtgtgaacggcatctgcaggaggctttgctttatcgaaaataccctgcgcccgtcgcgttcacacgccgtcacgccaggcacgtccagctcctgccgtttcctccatcgtcttatctgcctgacgcccagcacctccggcaacaaaacgagctgtgttttttctggaggacggcgcgcgccggggagcgtgtggacgaggcgcggcccataaaaaccccacccacggccacccaacccatccggaggcgcgtcggcacacgtagcactagaacgtcgcgagccgtagccccacaggagcacaaacccctggactggaagctggaaggatcgggagcgcgacaaaaacccccaagagccactcgctgctgcgctgcagttcccgcgatatataatataaccggcggtgtgtggctgacctcgcgtacgtagcccgcacggcgcacgcgctgcacgccgccccggcccgccgtccgcccagctcgacatcgccgccgccgccgccatggatccgtacaaggtacgccgtgctccccacagtccagagccgcaccgcaccggctagctgcttatgttcttcgttcatgacttgatgtgttgcgttgcgtgcagcaccggccgtcgagcaccttcaacgccccgtactggaccaccaactccggcgcgcccgtatggaacaacgacaactccctcaccgtcggcgcacgaggtaactgctgctgctgctgtctgttcgtaccgccggctagagctacctagcgatgccgccgtacgtcgctctagcaggggtacctgatgagtgctgcgctagtagtggaattcaggtagctagtacagtaatacgttgcggttggttacgtacttacatggcggtgatactactaaacgccttcgatcgaataaactgtgtaggtagctagctacgtacgggaagtttcgttgtgagtttagtaggagtcagctacgaggaatgatcagcaacatgacgaagctgctgcagagagcagagcacgtacgcacggtaccactagaagaatttcgaagtaacacctttaactaatactacagtactaggagtacttcattaattgaactccaagtattatctggttactcctatgataattgataaggacagacagtaaaaaaaatctcaacttagctctattattacccctcgtaaatatagattaatgatgaaattcacaaaatatatctaaaaaataaagttctcagtccaccctaccttataaatttatgtctaaaattagaaaaagagcactaagaattccactgggccagcagcggtagagggggcagcagcccctctagccccactgttggcttcgtcgctgactgtacctccaattctagagttcaggaaatcaggagtactatgtcagcttagtcctggtttactttaccactagtacttgtgatgtttagaatcaaatcatcaagcagtcggaagtagcgcactcctgagtcctgacctctcgtggtctcgtacgtgtaatttgacggtaatggcaactgagctgagctgaacaagaacacagttgaagaagcgctgtaggattaattagttaattaatcattatatttgttcgtcatggatcaggtcccatcctgcttgaggactaccacctggtggagaagcttgccaacttcgaccgtgagcggatcccggagcgcgtggtgcacgcccgtggcgccagcgccaagggcttcttcgaggtgacccacgacatcacccacctgtcgtgcgccgacttcctgcgcgcccccggcgtgcagacccccgtgatcgtgcgcttctccacggtgatccacgagcgcgggagccccgagacgctgcgcgacccgcgcgggttcgccgtcaagttctacacccgggagggcaactgggacctggtgggcaacaacttccccgtcttcttcatccgcgacggcatgaagttcccggacatggtgcactcgctcaaaccaaaccccaagacgcacatccaggagaactggcgcatcctcgacttcttctcccaccacccggagagcctccacatgttcaccttcctcttcgacgacgtcggcatccccgccgactaccgccacatggacggctccggggtgcacacctacacgctcatcaaccgcgccggcaaggccacctacgtcaagttccactggcgccccacctgcggcgtcaggtcgctgctggacgacgaggccgtcgccgtcggcggcgccaaccacagccacgccaccaaggacctcaccgacgccatcgcggcggggaacttcccggagtggacgctctacatccagaccatggaccctgagcacgaggaccgcttcgacttcgacccgctggacgtgaccaagacgtggcccgaggacgtgttcccgctgcagcccgtggggcggatggtgctcaaccgcaacatcgacaacttcttcgccgagaacgagcagctggcattctgcccgggactcatcgtccctgggatctactactccgacgacaagctgctgcagaccaggatcttctcctactccgacacgcagcgccaccgcctgggaccaaactacctgctactcccggccaacgcgcccaagtgcgcacaccacaacaaccattacgacggcttcatgaacttcatgcaccgcgacgaggaggtggactacttcccctccaggtacgaccctgccaagaacgcgccgaggtacccaatcccggccgtccacatcaccggccgccgagacaaggtacccaatcctcagtgatcatcatttcatttttactctaatgtagaatgtagtaatgtctactcgatccatcactgactgagtctgaatgatcgatcacctgttggtttgttggtgcagactgtgattgccaaggagaacaacttcaagcagcctggggagaggtaccgcgcaatggacccagccaggtatggcattccattcatcaaatgctctcttactgatcactgaactgcatgtttgcttactgagctgaaccggactgtgctcatcatatctgcaggcaagagcgattcatcaagagatgggtcgatgcactctctgacccccgactcacccatgagatcaggagcatctggctctccaactggtctcaggtaatgtaactgcagcttattcagacaatgagttgcttgctgaactgaatgagttttctgaatcgctggttgcctgatcaatggatgcaggccgacagatctctgggccagaagcttgcgagccgcctcagcgccaagccgagcatgtaagatcagaaaacagcgcaggggactgaactctgcttcgctcatggaagaaaggaagacagcctgaaaaagaatccctcttattgatcggcaacacccaacctgatgctccagtcattcttgcatgcatactgagtctcttctttgtataagaggacataacatatggttctgtctcatttctgtaccaatcaatcatcatcatgtaataatctgtacttgcagacgtgtctccacctgatactacactggattattgtaagtgcacctgcttgttgaattcaggacacatcatacaataaattatgacatgtctttgttaggattcttctttgttatatccgtagcataggatcgtgacatacaatcgctggcgggagcatagcaagctgaaataactccttaaagagcatgcagaaaaaggaaatcattctacagacagttggtagcaagccagccttcgcatggtctaagtcctcaccgccagaagctgtgctggggcccggcgatgagtgtttgtgatccaaaattaacttactctgttccttaccgatgctccagattgtgtacatgatgactgcgcggccggccgtcttatttacgctgatcaccggagccaaagtagcatagcatcatagcaatctctgaaagtttgatgatgcaggatcgacggcacctgcactgcattttgcgtccgaactcttgactgcctctcagaccggcctctctaccgacgatcaggatgagggcatgtcttaggccgcttgggctcatgtttttcaatccaataatttacaaccaatttaccttaggccctatttgaattcttag

SEQ ID NO: 4031 - DNA, 6322 bp, Sorghum bicolor
taatggacaattcctttctcattttccctttaaagtagtctgaagtattggggctgaacatgatggaagatttgtccttattaattacctggcccgaagctctttcataaatttcaagaatatgctttagttcatgtgcatcttcttttctggccctcattagcatgagtgaatcgtctgcaaagaaaagatggttcaccctaggcgcccctctgcaaattttaattccctctatttttccagcattttcagcgctttgaagcatggctgacaggccttccgcacacaaaatgaatagatatggcgatagggggtcaccctgccttgaacctctttttggcactatttgatcagtatattcaccattaacattaatgcggtaggataccgtagtgacacatttcatgattagatgaatccatttatcatgaaaccccaattttcgcatcatgccctgcaagaaagtccattctaccctgtcatatgccttactcatatccaatttaatagcagccactccattttttcctttccttcttgatctgaggtaatgggttagttcgtaggataacaacacattatctgtaatcaaccgacccgggacaaaagcactttgggagggagatataatctcaggtaagaagttcttaagcctatttgcaagcacttttgaaacaatcttatatagcacagtgcataagctgatgggtctgaggtctttaagcttggttgggtttctaaccttcggaataaggacaattatagtatcattccatccatttggcatgtcaccaccattcagaacattatgcacttcttgcttcacctggtccccaaccacatgccagaactttttataaaaaatagcagggtagccatcagctcctggggcctttaaatctccaatattgtccaatgctgtccatatttcctcatcagtaaatggcttcaagagtgcttcattcatttcttgggttacacattcctggacacactcaagtattttggtaatacattcacatgaatcagcacctgcagaagacagaaaaagttgctggtagtggttagctataaatcttctcaagtgcgggccctgtactgttccaccaccttcatcctccaatttcctcacaaactttctccttctcttttctgaagctttagcatgaaaaaatttagtattccggtcaccctttgttagccaagctatatgtgctctttgcttccagtagacatgaagttggtcctgtaagcgttctaacttataccgcattaaatgttcccggtttacttgttcttgtgaaatgctcattctcctacatttttccaagtcatttctcaccttcttaattcgtttctctaattcccccaaaacatttttgtcccattcccataagtcatacaacaccatactttgtaaatccatcatgcaagcacccccattctctacagctgctggccatgcttcttgtacccgagcactacattcttcctcctcgagccatttagcctcaaacttccttattatttcccgtggcttccctcactcattgagacccctatccccaacctctattattattgggcgatggtctgaatggcgttgttcaccatggatcacaacacaagggaatggcacctacccatccgaattccgatctccgggcaactgacgtcctaacgggccgtggtgcaaaattgccactccagcgcttaccatgctgggcctaatcaaccttcagtagaataccacaggttgggccatatacctggccttgcagcccacacctgactcgagccaatcccaccgcggccgcactgccgagtgccgacggccggccggccaccagggcgcgccgctcgcgccatcagaagatttcggcggataataaataaatttgggccgcgcggggcgggagaaggggagaaaccgcggaacctcaccccgagtcgaaaccccagggcgccaagcttcccgcgcaccaccgccgccgccgccgatgccggtgccgaagccgatggagaggaagcaagccgcctacagcaacctcgtaaggacccgcttcttccaccctcgtggtctcctccattcccttgtcgatcaactatggtctcagctgagcggtcgcattgggggctgcaggatgagaggtacgcgatccagggggagaagtaccaggggcagcagtacagccacatctacttcacgcgccttcaccacatgcggaatctgctccacgccctcgtcccctcctggaagccgcaactccctggtccgccccccaatttcccctctcccccctctcgcggttcctcatttcaatcgttcgtgataaacagcaacattgtattatagggtaaataaactagggcttctgtgctgatctgtggcttgctggtcccgcgaggttttggtcttagtcactttctggaggctttggattcgcaattggttcataataactggagttggggtgcaaaaactaaggcaatgtgaacccggattagggttttagagaagcgtgacgttttaaataggggcttgatctgctctgctctgccaggtgttttggcctatgtttggttatagagaattttgtcaggtagatgctttgcccttgagctggtaaatttaacaattaaatgtttcactaacattagctggtgagcatgaataccaatcttaaaaaaaggtgccttggtgctgcctatagtttttacggtttgattaaatcttgtcttaaacaacaagtttttattggagagagtataaatgatagcaaaagttttcagaaacaaaaatactcataccattttcagatatctgtacctaaggaaaagtggattcttccatctgtcatattttacttcatacaagcatatgcatatttgttagtcttaataaaaggtaatatacaaccaaagtttgaaatggttggcctaaaaaactccaaatggtcactcatttgtgactgtggggagtaggactgctattgtgtaccttggaaagatgttttggtggtacagttatattttcccatggaagtggttcatataacaggtttttgcctatgcacggatagagttcaagcacactttttttttcctacattgcagtcactacagtgttaggactcgaagaaggaaaggattgcataattgttggaactttatataagcacatgaagttgaagccttccattcttgatgaatatgccaaagaggtgaaatgttctgaagttagttttatgttcctacaactatgggggttgtccctgataacaaatgaagtatctgcatcaacctttcccccttttttgccagaggtctgcaattcctcttgtcaaaccgcataatttcatgcatcctgatgatcatctcattctcgaagatgaaagtggaagggttacacttgcaggagccattcctccagcagcatttgtgactggtaagtctgtcacttccacaaaataaaaataatgcaatcggacttctttctctattgatgtataatttctgtttttactcatagacaatcctggtgcctctgccctcatattttttttcctgaaaatcatgctcaatcatcaatcattttcaggggttgtagtggctctccatgggaaggaaacaagtgctggcaactttcttgttgaagatgttcttgaggctggtcttcctccccaaactgcattgtctagcgcaggtaatattctccatatagccatgtgttcatatttcaacatttctcccaatttttttgtgatgatcgaattgctctgacactgcatttcctttggttacagcagaagacaagtatgtggtattcgtatctgggctaagtgtaggaagtgacacattcaatcctctacaattccaactccttattgaccatgtcacagggcatctgggtgatgagaatgtatgctagttgtctttgtaaagtgtaaactattgtactaaatatattctaattttttttttgaagacttcaccggaggggtgagtgccccacctgaaaaatatattctaatatggataatctttgttcgaaatccctcaggagcaatccatagcatcaaatatagtacgtgttgtggttgctgggaattcagtgcatatttcaccaaggtttgtcaacggtcaggtaatggcattcagtttcacatgttttctgtggtacatattgtgatgcttcaatatgtcatactaacgattagttttaatatgtcagacggtagcatcaaaagatcaatccaggatagcagagcctatcaaggaattggatataatgcttacccaggttaaaaatattgcttttcttccatcaaatttagtcattgcaatggttgtgctctgacattgacctttgtgtaatccatgctatcttcagctcgtggcatcgttgcctgtagatatgatgccggggtgtcatgatccggcaaatttttctttgcctcagcaggtgggcaattgacgtggatacatacttttgatttgtacttgtagcactcaagtgtgttttgtgcatgcatggttaactcacttcttgtttaactgcagcctctgcacagatgccttttctctggggcatccacgtacaacactttctcgtcatgttcaaatccccatcaatttgagcttgacagtgtccagtgagtgtcaatctctcatttgactaacctcaatatttaagcaacttggaggttttcatgcaagaaagttctttatgtaggtttcttggaacatctggccagaacatagatgacctgtacaagtactctgatgctaaagacaagctggaattcatggaaagaacactgagatggcgccatcttgctcctactgctccaaatagtctaggtaactctttgtttccagctcaaattatcataacccatttatttgtatgtgaatccgtacatgatttggtgattgatcttttcttggtagttgtattgtaagtataatccaaagatagaaaacacttatttggtaattctattcaggctgttatccatacacagacaaggatcctttccttgttgaaagttgcccgcacgtctactttgttgggaatcaagataaatatgaaactcgattgttggaaggtagtacttcatgtaaagcttcataatatcggttgaacatccaacttaccctcctttgttatccagggccagaaaaacagaaagtgaggctaatctccatcccaaggttctctgagagtggagttgctgttatggtatgttcttatatgattgagtaccagtagatccacttttattatcttggtaatcagagacagagaagagaagaattcttgattcaggcatttgttaattttacgatagcgacataataaaaattcaaagctaaaaacatgtcccacttgcttctacagaacattagacactagacagtgtacatttgctttatttgatatttttctcagcactgattctcgttggatataataagatcagttggtaacaaaaatatctctttatgctaatgcagctcaatctgaggaacttggaatgcagcacattgagtttctctacaagctttgatgcctgaatatgctctgatgtttggaagtgcaaaagatttcatgaacccatagggggttcatggaaggatgtatttgtattagaacagccagaacagttctttattagatgtatgatgatgaccttaggttttgccaattagatctgttggaatgcagttgttgtaagttgtaaccacaactgaaactgaggccatgtgtagtgtgtaacaatcaaattggtggtcatgcctcgtttaacaatcacaatcagctaacacgtttgtcagatgtgcttttatcaccatttatgtgcgtctgtaatggatacgcgggccaaatatttggagtaaaaacatcaacataagtacgttcaccaggtggtagttgattgagcgatcaaacaatgcatagctttaaggttgtgtcgagtttgggaagcttagcaccaaacgtcctaattactgcaaaatcggttaactcttttgtaccaaatgggcataattaccaattatcaagtttagtacgtgaaaaaaattaaatgaagcatttggcagatcgaaatttgacatcaacaccatgttcctaaaaacagcactgtagtatctcctgaactgggggacgggggaaatcagatcactcaggtaccgcacatctttcagtggatagaggccaccacagtccacagcaaactgacaaaaaccaactgcagcaacagatccatttccgtggccagtgctctcctgtctcctccatccctccgcctcttcg

SEQ ID NO: 4032 - DNA, 5618 bp, Sorghum bicolor
ttaatttaaagtagaaaaattttagttaacattagatcttggaaactggtggcataagatttgtaaatgctcactccattctaatttataggttgttttttatatgtatctagacacagcgcaaaactagatgcatagcaaaggttacctacttaagaaaaatcaaaacgacttataatttggaaggaggagtcttagtcatgtgatgttggaagctggaagtaatctagttagttagtcattggtcattgtcataagtttcatctttcttttatttgtagtcattggtcattgtcataagttttatgtttcttttatttgaaccagatgttagtttttgttgtttgccgaagattctctttgccagcctgttttacagttacacatcatttgcagtagcttacatatactagaaaagttacatatcgtttgttagtagctcatactagaaaaggaactgacgagcatagtaatttgtagctgcaactattatttagatgtgtatcagtaggtcctattggaacaagaaacatgacttttttgttttcaattttacatctcacaaaatgtcaaaacattttattttgttcttcctgtcccattgccaaaatcgaagagatttttttgatgaaaacaataaatcaaagtcatttatagaataggcgatttcaaaataatgatgaaattagtttaaaaaacggtaataaaatataagtcctttgagatataatgcaaccaatcttgaaagcaaatatttttgttgaacaactaaagagcaactattattgctgccttgggacataaagccttggttgggtcctacaatttacccatcttttcctgagaagatatatttagaaattagaaagagaaaacattattatcaaacatataatctttagttaccattaatggatatttgagctttagtaaataccacagttttatttagagagtgctactttaatgattttcaccaattgttttgcttatcagtttagtataaccatacccaagtctatttattaaaaccatggtcgcattttagaaatgtataaatgttttagtgcctaatagtaaacaatgtaacaggttctttaatttggttttccatgttgattgtgagctcctttgtcttagaagaatgcatatgcttcactcttttggcaccctcataattatttttcacaggtcatcgtcagtcctgcttatactcaacagctagttcaataattcaactttcagtctatgccataagattattgttttcctgcagtcctgcttgttttgctccccgtggacgtgggtagtttagaaaaatttgtgtgcaaaatacatggaaaatttaattttgttggaatctacatgagtagatctacacaatgaatatataatatgatattgttttaattcaactttttgttgttgtagttttaaaactatgattttctcaaattatagtgaaatttttatgatgagctaattattgcatgtttgaatgtagtaaaaattttatactcattggattatgtataacttagttatagatttataaatatttttaacaagcatacacctaaataaattatgatttttcaaagattcagccaaaataaataaaaagaaaaagacaaaactgactttgaaaaccgcttataaccaaacagtgaggtaaaataaatggttttaaaggtttagagaggtaatttatccgattttagaatttagagtggaaaaatagactttcttaaaagttaagagaggtgacgtggaattatcatgtccttgatgaatctagtttcggcccagacaccacgacccaggcccgggaaacactgggccaaatcgagacccaactctctcctggagacaggagggctgcattcgcggcccaacaaccacgtcgtaggagcccacttttttgtggctcgaaatttgtaaccatcactctttttccccgaaaccaaaacgaaaaaaaaaagaaagtgctgctggctgctgccaaccacccgtggtcccatgaagagagcatcgccggagtcggggacggtgcgccgagaaggaacaaaagaagacggcggcggggcggagatggggagccccctgggcgggtggccgtcgtacaacccgcacaacttcagccagctcgtccctgccgacccctccgcgcagccctcggtcggtcagcaacttgcccttcctggcgatctggcctctagtatcatgctgtaatgctaggctccgtacttcctgacgagcttagataagctcgaatatgtttaattgaccgggttcatctgcgcttggcctgtttcttttctctggtttcaggtgccgtcgagaaaaaaaaatctctcttttttttaatcccgtagtatcactttcgggcaggagacagtaatcggtgccggtattgttagttttggctgaaattttggtatggatggctggagaaatggggtctcactgtttgattttagttcagctgccaaagacctgttcaatttgaggggactgtctggccaatttctgaacatctggtctggttttctcatggtcatgtctaccctgggtagattcagttgatgtggtactgatgggctaatggtagttcagttcatggttgctaatgctaccggttgattttctacaacgtcagaaattcgtgctgtcaacttatattatgaattatatatgtccatttcacctggtgctaatgttagttcttttttctttccatgcgtgtttgtcatcagaatgtcacaccagccacttatgttgcgacccacaggacagacccgccacccaatcaaggtaacccctttccatgtccttaagccaatggtattctgctgcatgtaattgatgccgtacaattgcttattcgcaataagccaacaagccccttttttttgtttattgtagtgctttgtatgttaattgcaaaataggtttcatgagctgtttcgtctgaactgacattcttcaggtagatgactctctttgcttcaatggagcatgattagccataagctcctgtgcatgtgtagaatgtgtctgcaagtcacagatggtggtatcagccacagtgaacagaagctctgaacgccttaatccttatcctacacaaacgacgccctctgtagctttgctgtgtttacctgaacccaggtgctctgaacctcgatcttgttgctggtaatctgaactcagaatagtagatatggtagataattagcagtcgctgtcttagccatatactccaatacaatacaatacattaccttccttgctggctaatttaccagttgcaagtactaacagtaccaggctaccagctttgattatgcgatttcatataattttctttctctgttgcaaaatcttatagcaattctagcgttaagccttaaaaaaacacaactgggaaacattgcctgttgtattttggaaattttagattcttaaggctagctttcttattttactgaaagtctgaaacacactgacaactatcaacaaattaatattgattcatctagtcacagcaaatggtaaatttgtttttgacggtaattcagactactgcatagttagtgttcacctcgaatacagtagtccagcagagttgagatttataccatagctgatcatcgctctagatatctcaacatttggcatgctaatggccttctgtggcttatactattctatgcctgagttggtttgcctttgttccatcgtgtaggttgcttgggagatttacactgtttttccttcaaatattttcttagagcatgagaaagcggaagaaaagtttgagttaattggtgctttatggatcagggatgttggtgttcaaaatgaacccatagactagttaaatgcatccatcataatataccttaagagtggagtctctaagacttcagtaaagttggagccttccatttgaaaatgcaatccacagagttctagaactgggatgaccttgagagaagttaggttaatttactactaaatggtagcctaatggtcacattgactaggaatttggcttgaacactctggttgtcaatttgtataacaatatgtcgctctttgttgtggtcattctctggtcctgaacaatttaccaggttaggcgaatccacaagaggtccttattgaattcgtgcctttttggcacagctgattccacatcctgtcggtgaaaatataattatgtgctgtctaccagctgcataaaaggtcccaaaaggaacaagctatgattgtgccttcatctgggggctaatgacatatttttcggagatgttatttgtgaacaatcgaacaatccataacattttaaaggatacttaatcctgaactattgccagcacttcaaccacagacttctggtgaattgcagtgataacaggctaacagcagagatatcccaatttgtggcagataaattactaacaaatcatgggcattctttaactacatgcctgacaattctctccttttagtttccttttacttatcatactgctgcattattttatatatatgtccatagttcacactaatttaggctcaataactgcttcctaccatatcagtgtatttactttcaattcttgtggggacactgatatgttcccgctaaaattgtcacaaaccccccaattcctttctcaactttgctgcatgaaaaccaaccttgttatatttttacctcttactgcggactgaatcgcaccctggaattgcagtgataacaacggaggccaggaacatcctgctgaggcacttctaccagaaatctgaggagaaggtgagctgctactgctagtaagacttcaccatcaaggctacataaaaccacatcactatagaatctaagcttgaaatcctatcctgaactgtagctgaggccaaagagagctgctccggacaacctcgctccggagaacaacaacaagcagcccaggggacctgtgggcgacgtcgggggccagtcaagcgcaagaggctgaagccacacagctggtgctggtgcccgtcctcccctgcctctcatctctcggtgtcatgcagatgcagcctgcatctctcgctcacatgtcacagctggtggttgtttctcccctgtgcgtcctcttcgcctctcacgtatgtacgtatgacccaaagagctgaggtatacatacctggatggttggatggatgtacataaccacctgagacgagacaaagctcggtgcgtgccatttcacatggcactaggtgtgctgcagcctctccttttcatcctctacaatgcaaaaatatggatgtgcccatgctgctatgctagctagccctactccccctgtgctttggatcgtgcaccgcgtcagcagctttttgaaaggctggtggtgatgattgcactctgaaaatccccgtcttctgctgtcagattatactatacgctgctgccgtgcagctgctgctgcgccagccaggggcagccatggcatggaccgtggtcacgcgcgtcgccttttgtttccctttcttatccgtctcttcctcctattcgttcgccggagggacgagccgccgccgccgtccggcccgtgctg

SEQ ID NO: 4033 - DNA, 5926 bp, Sorghum bicolor
tttatcaaatacaaacgaaatagctacggtgtcgattttacaaaatattttggaactaaacaagaccttcggaaaaaaagcaaggagagattttgaaatttgcactcggcagtctgcactctgcagcagcaggaagaggcgaccggatgcacgctagcaaacttggcgctgtgctaccacactaactttacataagtgtagcaaactacaaaagtatggctagtaaattagttgccacactttaccatgtctaaaggaatcttgacacactttttaattctatgacatgtggagcccaaaagaatcatgtctaagctttgttgtaaactaaatatttgccaatttggttaaacttgcttaagttaaagtttagcaaattgtggctagcaaccaagccgaggtgtgctgtgtttatagatttcagatcgtctgcttctgcagctgcgtgcagaccgcggcgcacgtaattctcttgcttgctgcagtggcaaaggtgaacggctcgagatggatggaaatggttgctgcgcacgtaattctcttctcttccctacctacgtcgagacgatggagcagatgcaattacaccaaggataaacctgccaaaattgctggtagcactgccaaaaattacgaaatgcgcctctcttttttttttactctttctgatctggtggaaggattatgattgtcttcttcacaaaacaaagaaaaatctgaagctaaaatactgaaaaaccggagcaggttcatccataacggtcaaaagtgcaagatatgcaaattctttttcccggccccccctgattatgtgcacgagagaagaggaagtgaacgtttgcgcccatccaaagacgcagcaacagaggaataattcttttgtctcacgaaacagtggcggaaggatcccaatccccaatccaatccaagtatccaaccaaacctctcccccagcacctgcaaggctgcaatcgctagcgcacaagctcctgccgctaatcgcattattttaattattaattaataaatcccaccgccactactaatcgcactaccactactacaagactacccggtaaatgcaaagatcgcaagtccacggcccgccggccccccaatccccaccctccacttctgtcgcctcggcggccggtatcttccagtcctcctccgcttcgtcgtccagcctcccgctccaccggggcctcgccattgatggagtacgagcgcatccatgagccgctcccgcgtcgtcaggtgcccgcctcgccgcgatccccgcctcgattcgctctccgggtgctccgtttctggatcttgtcttgcttttgcttgggtgctcccctcctcctcctcctcctgatgtgcttgctcgtcttgggggttcgatttgtttttactttcgcgacgtcttgctcgtcttgggttcgtcgtgttcttggacgaaaggtttgaggctttccgtagtgtgtgtgtgtgtgctgttcgcgaggtgactttttaatgatgaggttctcggcctcggaagagaggcgcgcctgtcgtcgctgaactcgatgagcggttcattttggttggacaggttcacaggttgattccttgcagggttttttttttctttcttccccatccttctattctatcgaattcgcctgaagctttggtacttgtgcggctaattcgacgcgcatttcgccgaaaagctgcagctttctcatgcatctgatgttactcggcactgttcttgtaaattttgtggcgctttctgtgccgtagctttcaatcgctggcgggtttaaggatgggattgggatgggtcgggtatttcagtgcacatttcactataaagctgggatcttcttgtcccttccgtcgttgtttcagctttcttcagttccaattcagtagtttgtcggttcaattcgccttctgtgcaccatttcgattcttcctccgctacatttcaccctttctctcgcggcgtcgctgaaccgtttcttctttcaccctgctctgccacagtccggcggattctctccagctaagctacgagcaatgcttcgcgggctagagaagcaccagcgcaacaacggcgaggacacgtcgccggaggccaacgactccggcgagcttgacgaccggagtaagtccactcctgaccaaccatcaagctgttcatatatgattccaccttttaccatttgctgagcacgagttttctgatacgtactgaatactctgaatgcgtcgacagggagcttggaatgctccacctccaccgagatgtcgagcaacagcggccacaggtcaagaaaccgagccccggacgacgacagcttcgactcggagagcagctcatcggggccgccgacggtcaagaggtcgaccgcggtcgccgcgttactgccgcccttctctcggccaaccccgtccaagtgggacgacgccgagaagtggatttccagcccgacgtcaaaccgtactggccgtgcggggcctaccgccggaactgtgccaaagaagtctgcattggcattccctgaacatggaggccgtccaccagccgttgctaaggtggtcacggatgtgcctaccaacactggaccattggttaagaattcagatggtaagcatgaactttgccatgccatcgattttttattgtttcagcacatatagagtagcgcaatactacaaacatataatgcagtgataaatattgtacttgcgaggtcatattttttattaatgccattggatttcagtttcagcctgtttgtgtgtctgaactttggagtcctaactataatttggttatattttataatgaagtttgatgaattaagaattaaggattatctagaacatttggttgcaagtttgaagtgttggagcggggtgaattggggacaggtaaagtgtagcatcatgagttgtccgtgcagagaagtctgcctttgatgtttagctgttcttttcatcatggcagtttctcagacccttaaaaagtaacatgtatttcatttaacacaccttaaatttataataaatacataaatgtgtcagtctaatatagctaaatctgcccaccaactaaatgctttacttatatattttcttttggaaaataactagcaggataaatgcacattcagatcaggacatatttcaggcatactgtgtcattatcttattatatgttagctgcttgcacttagaacctcacagatatttttagaataaattatcatcagtgtgtttctattttcaggtcttgccgatcctgatttacttaaacctgcacacaatgcttcaatagttgacgaaccagcacctgcagttaggtctgtctctatgagagacatgggaacagaaatgactccaattgccagccaggagccttcccggaccgcgactcctataattgcatctagtccaacttcttctcggacaccaactccacaacgcaccacagaactcagtgtgagtaatatagattctaacaaaatggagatgtctgaagaggagctacaaataagtacaagacaggaaattatggatcttggcgaaaggttaggcaagacaactatagctgcatgggcaagcaaggaagagaaaactgccgcacattccacgagtactacagcctataaggctgtcgatatcaacagggagaatcgagcggcagattggcaggaggcagagaaggcaaagtatcttgcaaggtatatctgaccctagtttagttgtaatgtcatcatctgttcagcttgagaattacatttaaaaacacataaagaaggttaatgctttccattgtaataatatacaggaactagttttaggatcatcaatggtatagaactgcagaacatatggaagctaggcgaaactggaggttgcagatttattgtttctctgatcttcaacattatgcaggtttcagatggaggaagcaaagatccaagcttgggaaaatctccagaaagcgaaaattgaagctgaaatgaaaaggatagaggtaaaacctccattctctgctactcatctcatgatatagtgccatagatacatacttttcatttgaagcctgtatgtatgcaattttctattttaagtaattactgaatcaaaagaaagcaccatcactccaagcaacatctggactatcctgcgataggattaaactaggaatatgaagtgttccctccattttctttttataatgcctattaggactttaaaatgtctttgaaagcatacatttggccatcgatttctcttacaatgtttttcgaaagggccaatttctcttacagtgtatcatcagttgctgcaaagtcaatattgtaataaaataaatgtgcgatgcaaatctattgatacaacttttacatactaagcatgcatacaattcaactaattgttagccaaattgtaggaagtttgacagttttaaatcataaaacgtcctataaaaatgaaaccgtgggagtacctcaaatctaagttcagtaatttgatattgtttaccattcttgagttagtatccataacattctttttctgctgcctagtgcgcactggtctggatgtctgaatcattacacttccgcgatccaatgttttctgttggtcatagacatgtaactcttttagtttgcctggcttttggttgcaaattcctcagtgttggtttcggattgcctctcgcagtccaggacaacactgatgctgccaatgtgctatactaactggtacttttatccttcctcttaatgaaacatgtgtcaaagcacatttgcggagaaaagaaaagctcatgaattcgatgtatatgtattcggagagaactgaagctcagattgcagaatctgacagaagctccctctcctctgattgcaggctaagatagagcgaaaacgggcgcgcgagcaggacaggctcgcgagcaagctggccgcagtaagccaccgagcggaggcgaagagggaggccgcggaggtgaggaggaaccaggaagccgcgagaacggaggagcaggcagcccagatccgagaaaccgggcatacgccttcctccttctcctgctggtgctggtgcctgtgattctcattccttctctgaatcgccagctctagtcacccgccttgtaacatagcatgatccgtgtaatctttgggcgtggtagaaaaattgctcactgtacgactcatagtgtagtgccctgatctcacggtatctcgtcttctcaggaaggaatgcagcagtgttttcacttttcagttttcaccacgaggtaattgtaggccatagccgctggccctctgcacatgccaccggaaaaaaaaataaaatcgttggagagagttgtcatggacaagcatgaacacctatcgcgaattcacgaaatgcaagcatcaggattgcatgaatttaggagcaccgggattgtggcatgaatttcagagcaccaccaccaaatgcttacgacagtggttcacggctgccaccaaaactgctcccaaccccatggatatttcttttatccaaaaatgccactcctaaacggcgtccgatcaaacttgtgcggctgggatgatgccagttcttggggcatcgcggccaatatgggctgttgggccgactgggccgcgattcgcgttctcaaggtagatagggcccgtgagaataattggaggtgggctcggatcgtcagatcggcccagtaacaattggatcgcaagcaaaccccaacgggtcctgtcgtttctcctcccccccaccaccaccacgatcagggaggaaagtttcccgttctattgtatcgtcgtcgtctctcacgcggtctcgtctcaatccatgcatggggtgcagactggaaccacctgtccgcctccgcccgcacctctcgcctcccgcggct

SEQ ID NO: 4034 - DNA, 5164 bp, Sorghum bicolor
atttcaaataaaaatacgaagtcgatgtgccaaaattctaaaagtataattatatctattaaatatctaacggtactctatttatagttatttgaatcattgttccttttctagtgttttacttgtttactgcttgtaatcatgaaaatgtatttattttgaacaatcattttatactttactttatgttgaccgcacaattagttgtttgcatgatgtctgagacccacctcgtttggaacacattacctgttcaagcaattaaaaaaagtacaagcgctagctatggcgcttaaataagatctttatgtggtggagcatgcctacaaagttcgtgttatcttcgagatcttccatatactcggtatttgttggatccttttggttgctcccttgtctactataccataaaaaatgagaggtaaagtaaataacaagcaagataagaagaaaacattagaaaagggaacaaataattgtctgatagagcacgtttgtggggaaacaatgatactactttcgattttttttctaattgaaaatgaattatttaccagtttttttatattttttaaggcaataaaggagaacctttgaaaccatctatatgactaaactaatttggccaatttttttggtacaatttgtttggttttcatagtttagctgtcaaagatatattgtttctaagttcagttaccaaaaccatacttagtaatagttcaaaaaatgacctttttattttattgtattttatctcttattattgccccatgaacgttgctgcttttgttctgttcctgatctagccatgtagagatctagaatttccaagaataatttcagatctaattgcctggatttaaaatgccgaagagtaaataagaaagaaatgagaagaatttgaatggttctagcttctaaccagagaaacgattcttaccgtttctgagataaatgtttctggctgccaaacacgcccttacgcttccatatatagcatcaattgaaacttggatattattgttgcattgcatccaataccattttcaagtttctgaccgttatatacactactgtcatagagccatggcctccaccatcaagtcatcaagtggccttaggggactcccaatgacatatagtttctatatctattaatatctatatatatactacatataaaaatcatggtcccaataaataatgtctacataatttttttatccaatcatattcatttttttcttaattctcaaccaatcatatcacttcatgttttggttctcgtgtaagcatggtttctaactcagacctgatttctatgatttttgttctctctcttcaataactaacttgtcacatcaacaaaacacttaagtgacagtacaattaatgtccatagaaattataacgatttctgcattaggagtgtccttattgttacctttcacctttcactccaaatcaagaagtcaatgttatgctttggagactgtatcactgttcaaaacgattttattttttgtagtacggagagtatttgctttccctcgaatcaagtgtttcttaagtttatggtcaaagaaaaagagagaaagaaagataaccacacaccttacaaaagtttatcttaattcactccaacacaaatgaattaatctgaatacaaacaagccattagcatcatacatttacattatctttctttttttcttgaggtgtgcattatccaggaatgggaggagcgagcaaggtcaaaagctagaggctgaaagccgcaagccatgcaccgcaatgcgcgccagcacgcagcacatgcattgcctcgccagttcatgaatccagtcgattcgcagtcacaggaatcctaccaattccgcgccgtgacaagaagagcttcccaaggtctttgtcacggccgagtgcatgcttcacgggctctttttcatatcactcactccctttcctttcccttcccttcccttcccatcaggggccaaagccatcacagttcttcacgagctgggaagagctcgtgagccgcgcattggcggcgatgaccgctgctcgtagccgccgctgcctgcaggcggcggtgctgctctgggcggcgctctcgccgtgggcgctcgctttagcggccgcagccgtgccggcaaagctcaaggccgcgccagcgcctgtggcgaccgggccgatgtccaaggtggaggacgccaccatgtttcggatatactacggccagagcttcaaggtcatcaagaactccggcgacggcaagagctaccttctcatgcaggtaagtaaagctacgtctcgttcggagactgagctgcattgcagcgccaccggattcttcggctcattcttcgccagccaatttcctgagaaggaagtgctcaccgtacctgcagaacacgtccaagatggcatccaagacgaggtattgcacgggaaggatcaagtcgttcgtcatcccccttgccaacttctccatcgacaccacgacttctccaggtacttgctcaccgtctgctgctctgaactttttaccttaacaatggaaaatggtgcaactccttcctccaaacacgaccttgaacacacatgctgcaaaaatggaaaacgtacagctagaacataccaagatgtagtaagttatacaaacttccaaataaacttagcaataacatttctgaacttttcacatccgaacccattcacttgtcattatcagttcgtcagcgcaaggtaaaatatacttatcagtacaagagaatctttcctcaatgaaatagataattcatgaccactccattttgttgccaagtgcccaagtacttttgaccctttttttttctcgtatgtacatacatccataactgatcggagtaatattgtttccacctttgtctgcagtgtcattctttgaggtgagcaatgcaggacacaaactgaaactctgcagcatagtccaatgggcaatggttcctcctcctgcaagggaaaaaaaactcagacacatatctgaactattccattccacatctactccgaacttaaggctaagaaaattgtagttagctgtcactaataactagtatagtagcatgcatacacaatgaaacaatagcagcagaagaaacagaaaagccaagagaaactagcagacgtgaatgctttaagcttataaattattattgacctcataagtacatttgacatatatgcagctgcttggagtgatagaaagcttgaaaggaataacatcaaaccaagttgcttctcagtgtgtgctccaatcatatacaagtggaaatgcccagcttgtgaatagaactgatgcacagacactctcgcagtttactgcacatttcataagcgatacagatgaagatagaggttgcaacttcgcagcatatgtacccttagaagaagatgcaccattgcaggtaaagcaataaaaggaacctgagttcaatctggaacttgtctagttatgtacaacctaaaacttatatactatctattcaatggttctctccagagggctgagtggatcaagtacttgggaactttcacaaactctgaaggcagggctaatactgtctatgatgcagttaagaccactaaatgtatctttatttgaattgatatatgaataagtaataaagtatggcattggacagtgccataaaaccacacttagcaaactatttgtctcatttctctagtacgtcattgcagataaagacaaactacctgtgcttaagcaaagcagctgcaaaccttagcacaaggttcaagcctatagtagcgtggattgaattcacacaggtatgcaactgcaaaccagtaaaattgtaactttctcatccaaagcaactttttaaagcgttctccatctactgttgtagggaatgtggacatttgttaaagaaagttacaccttacaggtaaggtccttaaagagtagtactcaaataaacaaaaaacaagtggaccactgatgttcatgtttggattcatgaacagtatgtcacagatgcaggagcagaaactgttgatgcaactattacaaataagagatttaatagttcagacccagaggatatggacaacttccatgctattctttgtgtgagtatcaaccattcagaatctaatattacaaccctgtaatgctaatagttgacgagctcactgttgcatgttgtgtacaaaagacacattttcttttggtcagaaaagggattaatcctgacacaattaacatttataacttgactggttgcatcaaataaaaatttcctgcaaaacatcaaatgctctattacttgacacatttttcagtgactccgcactcagtaacagagttaactaagcttggttcacgaatattccagacagtggacgtggtcattgatcagacatatgctttggagcctgcagagtacaaactagcaacttttttggagaacattaatgttagccaagactcctgctatagttttgtatcaaaccgcagcatatggagattagacaaaaggataggagcttctgggacacttggtaatagaagcaatcctactgctaaaaatccagtatcataccttttacctatgtaatgatctaatggatttttccatctcaaagaaatggggtcatagacatttacttttttccccctttaagattggtacgacggagctatctcacagcctcagttggttcttggagacctcatagaagttttcttcccaacagggaactacacaacaatttacttcaggaatcttgcaaaggcatgagctgtgttatctttacgctaccttttcctttcacttaattaattcatgacgtctctagaacaaggttgttgatcagtggaactataattacacaggaagaaggggtcacagagattggccctgaaatgtgcgctaggagcatatccacacccatggagcctataatcctgccctgcgaatgatgaacccagatgaacatgattgagttgtcaagctactgtaccagcaaacagtgacaactagttgatggaagcatttaggttactgacaaactgatctggacagaagcatttgcaaagattaaattacacaattgtgaaagatatattgagctttctttcaatttcaaa

SEQ ID NO: 4035 - DNA, 2806 bp, Sorghum bicolor
ttagggaaactttgtgggatactaccacgattgtaagaagaatgtgcaccgattaaggatatgcgagcactattcttcaaagcactgagagtttttgattctgttcacctgtcagtcaggcagcaagcagaacgcgagcatacataggccttctttagttccaattttttttttggaaaaatgacactgtagcactttcgtttttatttaacaaacattgtccaatcatggagtaactaggcttaaaagattcgtctcgcgatttacatacaaattgtgtaattagtttttattttcatctatatttaatgctccatacatgtgtcgtaagatttgatgtgacgaagaatcttgaaaaattttgggtttttaggatgaactaaaacaaggccatacagggttttcgagcgggtgaatcaagtacacccaacagtggcatatacatccgcttgacagcttcacagcacaggacgggacctcgggcaactgcttccctcttcgcatctcttgcgcagcagcttgcagtttgtgcagtggattatgccactttcctttccacagtggatttgaggcagctgcacagtgccgtgccgtgcgtggtgaaaacggagagtcagcggcagcactagtgcagcggtatggagtggagtggaggccacccatgggcggctgcatggccatggctgcctgctgtccctgcgtggctcttgatacctcaaatcgtaacgagaaacgtgaaatgaaagaaagcacacgcaagttgaaccggcccatcacccgatcacctcaggccatggcgggtcctctcctcgtgggactgggacagcggccgggtacctcgagacaaaagcttttccttgaggagaagatgagatgagatgccgagaggacgaaatcatctcggttcagttctgttcagttcagttctggtgcagcaggagttgtgagtgtgtactgactgtcgcatcgcgtgcgtctctgaaaaataaaattaccctgcctgtgcctgccactgccacttcacctcacacgggcacgggagggggggccttgtgcccttgtcccccaaagccaaagggggggtcacggcatggggatggggatcctcagtcacagcccccccgtcgcctccccgtccccagcactgactgccactgaaaccacatcatctgctggataaaacgagacaggccgcaggccagcatcgagattgatgctgatcatttccttcacccagctgtggcactggcatgggatggagatggacccatttttcatccggcatggccagggccagggcatgccgatcatcaccttcatggtgggcaactcctgtcagtatcagccctgagcatacacacacaaacatgtttttgagcactgcactggacccatgtccctcccaactcacgcatcacttcagagtttttattttacaagctagttcaacttcatgtagataagcatgaactgacagaccaaagattctgaacttgagaggaaatggaaatggatttatacaatgcagcgcgaaaggtagtatatacaggccaaaagattaagcaatgtcaacttctttgcagacgcagctcacaccaaagatgcggaggatctaagaaaaagacatgacgatgcaggagtaaaaggccaagatctgaggcatggcccccagctttaaacagccatggccattgagtggggcaaggaggagtccccatgctcccacacccaggccggtccctggcgttaggaggaaacccatcaggaccaactgcaccatccctatccagaaaggcctgcacagaggtcccccacagccacctgaccatgtccaccaccacaaacaaagcaacgggcaatggcgtctccaacacagggaaatggaagcatcagctatgcacagttccaccataaaggcaggccatgatatgaatgatggtgatggcatgtgatgaacaaatgaaatgaatccaatatgtgcactcccctccaactaatttttcctatccaacagtgaactctactacctccccgctcgccttgtcgaccatcttggatcaggcaaggggaactcaaacgggcaaaaaaattatgttcatccatccaactatatatatttacggaggaccgccccaaagggagcccgaaacagagaaaaggaacaacatcaaggcattgcaattgcagccagacaccccaatctttgcgcaaagtttgtttggtctgtgatgggatccatcttccccgggccgtcccaacaatgtgccgcccgatgctgtcgatatcttgcaggaccacaggactaaatacaacttctggtccacaagcaatacagctcaagcacacagccatgtgactctttgtactgtaatcataatctggacgggcgtcgccgtcagccaaccaagtttctggaggcataaaagtttttgcaatcgacttctcatctgccattcctgggatatccactgatcaagcaacagtgaagagatgcatcccttgtaccatgtcacacttgcataggtaaaccataattctggaatgacctgatgtttccatcccaacctgcagtgactatgacctgaccccaagcatgcgtggcggcactctggcaagaagtcttcaggaacttatactgagatttacgcaaggcagatgatgatggtgtcactgaattacatggcaactgctcctctggccatgtcgcctttccccttggtgccaactccgcaaagaatgcattactaagagtgaaattgccagatggcaattggtgcaagctatcaccttcaagtgagtcttcagc

SEQ ID NO: 4036 - DNA, 7387 bp, Sorghum bicolor
agctcgggacagggtcctggccctgtagtaaccaagaattcaacattgtgataattagggttgagcttgatgtcatcatcatcatcattctgtccaaggcataaggaaagcgtgccaggccttgtatgccttaattcgaatgctttagggttaacagtctcagaattcctaacaaggcccgagggaggctcgacctcacccttgtcacgccgagaaccttgtctgccagcagcaaaaaactgtccttgaaggagcttgtggacaagagtgcccctatatgcagctgcagtacacgtagctttgaaattggcagtagtaacggggagaagccgaccatagagaccaaagacaacacgaccaagaggctcagaatcagggcatgaggaaagctcggctcccagaggtctgtctgagcgaaagtagcttggacagacactgaagtccatgaagatgcgatctgtaatcgtggtgtcgattgtggaggtggatggcgtgtttgtgtcatctacagcaagggaggaggatgtgtggaggagaagaaatgaggcaggtagggagaagagagaccgtctaagaattttgggtgactgggtgcatttgtgggtattgtcatggtttgctctggagagacgcaaagaagcatggtggttgttggggtggtggtggagactaaggtagacagggtaaaccgtggaggatgcagctctcatgcttgaggaaggcaaagccatctgatgaaagtgaactcttcagtttttgtccttccaataaaattatggtagacaatctagttggagttgtgctaataccagtacctttcctgcaaatacaaccaaagtgagtaagatgcaaaatttcctgaactagaattctaaaagttattgtcactatgcatgattctgaaatctgaacattaaaattctgcaacttcaacttcttaaaaaatggaagtgtggaacctgccctttaataaacaaggtagggaggtgtagaatgggcagttcatcacattaactaccctatagcatctggagactacagtattctttgcacctgtatatcagattcaagcataatttgtcatcccaaagtttgccatgaaagttacaatgtatgaaatgcgacaatgacaaagtttgcgcttcgctgaattttgtctttatacatataaaaaaaaactaaaatttgtctatcgagtatcgatacactatgcacagagaatgacagaagtgggcaaaggcatctgccgtcagtaattgtttgtttttttagaaggatcagtaattgtctgctgtaaagtcacttttggcagtcaggacagaaatggaatctaaaagcttggacaacataaagttcagatctttggctcgccaagccatcacaaccctcctctttacccgggtttgggaccagctatttgcagagcataaacagcatgctccgcaatgcgagtgagtagagtagggaatgaggagctcatatttcaaaattaaacaggcctgggcactccaaattgtcagctttgccatggtttatcgcaagtctctagttatgattcgtgtgagcaaaatcgagcacttgttccaaatctaaggaggccgctgggtgtccagatcgaagaacaggaggaatgcggtgacagagacagcaaacatgggaaggagagcagcgatttacaacgagacatacctgtgttgctcctcctccttggttcctcgcagggttaggagaggagaggagattggagagagcggggagaggagaggagaggagaggagagaggagtcaggagagtgtggtggggagagaagctggcgcggcagccgtcggatctggatcagctttcgtcgccatgtccgcatctctacctggcggttagtcgaagctttatccggcaaaggcccactgaatccaagccaagccccagcagaagaaaccgttattagagtggaccatgactggagtaggccctatccatgagggtggctggacggtgtgcagcgtcgtggatatgacgccgaccacttcatctctctacttctctcttctcttctcgagccgtagctagcttagctgaaggctcaagcctcaagcttcctgcctctgcctgaattgggaactccctcctctcatcttcctcctctcctacccacaatcagaattatcccgagtcaccggtgagccctcgtcgtcgccggaacaccgacgactgggcgagtgccgccgccggcctttaatttctccaggtctttgccggccgcccttcggcaattgcacccaccagcctgcaggtatgcacgcccaccgatcgagcgccatcgtcgaaccttaatccaagctatatctcgccgttcaattacaagcgtatatgtacatgcatgaatgaccaactgaactgaccgcgtgctttgattttgtttgcaaaaattatctacataggataggctccggccggccgcctctcccggccggaatgccgatgacatgatcctcgtggccgctccagctgctcctcgtgcatctgccatcgtgttcctgttccaagtacaccgctggggctagggagcatatggtccccgttgcatgaccttggatcatgagctgttccgcggccgtctccaacggcattgcgccgcgcttcctcatctgcgcgcgcggggtgctcgctctcggttcccacagccacaggagtagtagtaggagggcgaggcgcaggcacgcagtggtcttcgcgaggacgaggcggcagcgacggcggcggcccagcgagtggcagcggccgtggtggaggaccttctttgctgactggaacgaggacgaggagagcctggccgggctcagggaggacgacgagctgctggaggcgattggggccaacccggagctgtcggagaacgaaaagttccaggagtggaggaggaaggccgaggccattgttgagctgcgcgaggcccagcaggatgccatgaacgccgaggcgcggtcgtgggaggattggaccagtggtgccgtctccggcgccggcggcgcgtcggggaatggaggtggaggtggggactggggcggggaggagagcttgttggacgagataactgatgatcctgcggagatcgtgtgggataagggcgttattgaggctttcagagataccgttgatgaggattatgaggacatgctcttcgaagatcgagtctttatgtatgcctccacaaactcggtgcgttgccttctttttttactacttctactactaccttgtttgtgttatcaatcaatactagcataataagtatactactgcccactgataatgtaatcaagacatgccactagttactactgcccactgattaagcatgcatcatattgctatactaagaactttggaactctgagctgacaataaaaagctttgtactgtacaggccaagtttctagcattgttgattgtggttccgtgggtgatagattttgcagtccatcactatgttatgatgcccttcttagacaggtaatccatctcacccattccgtatcatcccttcttgccagtgaagtactgggctctgataagtcataagggtatctccttttgctcctgtcgttacatagaaccatgtatgctaaatgcagaatatattacatggaacactacctaataacaggtatgtcgagaaggtgccacttgcagctgaattacttgatgtaaggcgcagccagaagctgcacatggttaaagacctaaacatggaaaaagcaagataccgtcttgaagtagagattggcaaatctcctccactttctgatgaggaggtctggtttgagctgcgggaaaaagcgtgagaaaatgctgaataccatgctttcttgccaagtcattactttttataaatgcaccatccatcagaatcctatttgttctctggcagtatgatcaattttcttctcttctttatcaggatagagttgagggatgattggaggctagaaaatcgagaagcttttgcaaatatatggtccgatatggtttatgggattgttctattccttcttctctgcttcaaccagagcaaagtaagtatctatcaggagatggtttcattttcattttcaattgcatatcataatctatgtagcactcttgctatgcatgtgggcacatagttttctccttattcaaaatagagtttaaatgattaggcagattcctgtgctattagaccctactaatctcaaaggaacggtagttactttacacttttaccttcaaataactgcaaaaatgtactgaccacaatttcacctcatttttcttctgtacttggtgtacagtgtaccccacaattctaaggtagtgctaatgtcatatcattccatgtgacaaatctaactctatattggtggtcaaaattttgaaaagttgacccaaggcatgtaggattgcacctactttggaccaaagatgtgtcatccagttagcgtaactgacagacatctttcagtaataaaaatgtcttggcaatgtaaatttgtctgatgccttttgtttctccaaatgaatatatagagttatggagttatcatacatcttacttttacttcctcctcacattcaggttgcgatgctgaagttcacaggatataagttgctaaataacatttcagacactgggaaggcctttcttattattctaatatcagacatccttctagggtatgttgaattttcattttcttaaatagaagatctatgtatgcctgtagttcaggcctgcattcatttatccagcatgctcttctaaagcgtcattcatgacattttatcatcagtactcctggcactagagttggagcttgaccaaacaaacgggaggggctagtttatgtaattgagctctaaacactcataagcagtaccaaaatttagtgtttagtcaatggagactacgttggacaaggggggccagggcccacctcagtctcaactaagctctgccctgactggcacagaatatacacattccttgcatataatgtggcatgtcacatgtgcaagtagttcaaaaacagggaagtatttaggttatgactactaggccaattaagtatagtgttaacgtgctatacttgtgcttgagatatcatcatccatactgattctagtgctagattgttttccctttcatccgaagctaagcactatattttttttatccattttataaaatccactagctgcatttttgcaggtaccattcagagtcaggttggcatacaatggtagaagttgttctcgagcattacgggcttgaatctgatgaagcggcggtcacattttttgtttgtctggttccagttgctttggatgtgtacataaagttttgggtatgccttttttcatctaattaacagggattaaaaaaatagttaacagggacaaaaaaatagtttagtagcatagcttttttaaggaacctcttaattttgtaagaaattttctgtcctacagtcctagcgcaccatttcttatgttctcaatacacattttagcaactccagtactaccattttagtcacctttttatagaggggtaagttgcaactttcttttttgttggaaacaaaattcagttttctattgaccgcttgattttattagctacaacttttatggatgtaaaacattgttcggtgttcctggtattattagtttatatgagtttagaagttcacattgtaatctgaataagatcaagatacttagtttatttttctacgttgcaggtatacaaataccttccaagattatcacccagtgtgggcaacgttctggatgaaataaagcgccattagagaaaaatttttagtttccttaattgggaaatcgcttggaaaatcgtggccttccaggtatgtattgggctctggattcctacttgctttattttcagtttgaacagtaagtagtggagaatctattcactattttgttgttcagggagaataaaagaagaaatttagtccttgaacaatagggatgcacatttctgtggtcattgccaggttcattcttttggcaagaaaaaccaacaatgttaattggaaaagtgcagtgtgaatttttttttctcgaatgacactgtaaaatattacaaaacagttttttttcctggtgtattcaagttttgtttttcttgggttcttgcttgagattatgaatacataaatagttcccatcactcttaagaatgaacatctaactgtcccaacgccaaaaaccataaactatcctgacttaataatatggtaattttttgtgcttaggctgtgaaactattacaatttgcaggtagtcaatgggtatattggcttggcatactaagttttcaaatctgaaggatgtctttgtatgaaagacctgcctggccatcaatcagagtgtccggctgggtgttcgggaagactgggaatcggagaagtaacctgagctagtccttatattctaaaacaatgtctttgtgaaagactatgttagccggttagcaatattctccggtgaacacaatagataccctacacgaaacttgaggcttttggtctgtcatatatcattgacacgcatttttgcctgagaaattcttttgcatgctggaggtctagggaggttgaaatctgtcaggttatcgtttcaggatgtccagagctggaaacttgatattttagaactgaaacgtatgggcatcttgaaggcatcagacaaggaggcataatgagttgcagggttcaggaaccgaaatatatatatgcaagttttaagcttcattgagtcctaaagatcaattgtaaagtgtttcagtttggatctttgtctttcaacaaagtaagttttaacttaaccaaggtaggatttgtgttgcaataaaaggaatagggggaatacgcaaaagaaaggttccatgacctggaaccaaacttcaggcaaaaatctctcttgtttacaggccttgaactcatatttcaaagtctctagttatgatttgtgtgtgagtaaaattgttgcaactcaagaaggccgctgggcgtccagatggaagaagagaaggaatgcggtgaaagagacagcaaagaattggaagcggaagcagcaatttacaacgagacatacctgttttcatcctcctcggtttctttctcgcaaggagacaccgattgcgattgcgatttgcgattgcgagcggggagaggaagaagagaggacgatcgaggcagtgtgtgtgtgtgtgtggtggtgagagattctggcgcgcagccgtcggatcaggatcagcttgcgtcgtcgcctcgccatgttggcatctacctgggcctttttttttttgacaacaac

SEQ ID NO: 4037 - DNA, 4141 bp, Sorghum bicolor
atttagaagtcgtttaggacagcgacacagtctccaaaatacaactttgacctttttatttttataaaaatatttagaaaaaatgatatatgcatatttatgaaagtatttttcaaaataaatctattcatataattttcacatttacaaactcaataatttaaaagttattaataatttatattctcaatgtttaactaaaactttattcaaaatgacttcttattcctatagagggccgggagtacatacacgggcattattttttaacgaatcagacaagagagatgccgattactttaaacgaatcgggcatgctatagcttagttttctagctaggacggcggggtacactactaatcttctgcgtactgcacatgcagtgtttgatatatgtagtcattggcagaattggattattcccaaagatatgccatgtgatgtaaagtattttttgaggagatgtaggcctaactaactaactaactaactaactagccgatggtcggctcatatcatcactgttctgtttgtattattatacatgcatgcatgcatggtccttttgagttcattctttgattatgcaattcagaatttcagagacgatccacgcaacacgcaccacatggagttggttcacctgaaaacaaaaaagttttcaagattcttcgtcaaatcgaatcttgtagcacatgcataaaacattaaatatagacgaaaacaaaaactaattacatagtttagctgtaaatcacgagacgaatcttttgatccgttagtccataattggataatatttgtcacaaacaaacgaaaatgctacagtaccgaaaacttttcacttttcggaactaaacaaggccttggaattggaatgcaacggttgcttgcacgcaactataaataactgaacaagaaagtctctgcacacactgcactgcactgcaagcacatacatatccatgctaatgctgcaagtactactgcatgctatctgctgctcatctcatcagcatcacaagtcactactgttgcgtatgaattcaattatttgcatgccgttagtggatcagatcgatcatttacctaagtagccagattattaagtaaggctctaggctataccctgatatatatcctgtaataataagttgtatgctgatcgtacgtactgaaacacctatttcttttattatgagaagcaagaaataaaccatctgcatggagtagagtactatatgcatgtatgcatgtgtattaattgttatgtggcaaagttgaaggagaggtttagcggctttaacttaattagttgggtgtttaagtcgagacctgggatcggagtagctctaggcatgtacgtttagtagcaggagcaggcgaaagcagatcgagtgaagatttaagctcatgaaccaacaaccaccagcagacaaagatggttgcaaataaacatgcaagatttggttacaaataaacctgcaaaatcaatttcggcatcagagaaatgcatgcgtgcatggtggtgctttgcctctgaatggcaccattcctgagtgctgactgcagaaatgcagataagatatatgcatgcagagtccggccggataatcaggcagaatagcagatcccttaattaaattgatatgaaaacgtacgtgcatataggtcgaaagtgtcattgtttgtagccctgtggttgtgtcgtcggtttccagaaaagaagtatttgcggtagttagatcacgtacagtgcttcattactgtacatcatctgttttctttttctttttttgccgccaggacggcctctttacgtactgtacgtattcgtagtagtgtagatttgagagcaatgcaatgcaatcatccctgtcgactgtcgtacgtctcctctgttggttagttacatgcataacctccacgcatcatcaaccgcttagctatcctatatattggccccccccacatgcagcaggaagcagcacaacgacctctttgcatgcatattgctctctctgtgtgtgttactgcgtgcaaattaaagcagcagctcttgctcgatcgcgggatgatgtctgagaggaatctccttgcacgccgccagccgctgccgcccgccattgccgtggcggtggtggtggtggcggtgctcgtccatccacgagcggtggcggtggcgcaggctcagccttcgccgggctacttcccgagcgccacggtgaggtccatggccttctccgaggactacgacaacctgtgggggccgcagcaccagacgctgtcgcaggacaagatggcgctcacgctcttgatggaccgaacctcaggtcagtaccagcagcagcttggcaccagtcaatgtcaatcctagctagctaccggctgtgatgacgatccatgatcgagtcctctcgatcagtcatgaaattaatctgaaccgtcgtcgtcgtcgtcgtcgtcgtctgaattgaaacctgtaaacaaacaaacaaactctgattgatggtatacgcatcgatcgacaggcagcggattcaagtcgaagcgctcgtaccggaacggctacttcggcgtctccatcaaggtgcagccgggctacaccgccggcgtcaacaccgccttctacgtacgtcgtcgtcgatcatcagagatctagtagtgagagtagtgatatggaaaattaatatatgcatgcaaacaataataaacaatatatgcatgcagctgtcgaacaacgagctgtaccctgggaagcacgacgagatcgacatagagctgctgggcacggtgccgggggagccctacactctgcagaccaacgtgtacgtgcggggcaccggcgacggcgcgcacctggtggggcgggagatgcggttccacctctggttcgacccgaccgccgacttccaccactacgccatcctgtggaaccccgacgagatcgtcttcctcgtcgacgacgtccccatcaggcgctacgccgccgccagcacgacgttattcccggacagggagatgtgggcgtacggctccatctgggacgcctccgactgggccaccgacggcggccgctacagggccgactaccgctaccagcccttcctggcgggcttccggacgttcaggaccgccggatgcgaggccgccgcgcccgccgccgggtgcccacccgtgccggcgtcccccgccggcgctgggctcagcgtgcagcagcgtgacgccatgcgctgggcgcagcagaggtccatggtctactactactgccaggattacacaaaggatcgctccttatacccagaatgctcgctcgctacctagctagctagcctgatgatgagtagtgattcattaattaagattattaagcaccctgccgtgcgtaactagtagtaattgaagcatgcatgatcgaagcagcagctcatagcagatcatatagcagagagcggcaagggaggaggcgtgcgattgaagcgccgccctacgtatacgtagtagtacactagtacgtacgtacggatcatcctaaaattgttcactggtggttgaggcgtgtgacttatttatcttcaattcagagatgcacactagtctggatccatatatatgtaatgtataaataagtccattatctaaaaaggaacattgttcactcacattacacatcgattttaatgcttagtaatatttctcatataggagttagtagccctagtgtttagaagcaagggggtggtttcttcaaaacttttgtacgtatcaggggttatagctagtcggtttggttatatataataaatggcttggtgcttaaaaaggaacatgcttgacgcggtcatagtcttcttttatgcagaggtccaagctctgtcttccccggcatgcatgcagcgcccgagccaacaaggcccaaaaattcgatgtgacggaaaatcttgaaaatttgtgcgaactaaacaaggcctatgtatcagcttccagatcccgcgcgcatcctggctacctagctggcctcagatcgatccaacgacgtgaagagatgatcctggacgagatccagccagcgttccaaggagcgaggagttgatccagccggccgggacggaaggaggagaattctggtgaattaaggga

SEQ ID NO: 4038 - DNA, 3772 bp, Sorghum bicolor
cctttgaagtccataaaaaggttgaagtttatgaaatatatctatctattgcctaacaaacacatagaagttataactaatttatttttgaatttatactttcaaaaatacatcgcatgactgattggctatgcacgtggctccaaagtccaaacccctactatatcataccttccgtccaggcgctcattcagatttgatttttttttctagatttgaattaaaccttccgtccaaaacctaggccttgtttacattcaaaatctttttggatttggatactatagcacattcatttatatttggcaattattgtccaatcacgaactaaataggctcaaaagattcatctcataaattacaggcaagctgtgtaattaattatttttttttatctatacttaatgctttatgtatgtgccacaagatttaatgtgagagggaatcttgaaaaatttttggattttgagtggaactaaacaaagccctagggtaaaaacaagaatctcaaattaatctggctttgggctaaatattttcaaactagtactagaaatctcttatgtttttaatagtagtcaacattatgacatatagccctgaactttttaaaatgtgctctcaaaatgggggatggaagatgaagttgaaatagtagcatctcctaactcccacttactcatgtggacccttcgtagcattttgtgaccatatgttttaaggagttgtacatgtagagttgttctgacactaaaacagttttagctctacgagtagagctgctcgtggagccaaagtaaaataataataatttcattggtgaagtgaggtggagctctgccaaagggatgtaacctcctcatctcaaaaaaaatggaagtagcctcctctctttcttggttggtcaatagatgtccatgagtcggcctggtttggccaggcacaggcccaggctaggcatggcttcatgtgggtcgggccgacatggcacgtcgtgcctcctaggccatgcctcatcagccggcctcatgtttgccagcggcctaggcacaacctattgggccgatttttgagctgggctggcccagaaagcacaacctgcagagtaggggggctagccagaggcccacattgcaatgaagccatgggggagcgttgtcaccagctgtgcagaggagccaagggtcatgtgaggccatgtgagggagttagggaagaggaggcgacgcgagtccatttggagatggctgctgcatctgatctgcatgacgtggaggtcagcagggtaagagagatctgagataggccactggagaggagaggagaggagcgcgagatggggcaagctagcatcacaggcagctgagtgaaggaagaagaggagggcgagcaagtgcgggcgggcagcggaagagtcagtaagggcggtggcttcggccttccccgtgtggagtagtgatggaaaaaaagaagttagtcgatggggcagcagatcaagagtagctgtgggtggatgaatatgttggatgttggcccaggcaggctaggctagctcgggtcactcagcaccagggccatgccgtgctcgtgctgggccaaaatggcaggcttcctgccggactgcggggtgcatggccaagtataatatatatgtgcatgcatggtattcattcatctctctccacttccttacattcatctaacgctgcagctgtaatgtaatgacaacaacaacgacaatacaatgaagataagagagatcgagggagcagagggactgaagaagacaggattaggagtacctcggatcgcggcaagacgaacagctgcagggacgccagtggtcatcgatctcccttattagcttgttatattacggtatgcaatgcatggaatagctagcaaaactcgctcggccgtgaatgacctctatctccccggtgtgcttgcatgcacgcgtgtccataatataaataggagccccggccgcctgctagctcattcatattcatcgcatcgtagttacattacataccatccaccaaacgatcaaaggaagatgggagcgaacatgatgtcgtggtcgatgcaggtggcgttggtggtggcgctggcgtttctggtgggcggcgcatggtgcggtcctcccaaggttgccccgggcaagaacatcacggccacctacggcagcgactggctggaagcgaaggcaacatggtacggtaagccaacaggcgccggccccgacgacaacggcggcgcatgtggttacaaggatgtgaacaaggcccccttcaacagcatgggcgcgtgcggcaacctccccatcttcaaggacggcctcggctgcggctcctgctttgagatcaagtgtgacaagccggccgagtgctccggcgaggccgtggtggtgcacatcacggacatgaactacgagcaaatcgccgcctaccacttcgacctggccggcacggcgttcggcgccatggccaagaagggcgaggaggagaagctgcgcaaggcgggcatcatcgacatgaagttccgccgggtcaagtgcaagtacggcgaaaaggtcaccttccacgtggagaaggggagcaaccccaactacctggcgctgttggtcaagtacgtcgacggcgacggtgacgttgtgggggtggacatcaaggagaagggtggcgacgcgtaccagcccctcaagcactcctggggcgctatctggaggaaggacagcgacaagccaatcaagtttcccgtcaccgtccaaatcaccaccgaaggaggcaccaagaccgcctatgaagacgtcatccccgaaggctggaaggccgacaccacctacaccgccaaataaactgtccaacagacctaacgctgctctgggctcggttggattggatcccaacttcccaagcaatgcattacacttacgcatgcatggatccatgcacaatatctatttttttactgctgctactgctacgacaatgtcctcctttgtcctctccatatatagctagagtcaggctctgctctcttatattattattatataagataagaaataggagagagagaggagagagaccgagtacataataagtgtctaattaaagagagatttgagaggcctttattttatatataataaagaatccaaggagtgaggcaaacagcaacaaaaatgcgttgtactgtccatggatttccatgtaatctcaattataccatgtctacattttaatagaatacacactttttaatgattaattgaaatttatgataagcattctagatgtattctttgctttgccagccttagccgcggccattcttcgaaggtaaggtacaataatttcattcatgctacaaaatataagctttctactctttaataagatgaactttccattattacgacaccttcactgcttgcattaattatgcaatttccaacattaagatggcgtcatgtatgcatctagaccactaggtaataagcgtggtaattgtttcgatgatttatatcaactatattattagaaaggcacaacatgagggatattatagctttcaaacatgattgatctaacgagtcgattgcacaagccgacgggcgccggccccgacgacaacggtggtgcgtgcgggtacaaggatgtgaacaaggcccccttcaacagcaagggtgcgtgcggcaacctccccatcttcaaggatggcctcggctgcggctcctgctttgagatcaagtgtgacaagccag

SEQ ID NO: 4039 - DNA, 3114 bp, Sorghum bicolor
aaatggaaatatttagagggttaccattagcatccatcatgctatctagcatgtattgtcagtgggcatgaggtgagagttgcgagatagcatacttgttggaagtaaatgtcgtgtcgaagaagtcctgagaactctccagcaccctagttttcacaagttgaattccagcctcagttaggccagcaggagtcttggacaagagttcatcaattgcatttgagacatcatgctgctgaaactggaatcgaaatatataccgccttatttagcaaatagtactagaagagatcgggacaggaaagccatgaggtgaggtagaacaagagatgaaaacagaccaggatttcggcaggttggccacataaagcacgagcatgctgattgcagatccatagctgtagtagctctgacttaatttgcagaggagaaggaacaagacgacgggtacagtacagcgttagtagatacgcatgcgacttattatacgagagagagagagagagagagagagaggcaaggaaagtgcattacaatcttgttagctgtttggctgagcagtccgtcctctatgcatgctttgtcttgcctcttgaacccctggacgcactctagctcaccgtccacgcatcggccgttcagagggcaaggttgacacgaatctgcgcatgcctttgccttataatagctagctacagtagcaaggagagcatggagaggggtgaaggaagctgtagaaggagatggccgtacccgtaccgtcggcgtagtcatcgggcgattggggggagtcgcagaagggctcagggcggcggttgaggacgctgcaggccgcggcggctgcggcggcgatgcatatgacggcgagcaagcggacgaggtcctccctggcggggaagaggccgggagggggctcggcggcgctcgggaagggggcccgggccgaacgccgcggcgaacgcgacggcatcgctctctgtctctggcggtccggccggccgggaggacgaggttccttcaatcccgtcagggccagcccagcaaagctcagcccatataaggaaggacttaggaggccggcccgttgccctgccgccgcttggactgtttatcggcccagcccagcccattcagagtaacactcgcggccgagcgtccaagtcgtttcttatttcttttttgggacacctcttctccaccaccgtgctcacgagtcacaggcacacgataaccagacacaacaaggagatgaggagcgccgtgcccgtggctctcgccgccgcgtttgccctggcagtggcaaccatcgtggtgcaagtcggcggccgccggcgacactgcataaaggattttctagaggcggctcaagaccctctgtgagggcggctcgggtgttcctacaaatgccaaataaggacggttggccagtcgcttagggcactcccaatgcaagactctatcatggagtccaagacaattaattacatattatttatagtattttgctgatgtggtaccatatttattgaagaaagaggtagaaaaaataagactccaagtcttatttagacttcaagtccacattgttcgatgtaataaatgactttagactccatgatagagtctgcattgtgagtgtccttattaaaaaaataatttgtaagagcggttaaaaattaagtattgatggcctgcgtggaagagacgacacgcggcaagagcggaggcatgggggcttccacgcggagcagaaacttggccacgtacccctccacttgtcggtgaggcgtcctcgcgtgcctccctcgcccccgtctccatatgcacagctttgtcttatatatgcacgcacccggcctactagctccgttcaggatcatctctagccgctagtccatcatcgctagctgtgccaagccaaagccaaagccaagccaggtagtatggccactggtggtcatcatgcggacgacgcgcaccatcatcgtggtggagggagaagaagcgacgccgtcggagagaactacatgaggggcctctacggcgacgacgactacaacgccagccactacggccagcagcagtcagctggcacggcggtggccaaggcgctagcctcggccacggcggccttcaccttgctggtgctgtcggggctggcggtgacgggcacagtgctggcgctcatcgtggcgacgccgttgctggtgatcttcagccccgtgctggtgccggcggccatcacggtggcgctgctcacgacaggcttcgtctcgtcaggagggttcggcgccgccgcggtggctgtgctggcgtggatgtaccgctacctgcagacgacgacctcgtcgtcggatcagcagcagcatcagcatcagctgtccggcaaggcgcacgacgtcaaggactgggcgcagcaccgcctggagcaggcacgcgcgcactgaatggaaaaaaaaaatgcccatactggagctagcctcgaggtcttaattatactgtcactcacgtcaatcgcacatatgccgacatgttatgtaatcttcggttggcagcaaaaataaagagcgagttcctgtcgacctctataatgaataaataaatacaatacttttagagtttttttcgaaagatctggctgaaaaatactgtttctaatttcttgtgagaaggaaatatacggtttataagataagccagctaatttattatgagaaggaaatactttatcagacaagtgaatggagtggagccttgaatagtctgcagttttgtctaaaaaaatgtctgcactgtctaatcctgatgccgatccaaattttaggcaggcaggcaggctcgctcaagtgccttgcttgaatgccttttacacaaataatacgttgtcaacttagctggatgagattagcagaagtaatatagacaagccaagtatgttgactgaaaaaattagggcatgtttgtatgtatgttcagtcaatcttggtgggagggaaggtgggcccagccaggtcttgtgtgtgtggaactctactctcctactctcccaaagagagaattcctacttaaaagagagggggtgacaaatgaaatgaatctacttaaaaaagagtt

SEQ ID NO: 4040 - DNA, 6029 bp, Sorghum bicolor
atacatacaaacatgccctaattttttcagtcaacatacttggcttgtctatattacttctgctaatctcatccagctaagttgacaacgtattatttgtgtaaaaggcattcaagcaaggcacttgagcgagcctgcctgcctgcctaaaatttggatcggcatcaggattagacagtgcagacatttttttagacaaaactgcagactattcaaggctccactccattcacttgtctgataaagtatttccttctcataataaattagctggcttatcttataaaccgtatatttccttctcacaagaaattagaaacagtatttttcagccagatctttcgaaaaaaactctaaaagtattgtatttatttattcattatagaggtcgacaggaactcgctctttatttttgctgccaaccgaagattacataacatgtcggcatatgtgcgattgacgtgagtgacagtataattaagacctcgaggctagctccagtatgggcattttttttttccattcagtgcgcgcgtgcctgctccaggcggtgctgcgcccagtccttgacgtcgtgcgccttgccggacagctgatgctgatgctgctgctgatccgacgacgaggtcgtcgtctgcaggtagcggtacatccacgccagcacagccaccgcggcggcgccgaaccctcctgacgagacgaagcctgtcgtgagcagcgccaccgtgatggccgccggcaccagcacggggctgaagatcaccagcaacggcgtcgccacgatgagcgccagcactgtgcccgtcaccgccagccccgacagcaccagcaaggtgaaggccgccgtggccgaggctagcgccttggccaccgccgtgccagctgactgctgctggccgtagtggctggcgttgtagtcgtcgtcgccgtagaggcccctcatgtagttctctccgacggcgtcgcttcttctccctccaccacgatgatggtgcgcgtcgtccgcatgatgaccaccagtggccatactacctggcttggctttggctttggcttggcacagctagcgatgatggactagcggctagagatgatcctgaacggagctagtaggccgggtgcgtgcatatataagacaaagctgtgcatatggagacgggggcgagggaggcacgcgaggacgcctcaccgacaagtggaggggtacgtggccaagtttctgctccgcgtggaagcccccatgcctccgctcttgccgcgtgtcgtctcttccacgcaggccatcaatacttaatttttaaccgctcttacaaattatttttttaataaggacactcacaatgcagactctatcatggagtctaaagtcatttattacatcgaacaatgtggacttgaagtctaaataagacttggagtcttattttttctacctctttcttcaataaatatggtaccacatcagcaaaatactataaataatatgtaattaattgtcttggactccatgatagagtcttgcattgggagtgccctaagcgactggccaaccgtccttatttggcatttgtaggaacacccgagccgccctcacagagggtcttgagccgcctctagaaaatcctttatgcagtgtcgccggcggccgccgacttgcaccacgatggttgccactgccagggcaaacgcggcggcgagagccacgggcacggcgctcctcatctccttgttgtgtctggttatcgtgtgcctgtgactcgtgagcacggtggtggagaagaggtgtcccaaaaaagaaataagaaacgacttggacgctcggccgcgagtgttactctgaatgggctgggctgggccgataaacagtccaagcggcggcagggcaacgggccggcctcctaagtccttccttatatgggctgagctttgctgggctggccctgacgggattgaaggaacctcgtcctcccggccggccggaccgccagagacagagagcgatgccgtcgcgttcgccgcggcgttcggcccgggcccccttcccgagcgccgccgagccccctcccggcctcttccccgccagggaggacctcgtccgcttgctcgccgtcatatgcatcgccgccgcagccgccgcggcctgcagcgtcctcaaccgccgccctgagcccttctgcgactccccccaatcgcccgatgactacgccgacggtacgggtacggccatctccttctacagcttccttcacccctctccatgctctccttgctactgtagctagctattataaggcaaaggcatgcgcagattcgtgtcaaccttgccctctgaacggccgatgcgtggacggtgagctagagtgcgtccaggggttcaagaggcaagacaaagcatgcatagaggacggactgctcagccaaacagctaacaagattgtaatgcactttccttgcctctctctctctctctctctctctctcgtataataagtcgcatgcgtatctactaacgctgtactgtacccgtcgtcttgttccttctcctctgcaaattaagtcagagctactacagctatggatctgcaatcagcatgctcgtgctttatgtggccaacctgccgaaatcctggtctgttttcatctcttgttctacctcacctcatggctttcctgtcccgatctcttctagtactatttgctaaataaggcggtatatatttcgattccagtttcagcagcatgatgtctcaaatgcaattgatgaactcttgtccaagactcctgctggcctaactgaggctggaattcaacttgtgaaaactagggtgctggagagttctcaggacttcttcgacacgacatttacttccaacaagtatgctatctcgcaactctcacctcatgcccactgacaatacatgctagatagcatgatggatgctaatggtaaccctctaaatatttccatttagagtcaaagtatttaaatgccctgagctggtcgcggagcttcatatgcctttggcttgtcgagttcgccaatggatctctagaaataccatctgtgtggcaaccttttgtatcctggtatgcttctaccattgctatcttaggcacgctgattgtttataggcagcacaagtgatgatggaacccaagcttgcagcactgctctggatactgtggatcatttacaggaggcgggcattatctaatagagctgaacaaatatatgagcaggtatgatgttttatttcaccatcctttgtttaggttcaacgaagtgctaattgtggcttatattttcattacgctgatgcaatcggggtgctgttggtacgtcaaatatgttttgctatacatctgatgcttaagcatccaactactgaggcaatttgagtgtacttggatcagtgaattaccttttctatattgtaagctaaaactattagtattgttgtgtggttaaattttctgggctttccggtgtactgacatttatttttatatgtgatttaccaaacattcccacctcctttgcttctcaaatctcaagtgtgagggaggttgagaagggtgacactttctgtgcatcatagagttcttcattcagtgtgtttgcattatttggtgttgagtttttttttaattttgcaataactctttttggaccttctggtatttgtgcctttgtctgttgtcattcagtaggtttgtgaaatccttgaagataatgccataaacgccaagattgataactccaattgtgagccttgggtggttacctcttggctcagggatcacctgctggttcctcgagagaggaagaatgctttcttgtggaagaaggtatttattttgcaatgtgtttcaccaaataattagtagcttttcttggttattgtcgtctaaattattttgaataagaggtcaaaattaagaacaaaaaagcatggagttaccgtattctgcaatgtatttcaccacaattttaggtatatggcagtcaggggcggatccagcaatctggcgtgctccggcgaccgccatacctcacttcgaaaacaccacctcctccactccagattgccatgcttcatgccatcgtcggtgcatcagtgcatgatgagtcctactcgaggcaaatgacaacttatcaaggagataggctgaaaagcaacgattggaaccaacaccttgaacttctggcgagtggactagctagctaggcttacacaactttcctacacatgaacagcttgtttgcttgagattatctgccgaatctgtcagtcagcagtatttttctctcataacaaatccgcgaacaatattttcagtcatggcttatccaccaagcgaacatacttagttaccattttaccaattcgcttggtaggccccacgctcaccaattgaccgtggttgcttcacactgcaccaatggcaccgtgccacattcaccagttagttttctttgtgattgaaaattctgcctttaatatactaagaacatcatttgacatataccttaataaatggctatacatatatttataaatcacataattgttgtcccatgctttgttgcgcaaattagtaatatagagtccgtcataggtgaatttttattctggatccaccactgatggcagtgctgcctgtgagccaagtaatctctgtagtgttgccatacttaagataataaattatgctatcaaatgtaattacttgtgacatttactaaaacagtgcctatactttcatatgcagagataattcatgaatcctcgtatcttggatagtagtatgaagttatggtttgagtcttatgcttatgaatattatagtagtttaaaaccaatgactgctctttgctgccaatgaatattcagcatactcaatttatctgtccatgccagtgaagaatgctgtttgggacacacttctagcatgcacatatttgttattcgttctcatatatattaagaataataatataagtacattaatgatcagcctccaaactacatcagaaggtatcatctataggaaacaaaaattgatgtgttcttttttctcatttctgttttgacataggtcgaagaactgatactagaagattctcgaatagatcaatatccaaaggtgattaagggggagtcaaaggttgtttatgagtggcaaggtaccaatgcagttccagctgttttttcttggattttaaaaaagtgttggccgtacaacctggtgctgtctttttgggtgaatctgtgaacgcaagggcaagatacctgttccatggtttgatttctcactatatatttatctctgccttttgcagcaagtggctcacttagtgcaaagattaaaaaggtgcaaggtgcaagggtcaagtcaaggactggtggaggtgcgataaaatttgcagaagaaatgggtgcttgcttggttgaggtgagggagcaggggtcatgtgatttaatacgtgaagaaagaagtaaggcgaagctcacgagcagtgattaggctatttatctatacgcctctggtctctggagtgagatagaagtgtttctcaaactagtctatgcgaaggcaggaggtactgatatttgtatatatgataggagtaacaggtaccgcggatctccgtcacagtgtgtgctagcctgctgaccgctgttaggaatccggtgtttgtcttttggcgaattgtgttattgcaactagaacggacaaatagtcctagtcatgagattgatatgtcatttaacttgggattcgaattgaagatacccatcatataattttgtatgcaggagcttcattcgttgaaataaacatatatatggatgtgaatcatatatatgtattataatactcgtgctggagcttcaaaatgaaaatgggatcttattggggcagtgtcaactgatgaacatgcatggatgcatgatatgtggtcatcacttgaagatgctgctgagggagcaatcgtcgtgaacacgccagatggtctcgccgag

SEQ ID NO: 4041 - DNA, 3204 bp, Sorghum bicolor
ataacatgaactaccaacacgtctatttcgcataatatctacggtcccctgatgcttatggcaacgggggaaaaaaaatccatggctaccgtcacgcaacgtcgatcagtttcagtttgcgtagaccatgtgacttgcaaactttacgcacttactgctcggacatgttgataagctataggcctatagccctgcttttctgatagcgataaattaaatgatgactaggagtatatatggccccagctctagagaaaaaggctgataagtcatgcatgtaaggtatgataagctgatagcttttgtgaaaaggagctatgctttgagctgattacttatcgctcgatcccatttctccttttcatttttctctagaagcttctgagaaataatagttgctactaaggagagttgtagcttgatagcaaattttagagttctggatatatatatatacatgcatgcttcgatagacaattactctggccagtgatgattcatgcatgaagcagctgtgagcccacattccaaatcaatatttagagtgtcctgttcgtttagggtttaggatttagtttgggctgggcagattttggagcccaaccaatcagaccttgtattttttacgaccacgtatatatatatcttcagaccaaaatttaaaggctgtctagtagtacattccattttatttatattattagaaattctgtttaaagtgtaatggttcaaccgaggccggccggacagacaatatctggcaggagccggacattgattctcaaaactctactccattcttactagctagttgcgaagaactgcgacgacgtcctagtctagaaattaaagcccagttcgagacgtctccggcggccatggcgagctgctcgtgaaccactatgctttccagcctgtcgtccatgcaggagacggaatcatggccatggataaccttagtgatgttgactatctgaaaatttaattattacacaacatgtgatagctgtaaataaatacatacagtacaatattaatttatgtgagaaccaaacatgtattaaactactccctccgtcccaaattataagtcattccaagaatcttggagagtcaaagtttttgaagtttgaccaaatttatatagcaaaataataacatttttggtaccaaccaagtatcattagattctttgttagttatattttcatagtgtacctattttatgacataaatctttatatttctctttatatttttggtcaaacttgaaaatgctttgactctccaagatttttggaatgacttataatttggaacggagggagtaaatctcatctgactaggcctcaaataattaatttgttaatcacatgatgatgtgggaaacaaaccgtgaacaaaatcatataatcacgccctcaacagtagtactgttggcaacaccaaaacatagccgcgaccgcaatgcaactggcttgatttcacgatcaccatttgcatatttattagtattacaaatatatatgtacgcgccggccattttccaccctacgtacatgctgatgatgatgcccctccccctgtgctgttggacacggtatcacgtgcataggatcagaatcgcgcgcgtcatgcatcgccgcccccctcaacttggcgaaaaggttctctcagccgctactaccactttctaccagatctcgaggtcaagatttgtgcagtggtgcgccgcatatccaccactatttacacgcatcaagttgcacgccacctttttgacacattgagtggctattaccacgcatgcccgacctgtcaagcctctataaatagctcccatgcatggctgctctcatgcatatatagtttgcatacatagcaacagtgttagcaatcttcactttgaagtttgaacttaagttagttgtgccaagaatattcaccaagagatttgatccgtacatatggctcccagcagagaggcgtgtgcggtcgccatggccatggcggcgccgttcattgcgatggcgagcaataacatcggcagcgccagcgccaacaacgccacaggcggcggcaacggtgacatcaagcggcgccggacctcgtccgacgccctgcagcgcaccgtctccgacgtctcctacgagctccaccaccaccaccaccaccaccagcacggcgccggcggcgtcaacaagcaggagaagacgaaggcggcggatcaggccgagcagcagctgctgctgcaccccgtgcctgaggtgcaggacgccaagtgcgagtgctgcggcatgtcggaggagtgcacgcccgagtacatccgcggcgtgcgcggcaggttcgcgggccgctgggtctgcggcctgtgcgccgaggccgtgacggaggaggccgagaagatgaacggcggcggcggcgggacgctggaggaggcgctcagggcgcacatgggcgtgtgcaagcgcttcaacggcttcggccggacgcacccggtgctgttccaggccgaggccatgcgggagatcctcaggcgccgggccaagctcggccccaggtccaggtccagcatcaaccctagggaggtcagggaagtcgccgtcggcgccaaggccggcagcggcggcggcggcactactgggatcgctcgcagctccagctgcatgcccttcatcaccgacgacttcaacgaacgggcaacgtcgtcgtccatcaacaaaaactgattcgatcagttgttggttgacgatgatgagtttttagcatgatggcaagcttgcacttctttgaccttcaattctttttgtaggctagagggtgcattagtttgctgcttggtgcttcgttattaagtagctttcaatttattagcggccggactagagagtgcatgcttttgtttacatgccattgtggctgttttttgctcacttctagctttgagcgagctagaaccttgggcagcgttagtagtagtctagtcatgcttagtctggtttgttcatgcaacctctgttgcatggagaccgatcaaattgaagttgtttcagggtgcaggtttttccagctgataggtcatcagtggaatatgcatatatggtcaccctttggtagcgttgaggtcgtggctgatggggtagcagttgtttttttatggggctttgcttgggactcttgtgcctttttgcctcacaagcggcg

SEQ ID NO: 4042 - DNA, 4768 bp, Sorghum bicolor
atgggtgttgttcgcattttcgtatgtacatgcttgtatgtataactgaatgatgttgttttctgcttgtgttttgtgtagtcgcctcttggttggagatcaagttgcacctgcccgacttcactagatcttagggtttcatataatattgtttttatatacgatttgtgcctttttagctgttgtggttgttgctgcagactggtgagatagtttggtggtagttcggactaatttagcttttgcttcaatgtgttttcaactaaatttgagacccagttggccagttcacttagccgtgtttggaagttaataaatagaaaaggaagacctggattctcatttgagatattgtgtcctatgttatcaaatatttcttctatgtcaaaattgcaccgatccttttaaaaatagaatgaattttatataagataaaggtgcatgtgtgagttcctgcctcagtcttatatgtgtcagttgacaaggatctttgcacaacataaaacatgacttctttatgcttcatgttgcaaatctatcaacattttgatatgaagatccatatgatgtcagtagttttgtctggaggctgatagcaagcatgatcaagaaagaggccttctcattggaagcatgctattggcaacagtccttggcggtaacataacttagatatacatttttgtgctatctataactctataaatatgtaagtatctagccttttcttttgctgttctgcaatataattctaccagattgcaccatgtaaatgagctccttcatagaacatgacttttttagattaaattaaatttcactttaatgttaatatttaatttcacaatattgttatcttattgtgcgaaacgtgtgtttttattacaaaagtttagttgtcccgtagcaacgcacgggcacgctacctagtaaataaataaaaagatttaattttctcataaatccacttaactatgagcgtccttgcggataagccaccttgcattctagtataccacaggttaagtaagcgatattaaataccacagtccacaggttttcttttgtagaggttgacttatattcaaatcaaattggttcaaatgcatcgtcaagtcaaattgcactttcacagcgctgtggttttgtccgataaaagtttgagacgtcgtgtaatgatccaatccaatggccctcccctgtcataacacaaaactgccccaagatatagcaattttctcgtgaaaataaaaggaactttgtcaatccattttctccatcgtgatgttgttgatggcattttcagctctttgaaaatctgaacattgcatgcaattactgacagaatcttttgaggaccatactaaacagccaattaaatggtgacaaaaaagaaaaaagagtacggggaagaaagttcaatatttgtttccttgctacctctaccgtcatttaaattaaattgacatacacaggaacaaagttggctggcttgacaatatggccttgtttagttcactctgaaaaccaaaaagttttcaagattccccgtcacatcgaatcttgtgacatatgcattaaacaataaatataaacgaaaacaaaaactaattacacagtttagctgtaaatcacgagacaaatcttttgatcctagttagtccatgattggataatatttatcacaaacaaatgaaagttctacagtaccgaaaatttttcacttttcgaaactaaacaaggccataatctggaagggggaaaaaagggagaaaaagcaaataactgacggagatgcttgcatacgagtacattagttagtaatataggttaccaagggagcaaatgcaaaagtataaaagttggatcaggatgaggggtgggtcctacgcgatctcagggtgtggacacggcagcgccacgtgggaaaaaggatgcatgcggatgcggtaggcagagagacagaagaggtggatcgcctgctgaagctggagctggtgggagcgggtgggcatgcatgggcatggcggacaccagcatcttctccctctcgcctcctctgctgcgcctgcgcctgcgcatgagccaccacccccacacatcatcatcatcagctattcctcctgttcctgctgctgcatcatccaccagttccagcccgcggccgcggcggctgctcatcaagcagcagaggagcattattggtaataatcattcatcgccaacccggcaaagatcactattactgtcgtcgtctcgtgcttctgcttctgcttcttcttcttcttcttcttcttcttcttctgtggcgacggcgacggcgacggcgacggcaccggcgcagaacgagaacgagaaagacgtcgtcttcgtggctggcgccaccggcagagttgggtcccgggccgtaagggagctcatcaagcttggcttccgtgtgcgcgctgccgtcaggaacgcacagagggccacgtccctggtgcaggtattataccatgtgtattgggaatgaatttaattgattgattgaattgatttcatgtcataatagtaataataataatgcatgcatggtgaatgaatgaatcaatgaattgtttgcatggcattattgaattgaattcgattcgatccagagcgtccagcaactgaaactagaggcgcagcctgagctggagcttgtggagtgtgacctggagaagcaggcgcaggaaggcatcgtttcagccataggcaatgcttccctggtggtgtgctccatcggtgccagcgagaaggagatcctggatgtcaccggcccataccgcatcgactacatggccaccaacaaacttgtacaagctggtatctatgcctaattgcttgctacgtacgtacgcttagttaagaaaagctgctgctaattaattacagtatattacattattcattgtctatggcatgcatgcagcatctgctgccaaggtggagcacttcatcctggttacatccctgggcaccaacaggatcggcttccctgcattcctcttgaagtaagtaagtaattaaaattaatatgaagtagtaattaattaattaattaattaattggttgtcctagctagcgcttgggcgcgctagcttattatactacaaataaataaatgatcgaacaagcagcttgttctggggagttctgtactggaaaagacgagctgaagaagcactcatcgcaagcggcattccctacacggtaataatatggcatgcattgcatcatcgatatatagatctatcttatttggttccctgatcacaattcaatatggttgtaagtactagatcataaggcctggaggcatggagaggccgacggacgctttcaaggagacgcacaacctggtgttggcaccagaggacacctacgtgggtggccaggtatccaacctgcaggtggcggagctcatcggatgcatggccgccaacaggagggcggcctactgcaagatagtggaggcggtggccgagaccacggcgccattgctgcccacggagcagctcctctccaccattccatccaagagagaaccaccctgctccggccccgctgatgatgacgagcctggggatgatgcagatccaaagccgccacaacctccgccagcacctgccgcagcagaggagtcacagacaacgtaacgaccggaggaaaaacagcagagccaattaacgctctgacaccctacacggcgtaagtagaggccatatatcacgagaaagttatttttgcccgcatgtacggcaactctctctaccactatattcgcattgaaaagtgtgcaaacatacatctcaatacgaatctgctttgagatgtgtgtttgcacacttctcaatgcgaatccagtggtgtagagagtaagagcatatgcccttaagggaaaaaaaaaactgcgttccatatattatatcacatcgtgcaccttcatcccccttccccaaacagagcagcagcgagggccccccaagcccaagtgcatgcaacagcgcccactttcaccttacacaaggtatagtgtacgttgcgtgcacatgcacgtacacaaggtttagcggcgtgcaaatcagaagcctacttatggttatggggagcaagactaccaagagacgacaggatcattgctacaatttggtgttatgtaatcattgatgcaatgtaaaaccaacaccgaaactaactggtgatctttgtaatctttttgtctatttaagagccaaaatatcaatgaatgcatcaggtgggggattctctcccctcccatcgaggcatcgacttatatttaaaaaaaaaaacatcttccattatgtttttgtggatcgagcaagctcgccttcttattgagcctgtctttgaagaataaccaggcaaaaatcttgactttgtttggcaactttgtccgccagatccatgtgccatgaaagtcttgaaaatctggggacttcataagcatcctcgagaaggaaagttaacattagaaactggagtttcttcttgatgtacagttattctctagagcgcaacagagctgaaacctaccacaacctttttttccgcatcatgtcaagtcgaaactgcgtaccagagctagtaaaataacccaatgctggcacgccgcagctttgccgtttcggcttttccaatttccttctagctagctgccaaggacttttaagctatgcaactacgactttaatttgttcaactcgccaatttgttctaccaattttc

SEQ ID NO: 4043 - DNA, 5281 bp, Sorghum bicolor
atgaatctcatctgagaaaagaggggagagagatctgctccggaccattggcagttggcagttgcaacaaactagtagtagtagaacggagatctccgatccatcgcccttgtttgttacatacagatacagtactcccttggattggattggactgtttttttcccccaatcatcgattcgtcaatcgtcttgtttctctttgccctccctccctatatcttcggcttcgccatgtctatatatttatgtacatgaccccccaaaaaaaatcttcgccgtcattatcatctctagctctcgtcttgttcgtcctccttggaaggaagcagcaatttgttgctcacctccacacggcctgcttattatttttagcaaaaagcaggcacaggcaggagaagagaggagagggggcgacgagggcaacgcatcagatcgatagatcaatcagtgctgctcctgctcgtcgtggtcagccgccagcgacgaacgaacgagcaaaaggccggctgatttgctctctctctctctctctctctctctctctctctgctctgctagtggcgccgaatcaatcaatcaatttcaatcacaaagttaagttggaattttgattgctccatatataaactcaattcgtcgtccacacgacattaattggatcggaatcggaatcggaccacccaccatcagaaagcaaagcagaggaaggcagtccattcaagattggaaggcagtccagtccagtccagattggattattattagattcccttattatcttcgcttcctgactggagtactcgtcgcgagagagagagagagagagaaaggcaagcagcagcatccgcaggccaaagaagagaagagaagcaaagcaatggatgtaagtcgtccttccttgctcgtctttgctttctttgttgcccccacttcccctccccctttccctatcatcaattctattctattccattccattccatcacaccacttgctgctactgctaccttcttcccctgtttatattctagcactactactattttggtacctagtgttattcacctaggtatgtatgctctgcatatagtatagtgtagtatatattttttgatggtctatagtatatattggagaaagaaacaaagaaagatgatgctgattgcccatacatgccgcatgatgattgctttgcttgcgtgaaccatcgtctttacactagtttgtttggtcgctcctggctgcctattcctcttgtgctaaacaaacctgccagccagccagtcagtcagtcagccattcagtcataatattaattactctctacgagtaattaggcatgcatcttatgttccctcaatctttttcaagattctttttcttcttatcattgtcttgtgtgctccacatgcatggcacgttgatcactactagtagttactggctgcattattaggcaccgcactaaaatacaccatcttgtatctgtatgtatcacgaggatagataggcctaggagcagcagcagcattcagcaaccatatcgcgtcagattttctaattgattgatacttgcaaccctccttccctccatcactattcaatgccctcagtattcccaccactttcactttagtttggccataacaaaaaaaaaaaaaaaacacgtgtccatcattgttgtttctcgccttttcccttttaaaattttctggacaacatgcatccatgattcttatgaaaatgaaaatggaaatggaaatgatgcgagctacttttggtctttggggggaagccaccgcatcaccatgctgtgctgcggcgtcctcctccttccttccctttttataggccgcctctgcctccgcctccgcttcctcgtccttcacctgcgacgcagaggacctgcccctgcgcctgcaattcttcgacgacgacgacgacgacggccaagaccatcacagcgacagggtgcccctcctcctgcccatcaagattatggacgccgccgacgagaagggagagacgccccaaatctccgaggataccgcccaccagattggcgttggtacgtattattatgccattctatctctgcatggagagcgccctcctcctgctgcttcttttcacaaaacaagtcaacaacaaactcttctcatgatcagagtcagaggtccttatttacaagggaatccttcttcacccattcactgcatgctttgctcttccatggatgaaatttcttctgctacataaatatatctgtattagttaatattttatttattattattcaatttacaaagtggaggaaacaaccatgtatataaaattgtaaatatatatctgtattaataacaatcaaataatagtactagtcttttatttattattcatcaatttacaaagtggaggaaactaccatgtatgtacacgtgggtttgccaaacccacagtaacaattaataaatttatttatgtatgcatgcatttataattttttttaatagttaattaataaagcatacattattatgtatatttgatttcatttgaatcctaaaacctttctgtctgcctgctattttctttcagatccttggtatcaagttggcttcgtcctcacaaccggggtcaacagtgcatatgttctaggatactctggatcgattatggtccctttaggctggatcggcggcacatgcggcctcctcctagctgccgccgtttccatgtatgctaatgctcttcttgcacggcttcatgaagtcggtggcaagcgccatatcagatacagagatcttgctggacacatatatggtcagtaattaattaacttccctcttagctctgcacttgctgtttgacacatatatagtcagtaattaactgccctcttagctctgcacttgctgtttgacacatatatagtcagtaattaacttccctcttagctctgcacttgcagcagcattattcttttgcttcccatatatactagtcactagtcacaaataagctagtagtacgattcattttctttatgcttttgatttgatttgactaaacaaaaaaaatgtgggcttacatggatcattttctttattccttcgatttgatttgactacaggacgaaaaatttatgggcttacatgggctctgcagtacattaaccttttcatgatcaacactggttttatcatcttagctggacaagctctcaaggtacgatccaggaaaaaagaaatcgcctcagattgactgttttcttttgtacaatcaaacactcttctccccatgactccctctatcatatttcctggcactactgtttattgatcctcctgtatgcaaactagagttttttttttcctgaaattccatttcttccttttccttccattagatcgatgaatttgtcgatagcatgctgtacacaggttagattatatagttgcacttactctttatgtaaatctaaattatgaaatattttcctcggaaacttattttgtcaccttccatttgcaggcaacatatggactctttagtgatgctggagttctgaaactcccttactgcattgcaatatcaggattcgtttgtgctctttttgcctttggaatcccttatttatctgccctcaggatttggttgggattctccacgcttttcagcctcatctatattgtgatagcatttgtgctgtcattgagagatggtattatcctttggctccgtcttattgataccatgactcgcctcagatgcatttctgtgtttaatattatattttttgtttcatcgctgatgtctcatactagggataacctcgcctgcgagggattatagtattcccaaatcatcaggttcaactcatgtcttcactacgataggtgccgtagcagaccttgtgtttgcttacaacactggtatgctgccagaaattcaggtgagtccagacgatcattttctggtttagttaatttattagtagcagcaagggaaatcgcattattatgtggctaatatataataatatttcaggcaaccataaggcctcctgtggtcaagaacatggagaaagctctatggttccagttcaccgttggctccttgcctctctatgctgtaatatttatgggttactgggcttatggttcctcaacatcaagttatctgctaaacagtgtcacaggcccagtttgggtaaaagccgttgcaaatctgtcggcattttttcagacagtcatagcgctgcacgtaagccaacaccttctttgttttgttctagtccaaactgcaatatttagccctatatatacctctttcatttcaaacatgccattgatggatgcggcttggtgagtaacttgagtttcatgtattctccagatatttgctagcccaatgtatgaatacctggacacaaaatatggaagtgggcgtggtggtccttttgaaatccaaaacctagcgttcagggtagtagtaagaggaggctacttgacggtgaacacgctggtggcggcggtgctcccattcctcggtgacttcatgagcctgacgggcgccctgagcaccttcccactgacgtttgtgctcgcaaatcacatgtacctgatggtgaaggggcctaagctgtctgccatccagaaattatggcactggctgaatgttgttgggttcactgcgttggctgttgcgtcggcggtctcggcaataaggctcatcatgcgtgattccagcacctaccacttcttcgctgatgtttgagcttgaggccacgtacgatcagtgaaatattcaattctagcttgtttcctttatgtttttggaaagggagggcagatagcagggtgggtagctaccagcagcagtagttgatttgtgatggaaacggtaaattgtatccgagcaataaatcaaggccaaatgtgctgagccagagctagtattatttatacacctcaagatctcttctccttgggttgtcttggatcttcaaattcatcagtatgattgtatatgctgagcccggagctagtatatatttcagagaattatatatattgatgtatatatgttgggcggggtgcattgcgcttgcgcagcacggagaaaagtgagcacctgagggtttatggatcgacgaacgaacaagaaacaacagcaattgctagtaaccataaggatgcatattttattgcatagatgatgattaattagcaactctagcagcaggccgaagcggggatggtgtcgatgcaggactt

SEQ ID NO: 4044 - DNA, 4089 bp, Sorghum bicolor
ggttacacagccgccaaaagcgcgggtaggagaagggttgagaggaaggagtgaaatgattacaccattgatggaggatccatctatcatctacttttagtctatttgcccatagcttacaagtatcttgacaggcagagaggaggcgtcgacggcaagggcggaggcctctgaagaccacgtcgtgtctgtgcagccacaactgccggcagcagagaagaagtatcgtggagtgaagcttcatgggcgctgcaggcgggagctccagatcaaggaggcagtgcaccgtggggtagttcgggagccagaaccccaaggattcccaaaactccttggcaatggtgcatttgaatagcaagtggtcgcctgtctccggagcagcatgacaaagctcacaagtgccaccacttaggacgtgcttcttcagaaggttagcctggcattggcattagagcctaccgagcatgagttgccacccgaagaatttcacctgggggtgcgtggttctgccagacgaatttgtagaaggagcaggtggagccgggagaggtggtggctctgtaaatcatagttgtgtggagcttattctcatatgcgaacttacagattctttgattcggctcttcactcaggacggtggcgttgaggaggggaatgagcgcccttctctcctccgcaactgttgcagacaacctaggttgtagggaggagtccaaacccagggccagcacttccgcaatagagatctctgggctcgatcacatgactgaagagagccgggtagcgatcgtcgagaggagcatcaccgacccagttgtcaagccagaaggcgatcgatgagccatcacctaccgagcaggaggagatacaccggtaggcaggaagaagacactgtaagccgtcccagtgggagcccatggcttgcgaagcaagtgtaaccatgttgaggcccgatcgtgcccaagtagcccaagccgaatccctcgggttgaagaggcttgacttttttttaaaaaatatatatacttgagattaaaaaaaatattacttgacttcccatcataagaatccgttttccattcacatagattaaaatgtgacaatccctggttacgaaccaaacgctatctaacttgtggagtttttctagcattgttataatggccaagaattctagattttagacatctcagatgatcatgcctagtggttaggtggttaaaaaagacatcaatgttatccacattcatgtataccaactgcaattaatacttgagatttttttcctctatttttatggattcagttagcacgtagtagaagtggacccttaaacctttttcttcttgtaattaaagtagaagcaggacgagaaacacagagatgttataatgatgtttttgaataaactgattaattagcttgttattattactcttctatgctagatatcccatgtttatgatgaaggccttgtttagttcgaaaaaaaattggtttttcgacactgtagcattttcgtttgataaacattgttcaatcatagagtaactagacttaaaagattggtctcgcgatttacagatgagttgtgcaattaatttttgtttttatgtatatttaatgcaccatgcatgtgccgcaggattcgatgtgatggggaattttgaaaatttttggaaaccccccctttggtttcttttatttataaacaataaaagagagaccaagaagaaatgtgcattgtattattatgtggattgatttattatattatatagataaaagagagatttgaaaaacacaattaaattgtttgagctgattattatcgtaataatgacagtgagtggattgaaacagaccgttcacaaattgcatgcctgaaactgaaaaacggaagggggcatctccaccttcaacaggtcggtccagtccaggtggcaagcagcaaggcaggcaggcgttccgtgacacccgtgtccccgtgccgtgagacgagacgaaagaaaaaaagagtcgcggcggcggcggagtcggagctccactcatcatcaatgcctagggtttgatcctccctccctcactccgcgctccgctcgtgctagccagccagcccccccacccacaacccgccacggcgatggcttcgccgcacccgctcagctgggccgacgcgccgcccttttactaccacgggacgacaccccagccggcacccgactcctcctccgacggggccgggccgcgctcgctctggatcggcggcctgctgcactggatggacgaggactacctctacgcctgcttcaccacctcgcccgaggtccgtcccgccccccgacttgctgtttgttcgatcatcatcagtttggtgctggggtttttcatgtcgctgcggcaatatactactagtactttaacccaagccccaggattgtggcctaatcgtctcaaagccactggattgattgatttgttcgtttatttaatggccgtcgctttcctcatgggtgtcgtgcactgcacacatatattcatatatgctcagttccagtctagttttgtgccaaccatgtgacccgtcatcaatttcccccatttaggccttgtttggatgtagtcggattcacgtcaatccacacgtgttgaggtggattggaatggaacttgaactaaattccaccctaatccacaccaacacacatggattaaagtgaatccgacaacatccaaacaaggccttatatgtaactgattcattaatatactactactgccactccatctctattgtaattgtaattacctccttattactactgtactcgtactatcatctatcgcgcctgcccaaatgggagtattatcctcccctgttttttcctttcgttgtgaaaccaatatccttaatctcagcattgccattgatggtatgcactgcagtagcacctagattgctattagtgttccacctatgtttcctcattattatccctatcatgactcccaatttccacttgttccctcaacatctttggtttgtgtgatgcagcttctttccgttgtcatcagacggagcaagcagactgggcaatcagagggttttggctttctcaattttgctgaccataccaccgctgctcagattctcaagtcttacaatggtcacaagatgcctaactctgttcaagatttcaagctcaactgggccactcaacaacctgctcccgacaaacttcctgatccacatttcaagctcgacccggccatgcagcaggatgtgcctcagaggcacgacgacgataattcctcatctgagcatttcatatttgttggggacttggcctatgatgtcacagaatacatgctacaccatctgttcaagacccgctacgcatcagtgaagagggcgaaaattatcgttgacaggttcactggtcgctcgaaaggctatggctttgttcagtttggagatgtcaatgagcagacacaagcactgacagaaatgaatggagcctactgttctaccaggcctatgcggattggacctgttcccaacaagaaaagtacgtacccgtatgactaagtaatctgtagcttctttgattgattttagctttctttgtttccttgagttgcaatgcctcaagcatatatctttgtgtaggctgttcctctgagttgcttccctccagcattaatatatttttcctgcagtcacatttaagcgtgtgtaaacttttctagcccctagtaagtactagtaaagtaaggattatcagcactgcttgcttaggatgccagtcgagccatttcactctaaggagaggtctttgtgtaccgcattgtcatttcagtttcttttggctcttccttatttcataaagcaacaaaatacagtgtgtgtgtgttgtagggttatttggtcaaaagggcctccatgcaatgatattccagttggtggtttctctccctctctgttgaccgtcaaaattttttttgcctaatgctaagacagtacatacagatattttcggtacacttttgtaatgttgttgcattgcattgtattggtctattgctact

SEQ ID NO: 4045 - DNA, 4117 bp, Sorghum bicolor
atcataacttctccgtacaagttcaagataaattttgtgtcaaaattgtagagatctaaaattttatagctgacaacttttaaatgtgagatgatttatatgtcaaatatttcatataattttttagatcaaatttaatatggttaacaatatcgaataatggagagaattaacattaaagttgcagtacttacaacatttgttatttgagatcacttatacattgtcaaatatacaatctaagattcaaaattgtgtagttattaaaataatatagcattagttatataattattacgtataagtgccgcttggctcaactgatataaaaaaaactagggctatgcatggaggggaagacacccccaagctattgtgcttaacgtagaaaactcatatctcagtgtgagaaacccctcgaactccatgcctcaccggcacaaaagggtctgttactcagtgagagaattaattcacgtacctgtgctttgggaacgcgggataggcaagaggtttttttccataccgtcgaccacaaatttgctattcctgacttttaaaccctaatcacggtggacatcctctagaggcttgaccaactggtctagcaagatcccatttggcaaggttggatttctgttagcctattgctgtcgcggtgcctttttcacgttttcaatttaactatatatcctctggtacaataaggcactacactattggatacagctcgcgtgtatagacatggattgtgcataccatacgtacgtgcatctataaataaggcagcagcactaggctgtttcctcgtacaataacacattcatcaaatatatgaatagctagtaattaaccatctcgatctatccataatccattgcaggatcatgtcttcggttgttggggttccccccgtcgtcgtgtgctccgactccgagcaccgccaacaggtacaggtcgccgccgccgtggacgtggagtcgccgccgcccgtgttgcagttgcgcaggcggtcggcgaactaccagcccaccacctgggactacgactccatcatctcctcgctcagccgccgccctctccctctcggcgccagtgaagaaacagaggaagaagaagccgccgacgacgacgacgacgccaacctcctgcaggtagtggtacgtactacgtctgtctacgtattccttcgttttcaatcgctacgcctggattttattagcatgtcgtcatgtcttgtgtgtgtaatgtactgtgtacttaatatatgcaggtcgctaatggcaacacagatagtatgtataatattagcagcgagacggagttggtccaagtccaagcaagcctcaaggacagcgtcaggcgactgctgctggtgctccaagaggaggacgacgacgacagaagcaggctgatgctgatcaggaccatccatcagctgcagagccttggaatagcctaccatttccaccaagagatcagaggcattctcctgtcactgcaccagcagcagcagcagcatcatcttgacctgcattcagctgcgcttcttttcagaatgctccgaggactgggcattcctgcatccacaggtgggactgtgagttgctttatataggtgtctgaattttatgatgaaatattcttgcacaatcaaatcaactagtataattaaaataacagcttacgatagacaattcatacaactgaaaccaaacaatgacaaaattatattttgtgtaaacaattatattacaaaaaaaaagaaggccaaacacaacatatatatacttcttgcaagttgcaacacacacatcatatatataattgtcatcccgctttgggccttgtttagttcaccctgaaaaccaaaaagttttcaagattttccgtcacatcgaatctttcgatacatgcatgaagcattaaatataaacgaaaataaaaactagttgcacagtaaatcacgagacgaatcttttgatcctagttaatccataattggacaatatttgccacaaacaaacgaaaatgctacggtagcgaaatccaaaatcttttcgtatctaaacaaggccttggtatatttcactatcactgctacagacatgttgatgagtgcattgagagaggaagacgacaaggtaataactgacagcgacggagtgctcgctctgtaccaagcttcatatcttgccttcccgggaccgggagagacggtgctggaccaagcaagagcgttggctatcggcaagcgagctgcaggacgacgtgacgatgacgatgactctgactgcacacgcctgccgttgccgttgccgttgcactggacagctccgaggctgcaggccatgtggtcgctcaagggcaagggcgacgaccataaccataacaagaaggtcgccgtcgtcgatccggccatcctgcagctggctcaggtggacttcaacctggtgcaggctctccaccggcgagagctcgcggaggtgacgaggtggtggaaggagagcggcctgggcgtgggcgactactccttcgccagggaccgcgtggtggagtgcttcttctgcgccgcctgcatcgcgccggagccgcgcctggcggagtgcagggaggtgctagccaagatcggcgccctcctcgtccacctcgacgacatctacgacgtgtacggcactctggatgagctccaggccttcactgacgccattgccgccgccagctgggagaactgccgctgcaaccacctccccgagtacatgaaggccatgtactccgccatctggacaacttcggtcgccgcggcagatcgcgtgctcgagaaacatggatacgacatgcttccactctacaagaaagcggtaataagtaaattaattaacatccatcatgttcatctgcatgctgaaactgaactgatcaatacatgcatgcaacaataatccaatgcatgcagtggcacgagctgtgcaaggcgttcctggtggaagcgcagtggcagcagcagggacacatgcccagcttcgccgagtacgtcagcaacggctgggtcacgtcgacggggcctctcctgctgctccatgcacttcccgcagcaggcattattcccatcacgcagacgcagacgcagacgcagacgcaggccaataatggcgccggcgccggcggcatcgtcgactacccgaggctggtggagctgtcctcgaccatcttccgcctctgcaacgactgcgcgtcgcacgaggccgagtcagagcgaggggacgcgccgtcgtccatcgcctgctgcatggccgagccctggtgcgccggcgaggagcaagcccgcgacgccgtccagggcgtcatcgccgagacctggaaggcgctcaactgggaggtcgtcgtcgtcgccgcctcctcctcctccgggtccgttggtaacgataacgacccctgctgctcatcatcagaaacggcggaaagcatggacgaccatggccaacctgtgcctcaacctcgcccggatcatccactgcatctaccaggacggggacggcatcagttcgccgactcatcgcatgaagcaaatggtcaaggacctgctcttcaaccctatcgtccatcttgtcctctagctacagctagcaaactactagcatgcatgcaacatgcttttgaatggcctgtcctcctctgctcggctcatcaagtgctggtgctctacagtgacaagacatacatcaagtcatatataaatatgtaataatcctaccaagaacatttgagctagcttgcatgcccagggcaggctgagaccaaggtgccacagatgccccctcaaggcagtgtaaccgaaacatctgcatatgtatgcaaaatactggcgcaggcaaaaagaaaagacaaaaaatcaccaaacaatatgtaactacgcctactgcctaaacgtacaacttgtttcattcaggtgttacaagttactactcgctctgaagtctgaacccaagtcatgacagtaatatccatggcacagcaaaactcaggcaaaccaaaacctctgtttcaacaggttcatttaagcggctaaattctcgatgtctctaataacaaacactgtcgtcccaggcatcaaagg

SEQ ID NO: 4046 - DNA, 8638 bp, Sorghum bicolor
acctttgccggtgccgatggcagcagaacaccctccgaggtcgagctcgccgtggccagacaccagggcacctacttcgctggcatcgccaagaagcttaaggtcggagccgcggcccttgatgccgaagcctcagcgtcagcttgatgatattcatttcatcgtgcctcagcctgtctttatttataaataataatcccctaccttattattgatcaagatttattttattgtaaacgttaaaagggaaaaaagatgttaggcgcacgtcataccaagaactactcctacactgtacaagctttggtacttttatttatttgtcattgtttgttaacaagagattggctcacaatcttagtgatagctaggatccatataatatatacacgcacaaagcaggggttatcactgtactaatagtaaaagagataacatatagcctgcattgctaaattttacgatcatctaatgcaataaatgctcctacattaaaccggagagttcgtgtcaaaaaaaaaaatctagtaaaaaatttggaattaaaaaggtaatggcagcatgaaaaaaaagaaaaactctatgagcttgtttgtagcagattaaatggtactcactctattttgacacggctgtaaattgtctgaattcactttctgttccatgcagcacatgaatagacgtaaggtccagatccaaagcatctagtatgggctatgagtctttttttttttttgggcccaagcccgcccgggagccagcgacagggagggagggagggatattctctcgtgttattacctgccccctccgatgcggattgcggatgcgcacctctcttctcttctccttccgaacccaaccaagcagacgaagcacacagccgcgcatcctcctcccctcgcctgccctcccctgcgctgccccgccactccagcatttggattggattggattggattgcccggccgtcgagtggaggaggtggagatccatccgcactccggttccttcccgcccgctgcgctttattggtaacgcacaactgccattccattccattccttcctccattcttaggtgtttcctttttccactacatacatggtacatgcatagtacagacacaacagtggtgagcaatcgattccgaaacccactaactctttattagtaagtagtagaggaggcaccacaggaactgctcaggattttcgtttcttgctgcattgtagcactaaattttactccttttcttttttccatccacccgcccacacatggggtgattgggcaggctattgacttcggacccctccaatgtggagtgcctgtttttcttttcttttcttttttccttccggggcaaaaaagaaaagaaaaaactctttggcgctggtgggttataataacacaaacgggcaagttgacttgtattattattatcatataattaataagtagaacaaacatatatttttttttacaacaataagtaaacagacattggtactactagtatatttgcccactttgcactagttattacttgttgagtaaactcatgataccttgcttcgccacacctgactctgcccacgtgttacagttctggatccttgcttaccaatcgtactaggatgccacttcttcttctaggttttaaggattgcattttctttgctgccaaactctgaaataagtatcgccatcctgaaaccgtaccttgtgtgcttcagaactgtgcaacacataggtattaactaatgacttcatcaatatgaaataagcatcggcattaatgatcaatcatttcctctgatacttccaattttgtataatcagtttttacttttgcacagatttgatattatactatgtaatcattcaggcaagcatcacatcacatcagttcagcttgatgcctgaaggagaagttcagtagcacagcatttacaccaaaacagctggtctgctcgtgcaaaaatatccaggtccagatgggttcagacaagcagattggtagcccgcgcccgctcttgggaaccctcaagatgggcagagtcaggactatcctgacacatacatacccgtaccctcacgagcactccaggcatattatgactgcagtgattattgcctgtctcttttttatatcgtctgacaacatgcatacgctgatacataaattggacaacaatatcaagtggtggtccatgtatgtttgcctcattggcttcttctatttcttctcgtctccttttcttggaagaaccattcagccaagctactcaaattttaaccgttggtacgtatccgcttccagacttcttcaaaaatcaatattcaatccattggctttttcttcattggccagagaaactctatgttaattgttattacaccattcgcatagtaatattgcacaattgcaggtatgttgcttggatttgctttgcatccctgtaccatcttcctagcttccagtcaatgggggttgatatgcgcatgaacctttcacttttcttgacaatttatttctcctcggtccttttcatcattgcctttcatatcatatttattggtctctggtacattgggttggttgcacgcttggcaggaacgaggccaggaatatggacaattctccagaactgtacagtaagttctctagaatgcccattatattctttcctccgtattgatcctagcaagattcatctttttttctttcaggtcatcagtattgcatgctgtgtattctacagtcattgtgggaatcgtgctgtgcacaagagcaaatcttttggtagtagttctgatcccagtttgcttgctttccttaaaaatgaaaacggaagcacctggatatcaaattttctccgtatgaatcagttgaaagatgagatatgttcatcttggtttgctcctgttggatctgcaagtgactatcctattctggcaaaatgggttatttacggggaggtactgcttgcttctcctttgttgcactttcttatggtgacatccatgtttcacttctttgatcatgtttttctccagttagtttgcagtggatcctgtgctggcccatcagatgaaatatctcctttgtactcattgtgggctacatttgttggcctttatatcgctaactttgttgtggagagatcgactgggtatgcctttagtttttcacactgtgcgtactaatattgctgaattagttgttgccacatggaggctactaatgtttctttctgataccttaagttctctctctgaatggttagtaattgtgtaattctaattcttggttatgttccataaatactttcagatgggctcttacccacccgtcaacagatttggaggatgagaagctgaagaggcatatgaaaccagatttcctggacatggtaccttggtattcagggtaggcccgtctacaactttaactacatcaagctagttgaaaccaacaaaaaagatctgacatgttgaatttatatttacacaggacatcagctgatttattcaagacagcatttgatcttatggtctctgtgactctttttgtcgggcgatttgacatgcgcatgatgcaggtaaatttccaatttccagctttgttatctgtgtctgcacatttttgtgtcaaattattctttttctcaaactactttttacatccttctgtaggctgcaatgaaaggaccaacagacaatacttcaaatgatgacctattgtatgactacttcaatgaaagggaagacctttggtttgactttgttgcagacaccggtgatggagggaattcgtcatatacagttgcccggctgttagcccaaccatctattaggactgttatcggtggctctatgcatactcttccacgtgggaacttacttattatcggcggagatcttgcgtaagactgtaccatatttaaccaaacctggttcttctctgcagtcaatctacttgtgcatatttgcaaagcatttcttgtctgcttttgcttggttattaggaacacatgattcacttcttcctaatacctttggaattatatgtaactaagttctaactgagtgttggaatatctagttagtctggcttgagttttcgtcctattttgaaaatgctttattgatctctgtgcgccattatattttgcatattgttttctgactgaaaggttattctggttgcctctgtatgattcaagcaacagtacatgtggataagattacatgcttctttttcaggaggaaaatctgatattattttagatataggattctttgtgcctttggcattctccgttggctccatacagcttaaacttttctagtttatgattcctaatacttgatggcctgtagtcactagatatcatctcatatcacttgcatgctgagatctgtatctttactgaatattgcccatacatatggcataatctataaactagatatgacttagtccattactccattgcattagtgcatcatagtcatagatctgtcgtttttcaatttgcaggtacccaaacccttcatcatttacatatgagaggcgcttctttaggccttttgagtatgctctacagcctccaccttggtacagggatgaacatatagctttggataagcctgagcttcctcctggtgtatcaaagatgactgaatatgatgggccacagtgtttcataattcctggaaaccatggtttgtaaacattcttgattaactaatgatatctcatattattttctttcttgtgtacttggtcaatgatgtaaggaatacacaatgcatgtttgtgttttgttcctttcccaatttctgatacttttttttataacagactggtttgatgggcttcatacttttatgagatatatatgtcataaaagctggttaggtggatggtttctgcctcagaagaagagttattttgcattgcatcttcccaagggttggtggatatttggtcttgatttatctctccatggcgatgttgatgtgtaccaattcaagttctttgctgatgtttgtcggaataaggtgcatttttctttgcttgctcatccttttttcttttaaacgagtttcatttccttatttttggtttcacatgggacaacatgcattagtaattgcttcaagtcttcaaccatgtatgccggctaatatttacatgtacataaacacaaagagacttgttgcaaattctttgtagtcttaggctgataggctcttagccccttttgctttctagttggaaggaatccctcttacctttccagagtatctcttggaacttggaagttgcaggtaatatttccagatttaattgattgacttcaatactaaagctgtgcaggttggagagaatgattctgtgattgtagtaacacatgagccaaactggcttcttgattggtattggaatgagactacaggcaagaatgtatcacatttaattcaggaatacctgaaaggaagatgtaaacttcgcatggcaggggatttacaccattttatgaggcactctgccactcaatcagaaaaaactaattttgtgcaacacttacttgtcaatggatgtggtggcgcctttttgcacccaacacatgttttcagaaactttgagaggttctctggaaccacctatgaatgcaaggcagcttatccatcttatgatgagtctagtggggtatgtttttttcctatgttgatgaagtaattcttgcttatttagttcagtgatcagcttaagaagctttgtgtactatactatcaattgtgagatgagcacgatctaatttactaaattcacagattgcattgggtaacatattgaagttccgcaaaaagaattggcagtttgacatcattggtggttttatatacttcatactggtgttttcaatgttcccgcaggttagttgcagattctcaaaatggccattttatttgaaagattatcctttgtcgcacatttgaattagtagtaactgtggaggttagttgctaatagtaatcttgagcctcagtttttctcctctgatttttctgaaatcaaaatctggaagcattttttcatagtaaaattgttctcactttcatcttaaaaaaactgagctccacttcattaaatgtctctctaataaattatctaatcatctcttgaagaatttagaactttgccaacacatctgtaaaatattcatgtaagaagatgaacaaccgacaacgtcaaagggtttcaattcatccaagaagggctaaagaactgagaatagagcatttagtcatcatcagttggactgtaccaatcggccaccactagcaaatttattcccagttttgtaaactaagtagtacttgcacctttcttgcttctgtgggctgacctctgttatggatatggatttattttaatttgcttatttcttccttttctttttgaagaatgttagtaattactgtaaatcttgaagtatgtttgttgaccaaaagttagctggttggtactggacatgtcatattctttgtaccagcctcagatcaatactttgcatcacataaatcatccattaccctttatggtctcttgatttgtattcatattgctactaccacttggaaggtcaaattgaccaacatatcgatttgtattcatattcttgattttatttttatttgttccagtgtaatcttgttcatatcttaaatgaagaaacttggtctgggcgtctgaaaagcttctcaggcacaatatggagtgctttgctttatatttttgagcactcttatgtctcttcagtaggaagtcttactttactgatggcctcatattcattcgtaccatccaaactatcaaggaggagaagagctattataggcggcctccatgttttggcccatttaactgcagcgctacttttaatgttgctgctggagttgggcattgaaatttgtattcgtaatcatttattggcaacttcaggtatgccatgccatagtggtgcttcctgaattcttaccataggtgatgggtcaaaatcctagtgaaagctttattacaaatatttttttttgtaggttatcacactttgtatgaatggtatcgatccatggaaagtgagcattttccagatcctactggtcttcgtgctcgtttggagcaatggactctgggactgtacccagcatgtataaaataccttatgtcagcctttgacgtccctgaggtaataaattttttttttgggaaatgttacagtgtgcttgtctggacattccttgaggaatggatctggtggaattaatgatgatctactgtaaaaaaaaaattatatgtggaatggaaaagaactagtcatctaacttcacaaattcagaatttaactgtgctgaaaatgtgatgcattacactacagaagattaattttttctagattttgtgcatattactgtctcctttccaatccatgttttgtagatttgagcaagcatctaacagcttatacctttgctcaggtcatggctgtgacaagaataaatatatgcaagaacggaatgatgtctctttcacgtagtgttctgatcatgtactatacttctgtgtttatctatttctggattttctcgaccccagttgtttctctcatatttggtagctacctgtacatctgcatcaactggttccacatacactttgatgaagccttctcatcactgcgcattgcaaactacaaatctttcacaaggtttcatattaagaaggatggtgatctggaaatatttactcttgcagttgacaaggtaacagatcagcctgcgttcctttcctcccatctgctcataactttgtcgccttatgtaattgcacatttgtaacaaaatgtttctttgctccactgaataaacaggtcccaaagggctggaagttggatccgaggtgggaatcagagggaagagggcctcatcagctcagccatgaccggaagcatccaagcaagtggaggtcagcctcatcaccggaccctgtgagatctgtacgggttgtcgaccatttcaccattgaaagaacaagaacctcagatacggagccctcttcctgattctgcagcccttgctgttccgaggagttgctactgctagctagaaaaattaacaataactagcttcatcacacactgttgtttttgtttctgatgatccagccaacttaggtggacctgggttatccacccttgttggcgtccttgctttactgacctcacctgcagcattgtaatctgtatgtatagaaagaaaattcacctgctgcctactgcttgtattcaatcaaaggaatgtaacaaaaaaatagaactagagtgttacagaagaatgttttgagaaagcaaatggatgaatcgattcttcgatttactaaagattggttctattctgttttctcctttttggcttgttgtccaggaaccatgtgatgatccagcctggtacattggcctgtcatgatcggtggtgttttgttttgttttgtttttgtttttgttttttgttttaataagggatcgcttgttcttgttgggagatccatcaaaacaggccgaaa

SEQ ID NO: 4047 - DNA, 5000 bp, Sorghum bicolor
attatgaaagtatttcttatggtgaatatctgcaaatataaatctggtgtcgttagcttatgtaaatttttaaaattgatagtcaaagataaaaatatttaatttgggacaaaactaatacagaacatgtaaaaaacatagggcatagtagatagtgaagtagtggtaatggtatataggcacaaaagcttgttagtagcttcttaaaaaaagccacatggtttcacaacatgtgaagtatatattatgaaagtgtttcttatagtgaatatctaggaatataaatcttgtgttgttaacttatataaaattttgaaattaattgtcaaagataaatacatttaattttgggacaaaactaatacaacatgtaaaaaaacattgggagtggtggatagtgaactagtggtaatggtataaaggcacaaaagcttgttagtagcttctttaatgatacaaatacaccaactataaacatccaagagagatgagagacctgtgtgcatgataggaggaaagagggggcagttattagttaggcttggccatcatgtgaggcgagcgagccgaggagatgccgggccatctgctcctttgtttccgacaatgccactgaagtttagcagcaacgtgtagcatcactcatcagtgtgcctttacgacgttcgactgatcatctactttcttggctggctccactccacacacatatctatctcatatctcacaaagccaccatggccatgtgatgagctcccttttgctttatttgcatattgctttgcttgctcatggtcatgggcagcaacttccctgctggaacgcccactcttctctccaagtctttaccagtcaagcttcttttcgtttctcagggtgctcccctgcttgccaacctatatatatctctgttcgtcgtcctcctctaatttacagcagagcaagtaaaggaaacacgtctccttgtgttgcatttgcattttcatgtctctctgagcacgcaaatgcaggctcacgtgaagttggatccagatctccgaagtgtgagattttccatcacatcgaatttttgtacacatgcatgaaatattaaatataaacgaaaataaaaattaattgcacagtttgtctataatttacgagacgaatcttttgaacctagttactctgtaattggataatatttgtcacatacaaacaaatgctacagtaaccaaaaaaacaaaaaaaaaatcacaaactgaaccaggcctgagtgctcgccatatcaaaggtggtgactgaagcaccgatacatgctttggctcaagcctcatcgagggctgcattgtagcaaagggtactttctatccacctttgcctctcgtggcctcgtctggccgactggccacaccatgccacgctaaccaattattgcctccctattacaccctctattaagagcatgcaaaataattggtttatagctagacatatgctgatgtggaggagataagattcgtacccaatctaatatacagctagtctgatttagagaaaaagtttcatgattatattctttattggtcaaactgagttgagattattatcatatcttaaatcggttaacaaagttgttattttttcaactaacttcatggcaatttttgattgtcacttataaaaaacttttgaccgaacagatttctattttatatcataatatggtaccgtttcatcatataccagtttcatctccaggttagaaaaccatttcacgtggaagattgaatagaagatagcagccagtagcaaagatggtcaaggtttcatggaaaaaaaaaaaagacgaaggtccaccacaagacctcaatgggcctctaacgggttcctcagatacccatccaaatcgacatgggctgggcccatcgcgagagacagcccaatacccgtcccaatccgcatcccgtcggccgtcgccctcagataaaaatctggcagaacccgagctgtagaaccctagccttgcggtcgcggatccgtcctgcaaaaatctcctcccccaacttctccgccggtgagcagcgaccagcgtgttcctcctagattcagatctcttcaaaatttatcagctctatatgctctttttcttttcctgatctcttcttcttgctacttctgttactggtttctacaggatccctgaaagattcccggagatgtcggactccgaggagcaccacttcgagtccaaggccgacgccggcgcctccaagacgtacccgcagcaggccggcaccatccgcaagaacggctacatcgtcatcaagaaccgtccctgcaaggtgagattcaccatcccccactctgtcgcgtgtgtgttaaggcatgcagttgatctcatggcttgttctgttgtttggggggaaaataaatgctttcctgttgggaagccttttctcattaccatagcgatttctcagctctgaaacttgcggttagcttgtggatttagagacgcttcaagtgcgtgctggatccgttgttgggggaaaaaatgctttcctgctggaagcaccttttcttatccccgtagcgatttctgagacctgaaacttgcggttagttagagacgcttaaagtgctagatctgctacagccacccgcgagaggacttttgctgcagatgtggatagatatctatatcattgtcttacagtgctgctctgtcggataaagatttgttcttttgcttggtgcgtttagtaaggtttcaattttgcaacaatttccatctggaccatggggctatttccctgtggtggttctgtatgtctggttctctgaatatgtctacacaatttttgtacttaatgttgatgagtgaagaactagacagccttgtggatcagcaagctatccatgtcaaaatatcgcatagttgtccccaagagatgtttcgtttgatatttatttatgagacaataaggtcctgcaaggttggtgagaaagcaaacttaaactagggattgttgtttcgttgttctgaatgttatggttggttctacatacaacagtggttaaactagttttttttatggctcctgggaactttccatccacatatacaacggtggttaaactagttctttttttttttggctcctggcaccttttcatccacatatacatctgagttcttttttgctcccgaaacttttgcatccacataattgctatttgtagcagcgtccatcattgatgagtttttgtttggaggtatcatccgtttgtgttggtatgagttgataggtgcgattcaactttcctgtcattagtttctagcttgattatacatgttgtcattactgggcttcaatatttttcttactatcctatgttggggatgataactagaatgccatttttattacttcatgtcctttctggcttgattctctcattagatttgtgagctcttttagcatgatactcatgtttgatcaagcaagccttgatctgacaataattttggtatttgctttgttaggttgttgaggtctccacttccaagactgggaagcatggccatgccaagtgccactttgttggaattgacattttcactggaaagaagcttgaggatattgttccttcttctcacaactgtgacgtaagctatcagtatcactcctcgtgttgctcgttcagttaagtgcacagaacaaaatttcgtaaccttttgtctcatgcctgcattgtacaggttccacatgttaaccgtgttgagtatcagctgattgacatttctgaagatggatttgtgcgtttgcttccattccaacctggcctttctgtctttccattcaactttgtctttttggcaataccttctagtttataacaatcgatgagggcattttacaggtcagccttttgactgagagtggcaacactaaggatgacaccaagcttcccagtgatgaagctctgcaagcccaggtcagttagccacacaagcctattgcctctaccgcgctatcccaaatctcttatacactttacttggcatctgcagatcaagagtggatatgatgaaggaaaggacatcctcctgaccgtgatgtctgccatgggcgaggaacagatctgtgctgtcaaggagattgggggcaagaactaaagctgctgcttcgctccggctgtttgtgggcaatacctgttgtcttgtgcttggagttgacaagccaagttgagatacatacataggcgtttaagttatctgtggttttgggtttacctggaatgtgttgagatggtgcgagtacttgtggtacttggttattgatctctggtatctttttgaactgagtaatggtgtaactctggtagtgcatcaatgggaattacaatatatatttgttaaattatttgatttggctttggccgccgtgttgattgtggtgtgccctggaggtgaatactgcagcaaatgaagcacacaaaaacttttgtggatgcaattcagttggttgctttgctttctgtcatttctcaaatgatgatgaatgtgtctgccacttctacactctgttatgtaaatctgtattttataaaactggacattacctagttagttgtgcaaatttcatccataaattaagtatttttctcactatattttaaaacttaaattttactattttatttaagttccaaacaagaccccgtcctctgttaaccgatgcatttggcgcctttcacggcagctcagtgaagataagctacgggccactcagcttatcccatgtccaccgccgccgcagccgccgtgctcccctccccgtcatcgaccagacacccgtccggcggtgtccagcatggcgtcctcacggcggaccgcgcggcggcgctactggcgggctgcgcgtccgcgcgccgcgcctccgagctccacgccgcggcggtgcgcgccggcgtggaccaggacaaagccgtggacttccgtctccagcgcgcgt

SEQ ID NO: 4048 - DNA, 2929 bp, Sorghum bicolor
acaaagccatggatcatccttgaaaccaacagcttccacctaaatataattttgccacccgagactagccaagttctgtcttgcgcactcatggatcgtccaatttcaagaacgtatcatccatgaattccaacaattagaaactttcaccaatgtgttgtccgatcatcaccatggaccgtccaagatattgctgggtcagcttccatcaatgttgtcaatagagcactagcactatactacatacatgctatattggcttaaacctcaatcaagtaacatcaatgcatatcatatcttgtcatttactcttatgcattgtattcatcaagtatcatatatatacattaggtgatgagcgagggctacaaggaggttgttgtggaagaggcttaggaggtaaagatcttcgatgaaccaccatctgaatgcaaggtaggccctatgcatccctatctttttttgctaatgaattatgattacttagttcattgttatgttagtgctatatgtctatactacctatgaattcctaatcgatctttcataccttgataatactgcaccacttcatcattgattgcttactttccttcatccgataactcatacttaatttgcttagagagtagaaattgagatgatgatgggtttctcattgctcgtgtgttatagggcatgcttgtccactaaagcaacataattgggttatgatctaaaacttggccaatgaggttattaatgatgatgagttgttggcaaggggttggatcatggcaagaccggtgaaggtattgaatgatatagcttgctaaccaattaaggatagtgtatccgtggtagtaagccatgaacataattatacaaaccacttgtcatgaatggggtgacaagccaagtatctaattgtgaccagtctacccgtggattcagcacaaaggtgatgttgtgtagatgagatgccattacctgtgtacctcacacaccgttcattggcacccacagcctgattggggaaaggttgaggcattgaggtatgccttatgtaccgattggtcatataggtgacatcccttgcctttggtggagttaatgtgtacccctctgcatagtctctttattcgaaagttataagttcaagttctgtacttctagctacatacggactagagttgaattgaaacaaggactcatggaaggttgagatcctcatgctagttgctcattttaattgaaccatgctatgcttgtcaaatgcgtagtatatgttccacatttatgattcttgtataaaatgcttttagcagtttacaattatttctacaggtagacaaggacagatatttaatatgttatgatacaaagacaaataaaagatctcaaaagtaacaagttacttgtactagttggtggtacaagcgtgttgcctgaaaacatcttaatatccaggcacctaaaaatataggagaagtcataaagataaaaatttgcatcacctcataaaggatctctgaatagtaacggtaagacagcttatctaagaacgtggaacgcacaaggcatgcaagagtgccctgcatagcacgatccgtagttgacggcttgacacgttcacacacgttctgagagagaggccagccggccggatcgacgacgatatggtgcgtgcttcttgatagtataataatataactaatatatcttttttgtcatatgaaataactttgtttatctatgtctagctgatcgcaatatgcctctatcttgctgacaacgacttaaacacaccatgagctccatcggcattatctttttttgtcacagttttacactgcttctgtgtctgtacaagctgcgtgcctatatatatgaactgttgctccatctcccatcacacaaaccacttcatccctattaaaagctgccagctacattttgcaacaacatattcctggtcgctactcacagctccatttgtaaaagcagatagcaaagaaacaatggcgtcccaggccatcgagtgccaccgtgcgggtgcagagatcgtcaccggagacgccacgtgcaggaagaagtctgtggagctgctggagcagctcggcgtccccaatggcctccttccactggaggacatccaggagtttggatacaaccgcgactcaggcttcatttggctgctgcagaggaagaagctggagcacaccttcaagaaggtcaagaagacggtgtcgtacgccaccgaggtcacggcgttcgtccagaagggtaagttgtcgaagatcactggcattaaggtcaaggagctgatgctctggattagcatcatcgagatgtacatcccagaggcctcgctggagaaggtcaccttcaagtccagcaacggcctctccaggacccttgatgccgctgcctttgcgctcggggaatgagagatctccaaaaatgagacagaaaattatgggcacgtcaaatcctcagtcggtttaatgctaaaaacaaccatgctctatgatcttgtatcatctactggaaacaataaatctgtactgtatgttttttttctccttttccctttctcggaataatgatattttttctcttttccctttttctttatggactctgctaattcaatactagcacctcccatgctatttcgctagcccacggacatcgaaagccaaggcaaatacgaggtgttccttgctggccagtgcccagggggctacggccgctatggctatgtgtctactgcccgtggtggggaaccactcatgttccacaaacaggtgtctctatcatacattatagtcgtgtctttaatacatgccaataataaatgggatgtctcctttgtgcacatgtgacatagtgacgatgagtctttctgctgtgggaatcctttcatttgatttaattattggagact

SEQ ID NO: 4049 - DNA, 3814 bp, Sorghum bicolor
cttgatcctaattgctgcaactaaatttaactaaacctgaacctgaaactaaaactgaaattttaactcaatgtatcacctgctccttcatcttcagcaacggcatttgttgatgcacctgaagacacatgcacgccatctccagcatcaattactggcactgcatttgtatgattcacttttagactaatcacactgctagaacagtagtatgattcacttaaaattagaaaattaaaaatattaacatgtcatcacaggacctatgcaaatgcagtgaagcacaacaagcaatctcctatatatatatcaaactcaccatgttgcactatctcatagcactggctaattgggatccttccagcttgggtctcatgaagtgtcaacttcttggactgttatgttatgaagtgcagtatttctatttcactgtatattggttactgaaacttttagctgatcaagaaatctatgtaaaggtattttttcttaaatttacgatagaacataaactaattgctcgctaaatcgtctagacacaataatcacaaattttgcaatacccaacctgcatacttatgagcatgaataaaattaccagggaaatctttctaatcgggtagacatgaatcaaatatttagcaaaaattaccgaacaatatcacaaaaatacaaagccatgaggtaccagataccccactccttttcacagccaccaacaagaatgatagagtgcatgctcaccacgcttcggctgagtgaggtatggagataggctcggtggcacgacgcttctccatggatgctggagtatggaggaggatacggcagctcggtcaccccaagatctacgagatttttccctgctaggaggacggggctgaggtggaggtggaggtgctgctccgagatgtggatcttgcggcggtggcggcacgatcgcgattcgcgagagatgcatcgccgggaaccaggagatgcacaccagttgccggccaccgggagatgcacgacaagagcgatgcgtcgaccatgagccgccggggtgatggcgacggtggcggcggcggccgccccctcgtgagtcgtcgagcgagcgacggggtcagggaagaggaaacgctcccggccgcatgactcctggatttcttccgcgtggaaaatgaagggaaacgggctgctgtccccgcgtgggtgtgcttccaaagagcgcgacagattgtggcagggaaaatcgtcgcgtggtttctcggcgcggggaaatcacggggaaccctccggaatcccgtgctgccaaaggagccctgagcaggatgacagggccggagaggagagggggcaaggggccagaggcggtggtgggccaagcccaagtgcatggacaccgtgatccgacggaagcgacataggatgggccggcagcggcacaacaccattcggcttgatttgatttgatttggcccatgaatgaatgaagatgcgaatccaatccaatccaatcctcctcctcctcctccatatcatcctcctcctctgctctcctcctcctccccagcaaggcgaaggctgaagagctcgggcagatggtgacgcccctgcaggtgtgctgctgcctcccgccaccgccaccgccaccgcccgacgccaagagcaggggccacacaagagtcgcccgaaggtacggtaacttgtatgcatgtactcctgtacaatccatttccaaatcttcgccctccacattttttttattattctattctatctactactcacatatactcctcctggccacgtcagtaatacaagcttttattttggccatccgatgcgagatcaacagcccacccgaccgtttctccaccaaaacaaaataactatcccctctttcttccctcgtgccggtcgacagcgcccgcgtgcggtgcggcggcgctccgtcgcctaaacacacacaacaccgcccacgccacgcgaaaaccatggggagaggggccgggccttcctcctggctcgccgccgtggccactgccgcaacaccaagcttccgcgccgcccacgccctcctcctcacctccggccacctctcctcccgcgcctccgccaactccctcctccgcgccgccccatccccctccgcctgcgcgctcatcctacgcctccttctcctccaccgcttccgacccgaccacatctccctctccttctccctccactcctgcgcccgcgccgtcaccaccacccgcaacccgctcaccgccctcttccactcgctcgccctcaggctcggccacgcccgcgacgtctacgtcgccaacgccgccatctcttcctacttcgccgcctccgacgtcgcctctgccgaccgcctcttcgccgagctctccgctgacgacgtcgccgacgtcgtcacctggaccaccatggtcaccggccatgccaacgccaccaatctccagcgggcgaggcacttcttcgacgccatgcccgaccgcaacgtcgtttcctggaacgccatgctgggcgcctacgccagcgccggaatgctgtcccaggcgcgggacctgttcgacgcgatgcctcaaaggaacgccgccacgtggagctctatgctcactgggctcgtcctgtcgggacgctgcggggaggcgctcagggtgttccatgacatggtccgaagcggtgccgtgcccaatgagcccgcactggttagtgtggtctccgcgtgcgcgcagctgcggtctcttgagtacggcgcgtgggtgcacggatacgccgagcaggagctgcagggggcgatgagtgtcatcctcgcctccgccatcatcgacatgtacgggaaatgtgggggtatccacagtgccgtcagggtattcgccgcgatgcccgtgagaaacgtctactcctggaacgcaatgatcgctgggctcgcgatgaatggtggcgagagacaggccctgtcgctcttatggaagatgcagatggctggtgttcgaccgaatgacataactttcatcgggttgctcagcgcttgctcccactctggacttgtgaatgagggccgccggttgtttgacagtatgatcgaggactttgggatacagccagtccaacatcattacggtcttatggttgatttgattggccgctctggtcgtgttaaggaggccctatttttcgtcaagagcatgcctgtggaacctcaccctggcttatggggcgcactagctagcgcctgcaagatgcatggtgaggttgagcttggtgaggaggttgccaagaagctcattgagctggagcctcggcatggcagccgatacatcctcctgtcaaacttgtatggctctgcaaatcgatgggatgacatggcctttgtgcgcaagatcctcaaaaggcgcaaggtgcccaagggcactggcaatgcagtggttggaatgacattgacatccagtatgtcgaatgattgagtgcactctcgataaggatgtataaaaatttaagggcattaggatttttgcaccggttggaccggctaccgaggagcaacatgagatcgaggagcctagatgatgatagggctgaaatagaaatgttcagttgatatgtcatcctatgcctaattgtttaaacagcactcagtaattgcacatacagggagtggaagtgcaaagaactagcaagaagtgcagactggtgcttgaatactgaccaaaggtggctggaactcaaagaactgagtgttgtctagtatgattagttcagagttaggcgattcagttaatgcaaggatgtttcagaatagttacttgacctcttt

SEQ ID NO: 4050 - DNA, 4063 bp, Sorghum bicolor
tgcatttgtttgttaatcaaaaatttcaaagaggtttcaagattgccttgtcacatcaaatcttgcgacacatgcatgaaccattaaatatagataaaaataaaaactaattacacagtttgactataaatcacgagacgaatatcttttgaccttagttagtctatgattggacaatatttaccacaaacaaacgaaagtactacagtagcgaaatctaaatttttttcacatctaaacaaggccttagtaacattttgcccaaatttaactttatccagagacgctagctgcatgcatgcatgtggccagcgcgcgacggcggccaagtccaaattattgcacgccctgtaggcctgtacttgtagtagccgaccaacgatcccacgaacacggtacgcttggcatctgatgtcggccgtatattatgtaaaataaagcaagatccatcatctgcgtgcatctggtctcgtgtatgtaggacagtagacttggacgagcgaggttggcatggcatccatccacgccgatgggaccggcgttgtctgctcgtgtcgtcaagacatttcctggaaaaagggcaggagaaagcagtggagagagcgagcgtgaggtgacccatgcatcgatgtatatatacacacacactgacgacgacggcgaaggcgaacaccatcttctccggccaatacaacaccgcgccggctgagacgcccagctccgattcactgctcgcctcgcctctccgccggccgatctgctccgctgcctccgatcgagctgcaaacgaccaaggtaagcagtggccgtgagcgacgtccccacccttttctctcctcattccctccgatcactgagtaccaccctgtctctcgtctctgttttgtctgtctactctctagccaagaacaccaatcggccccccagcccaaaagcagtaaaccaccacacatgcatgcaaccaaggtccaaaattcgaatatcctgcctccaaactatgattcactaaattcatataaattcaaacttggtccatcaatatctgtttcataagttttagttttataagctcatctgactgaaattaattaattttgagtgtgtttatgtttatactgtatttctttgtttgcacattttttaacctttccacgctttttaagtgaaagagtaatcaaagagcagaaggaggatataggccagcttgaaacctggagtgtgtgtgacttcgagcttacaaaatactgtctatatgttttttttcgaaaggcgaaaatactgtctatatgtagacagtatttttatttactagctaaaacatgcactggatagccaccgctagctagcttgactgttgtaccttaattgccttggatgacctaggtttttacttgtgggacatgattaaataatgctttgtcttttggcgattatcatattactgctttgcaaaggaccagtaaacaaacatacctctattaaatgttttataaatctcaaaccaggagatttggacgtcactgaattctgtatttacggtcaatagtttctgacctaggagaatagtttctgacctaggagacaggttcccttttccactaggagatttggacgtcactgaattctatatttaggtgcacaccaattcctcgacacccgtctctatcatttttaacctgtctcctccatgatcatagcctgtctaacttgtgatgctcgctatctttaatatactttcatataacatcacagaagcatttaacatccagaatagctctctatagtaaattaacagggtaaaactgccacagctttcatgcagctgtttaaatttttccttgtggtaaaaagttcatatatccttttcctgaaaacaaataaaaggtacttattcatatatctgaaaatgtttcatattgctttctcctgagcagggaacgagtgctacatattcttgactcctaatggcggcacaaatggtcagttccgtggttgcccaggagacagttagccaaatcctatctggtctggttgagaggtatacggaatcaaatgatgcaaacagaaaccttgagaggctagagatggcacacatcaggctggaggctgctcttgagacatctgacaagtggcagattactgatgcatctttgctgcgttggcgtaagaagctgaagcgtgtggctcaagagtgtggcgacacactgcacaaatgcaagcaaagaatcgaacaagatcaatgggtggaacaagagctcatgaactgctccctccctagccggattgtgcgtgctaccaagtcattcattttctccactttcggcgacaaaaatgagctgagcagatttatggttcaaaggtttgagtggtttgcagatggagccagtgaatttctgagattcattgaggttggtggcacgccgcgctgtcacatgccattcaagtcccttatcaggaacctctttgcaggcatggagctgcagcataagattgtttggggaaatgagtacccttcttatctgctgtggctggtcccttccatcactccagatcatgggatagaagcctgcctgaaattcatccacaaagatgataatgcaccggagaataacttctttcttggtgcaatgctacagatatctgaaagcacagacatagttgggacagtagtgaactgcctgcagctctttcctctttgtttccagcctataattgaaactatcaagaaagagctcactcagctgcctacccaggacttctcatgggtgccatatgttgatttatggcacagaaaacactgggacaatcttcacagcttctgcacccaatggtttcgtccagatccattgtgttgcaagaagcaacaaggtctgcagattaataagccttgttgcattggtcacccagacatggtaggaattccagatgtttctctggattcagtcattctaatgcatttggagtgtcaagtcccggtatccgagcacaactacaagcagcagaccacaacctcaccatctcgacgcagatgttctacgcagcactactctccatatatgaaagctgggctcctctttaccccccatggttctacgaagcacaggcttcctgaagaaaagaactctgcagtagtgaccgtctacggtgaagagcagcactatgtgcatactgatatcaccttggaccagcttaatgagatcatgctgccaaaggcaacagattacttctacaggaaccccaaagcgacagcgtgccaaatgctttggaagtctaagcatggcactgagtacattgagtttgagaagccaaggatggaggaagagatggcaccatgtgcacggagggtaacttgtaggggaggtagtaggaaaaggaagctggaggcgcaacaagatcaggtacaggtgctggggaactggaatcgcaaggtggcatgtttcctcagttcatgggttgcacatgcgcctgtccggctgcgaggcttgatcctggactggattcagagaggcaaggaaagtcagctgccaggagtgccgccgccgccactgcacctggaaatctgaatctatatatcatgtatatataacttatatttaaccatgtacaataggctccggaaggagattagataatcatgggatttctttttgcttgatgtacttgtctgcaatccatgattgcaacgcgcaacattatcttttatttattttgagttgactggcaataattgtcaatttgatgtcctctaacacctgtgagctatgatggtagttaggtacttcctatgtcttgttttttcgagaaaagtcaaccaattttaaatttaatcaaatatatgcatactagtatatatttgcactttgcagtaaacatactgaaaatattaatgttgatactattttttctaaatgtagtgaaacttgaaattgattgattggctcctacaaattaaggcaaaacatttttttctcacaaccattataaaaattctctttttttctaagaccaagggagtaagagaatttgccaccccatcttagtttttttttcctcctgaggaagc

SEQ ID NO: 4051 - DNA, 8683 bp, Sorghum bicolor
acaaaatgcagtcccttggtccggaggtttgtaacaaattttagaacaaaataaggggcctgacaaaaaaaactaagggatgtttggtttgggtggtaaagtttaatagatactataacagtttcgtcttatttgacaattagtatccagttatagactaattaggcttaaaagattagtctctcaaattactctctagctatgtttttagtttcgtaaatagtctatgtttagtactccatgcatgtgtctaaacatttcatgtgacgacagtaaagtttaacagggcaaaccaaacacgccccgtgctcactaaccaattggtttgattgttttttttaaaaaattgcaaagtacaacatagatacttacgacgcaccagattcaccctatgaatacaagtacgcaaacccttataaacacctcataaggactaagcacgcagattacgagattcacaaattcaccacatgcgcctcgttgtcgacgaagacgtcgtataccgctgaaaacgtaacatcgttaaatcctgaaataaattcaatcttataattaacacttttgctatattccaggtgcctaaattttaaaatggtttcaaacaacacttttgtactaccaattagtaccagtaaattgtcgcttttatgatttgttatttatctttgtgtcataacatataactttttgtccttgtctgactatgaaaataattgtaaattattaaattgtctttgtaacaacgcatattagattttgtcaggtttgtggttttctctaacatgttcttgttattctaaaagcaaaaggttacagatcacatctataatataaaaattgaaacgaaataaaacggtaattttagtataaaatatatgcaataaccgtcatataaaagaaaaaattcagacacctagaatttagcaaatcctataactttgaaccttcactaccttgcatttatggatactcttttttcccttaattttgaccaaatttacaaacaacagattgtattcacatcatattactattattaaaaagttcggggaatatgtgtgtttgatattatatatatttatttattccgattcatagaagctaatattattttctgtagaatttgatcagagtcatatgaatttataaataaagctaaagtgaagataaaaatataataatgatgaacccacaatgcatataggtagattcagtgacgacatacacaactaacgtcgtggcaacgggacaggtgcacctactatactacttgatgctgaaccctaggtctcaccacagcctgcgagtgagtcgtgaacactagtattgcgacttgcttgaagcaaatacacgtatgtatttttttcctcaaatatgttcccaatgttaattatatatttagaaaaaagtcaaactttacaaatttaatcagcaattattcaaattatatacaaattctgatacaaaacttgttgcatgcacttgaactagatcgatccgtggcaaagagcttttaagataaaacattgttttttattagcaaacaacaatatattacaaaattaatagtcaaaaaagtatttcctatgacctttctacatttgaaaaaacatttatcatctatatatagacggaagttttttgttatcttttttttttctgtttaacctagtcatgcatagagctaggctggagcagcagtgtacgtatatatgtagtagtagctatacgtacgtggatctgcatacggatacggcggcatactgagtacgtctgctcctgcagctgggaccgggaggccctcttctccagtgagatttgacgcgagaaaaggggtcgccaccagccagcagccagccaccacattccacagcacagggcagtccgtcgtcgcgcacacctttcccttcccttccccctccccttgctgccgtccccctctccttcccattaatatctagcggcacctccccttccccgtctctctcctcgtcctcgtcctccaactgtgagagaaggctgccgaagccgccgccgccattagtggtgatcggcgaggtttaattacttttgcggtccctcgctagggttccattccatcccatccaccccggccggccgcctgtgtgtcgttccttttcgtccatggatcagagctttgggaatctcggggccggagctggtggtgggagcagcagcgggggctccaactccaaggcggcggtgtcgtcgtcctcgttcctgcagctgccgctgtcgacggcgtcccccgcgtactacggcgcgccgctcgcgctcctgcaccaccacgccgccgccgtcgccgcgggcggccccggcccgtcgtcgtcgcagcagcagcagtcgccgtacgccaccaagcacgccagcaccgccgagatgtcgtcggcggaggccgaggccatcaaggccaagatcgtcgcgcacccgcagtactcggcgctcctcgccgcctacctcgactgccagaaagtactgagcttgagctcccgcaccctggctgctgccatcactggccgccggaaaaatcgcatctttttttttatttcttgatttgtgaagcaagatttgcttaatttgatgcgtaatctatctatatctatccacgcctgtcgcgtcgctcacgctcaccctcacaaacatggtggctatgaaatgacgcacgctttctcttctgtgtgtgattacaggtgggcgcgccgccggacgttctggagaggctgacggccatggcggcgaagctggacgcgcgcccgccgggccgccacgagccgcgcgacccggagctggatcagttcatggtctgtctgtctgtctcggttcccatcccatccccgttcatcgatccacacagcctgcttctgcttgtgcagtgcatcgatttgctgcgactctaaccttgtatctgccaatcacatcacatgctctcccgtcccgtcccgcaggaggcgtactgcaacatgctcgtcaagtaccgggaggagctgacccggcccatcgacgaggccatggagttcctcaagcgggtggaggcgcagctcgactccatctccggcggcggcggctcctcctcctccgcgcgcctctccctcaccggtaagataagttcgccacatcatcggatatcggaatcggaacaacagcagctgccggaccgccgcctcgtacgtcttgctgcttgctcgctcccttcctcttcctcttcctcctctcttgctgctcgtacatggcggtggtacggcggccggcccagcccggtgtttttatatatactggagttggaacaggcttgccgcattgggtatggttgattctggatagtgggggtggttgctctgggtcattgccattgtgagcaaacctgacctggccctggccgcccgctctcctcgcccttccctctccggccattactttaatcacctcctcctaattaaaaaaatcgattaaccatcatcaatcagataagccccagcacagaaccacagcacgagctaattgtctaatcataaaagcatttagcgacgggattagtcactaagtatcatcagcttagcttttggttggcatcgagggcacagtgaggcgccgtgtcgcatggccgggcctccacctctcgttcctcgccattgtttaattaattaatcagcctctccgcttgcgttatcctattattattattattacctgatggatagatccagcacaagctataagcttgctttcagatgagcatgagctcgtcggcagatgatacgcctccttgccctttttttttcaattcaacagaggcccatgacatgacgtttgacaagtgacagcatgcttgcttatgtgttaattaatttgcttgcttgtgatgttaattaatttagggttccaaggcaggagaatccgtctgtttcgtttcatctctgcactggagtccgctccttgatcgatgcaaaactgtgtagtattttttgtgtgtagagttgctgcgcagctgctactaggtagtcgtagctagcagcatcccatctctctcacccgtcccatacatcccttcttttcttgcagctctactcctagattagagacagatcagagatgcattgggaaatggtgccatggctgactatccaattcttctttcacctgtctcaactgtagcaacattgctggtagttctggcctgtagcacgtactccagtactcctcctgcaagcctgtgagagagagatggtcgccggaacgtgtcttccggggggatgctgccggccggcctgttttgcagctctggacgtgcagcttctacagtgcatttgcagatgtattttaacaccgggaccaggggcttggtgggggggatttgtctaactgttctactacgccactgtggctgtgccaagctgtgtacaggaacattggctgatctagatcgtcttatgtgggttgtagtacgtgttcagatgttttccgcaacagaaaccaccagaaaatcaccacatccagaaactgctatatgttctcagcctcagccattgatgatttagtttaggtacacctgtttttgtattgtgaaatggtaggtttgtgttggttttttgttcatcatacgttgtagtgtcagataattaatgaggtcaatttaagattactgcatttgatctggctaaacaggcggaggaaatcatccactgcagtagaagactaggttcaaatttgccgtgtatagttcaagcatacaactttgactatatatttcttgtaacaataagtcatggtttagttttgctctgatttttcaacagcaaaagcgataaaaaatcaggatcattttcctgtgtgtgactagttcagatactctaacatgaagccagcaattattatcatcaaagattaccaaagcttgggtgtgcactttttcaaaagtgccaaagtgtatcttctatacaaattcatgtagttaatattagatgctgaaataggaatgttctggttcttccataaagtttcagccttttccaccgtttctgttttaaccattcgaataaatagtagatcttatcttgtgcatctgataatgcatttttttgacgctacagatgtttcactttttattcaaaagttgaaaagtaaccaatcctatcccaaaaataccattcccagatggagggttgtttttatgcattccttttctatatagaagtattgttggcaggattaatcattttctactcattcagcaagaaagtgtattagctattctgttaaataattgcttgttttttattggctactccctccctcttgaagtatacaggatcgaagtttgtcctaagtatcataagtttgatcaaattagcatatataattggatacactaaaaaaaatatagtttcataatttacctctttttttttcccgaaaggcagcaaaagtataatttacctctttgatgtgataagtattgatggtctttgtatttttggaaattaggatagtctgactttggacaaaatttgatcccatactttttaggatgtagcgagtattggtcatcctgcacgcaaggtataaaattagcaagtgataattcgggctctggctttactttttgtatggatttatgtatgaaactagcttaagaacgttgataaatgcatacatatgtattgaagtataagtgcactgcccacctttcccacatggcttaggaatttaggtctaattggttggtggtacatgcagatagtatatatatctgcctcatttagaggtttctggcaaagtttcactgccattttatcagaacacaagccatgttttgtatcttattatgatctcaacgctgaattaaaagctaatagtttatgcaaaccaaattaattggtctataagctttgcccttgtttccctgctatcttgacgcggtgtaaaaaatgttaatgctagctcaggttttataattattgtgatgcatatgaaaaaaagagactttagatgtacaaaaaaataaatagtatccatgggaaaaatgtgtggcagaaccacagctattctactaaacatacactgcgtacaattttttatagttcccaccagttgaaagaacacaagatattcctttctgtaaagtatctttcctgtttgtttacaatacatggaaaaaggatgcatgaactttccttgttgagtaccatgtattatatgatattttgttatgattccatcatcacgtggccaacaaatcctatcactatacccttattaaaggatccactactttttctactcatcatttgaactaaagttatggccatatatatcattgtttattttcaacgtcatttttcacttacaccgcgactgggatacttgtattctccaactgaaaagtttattcattgaattacattggtcgcagatataaggattaatacaagcaataattcacttattctggtgatgttagtgaacaattgtctaattttctttatatttccatttctgttttccatgtattccccttcttcagatacattattacttggaacctttctgtttataaccaggaaaaactgctttacatctatttagtttctctatgattattgtttgacctgaatatgtttgatgcaaaatgtatgtatagaagatttattaagttgaaaagtttttactagttcttgctattttactttcctcccattgattttctgatgattctgttatcagctttctctacaaataaagtagtggtgagtagcgacatagtgcattatttcataggtgtatcatgatgactgggcaggttcatgtaatgacaggccacaaagttttggtcttcacattcttgatttcatctggtcttgtttgttttattgtttcaatcctatattaaaaatccttatcctatcacttccattggcaatattctactaattgcgactgtagctacactactgctgttctaaaattccactgttcgacctaccctagcattccagaatggatataattctttacatacagttatgggctctctgatgtgctcacttgattggtagcagtccagcatggtcgagactgaaatactttgaaattttgaccgaataaacctctggactgaaaacatgtgaccttaccaaaaactagttttgtctgcagatggtaaatcagaaggtgtcggctcttctgaagatgacatggatccaagcggccgtgagaatgacccaccggagattgacccgcgagcggaggacaaggagctcaaataccagctcctgaagaagtacagtggctacttgagcagcctcaggcaagagttttccaagaaaaagaagaaagggaagctcccaaaggaggccaggcagaaactgctccactggtgggagctgcactacaagtggccttacccttcagtaagatatctcccataccataccttagtgctcatatatgtataaacacaataccattgcctgtctgtattctgtacaatgacaaaaggataacagatttccgtgacctgtctgcaatgttaacactacttcagaatctcggagaaatagtgaggaagaagcctgcatatataacattgttactgatctaatgttattcgagcaggagacggagaagattgcgcttgcagagtcaacaggcctagaccagaagcagatcaacaactggttcatcaaccagaggaaacggcattggaagccgtcagaggacatgcctttcgtgatgatggaaggcttccacccgcagaacgccgctgcgctgtacatggacggcccattcatggccgacggcatgtaccgcctcggttcatgaactgcctgtgaactggactatccaactcggactgcgtcaaaatgtttctgtgtaccaggaagcatgcgttgcaatgcaaggacattgttatggaatttttgttaccgtttaccgctgattgccaaggggggttagtcagtgggtcgcggtcgctcgctctagtgtctatggcttgtagttgtcctgtaatgttgttaatttccgcttgacggcttgtaatctaggtgtatttcgaacttgattgtccgtgcaagtaccctggtgattaatttggcatgcagtcgcctgctgtttgtatgattgtatggttcagatggtggaacatgcatgttaagggcgtggcctgtctgaataaaaaaaaaagttgtcttgtccttcagcagatacatactcctacataaggatggttttacaatgaatgaactgcagattacttaagatctctgttcttcattcactccattatttgaagctctgaagatcaacagagtcgactcggttcatgaatgtcgtgctggcgtttctttggtggatctgaatgtggtactgtctgcattgtgtctacactgctgtacctgtcgtgctggctatacagctgattcagttggctactactgaatcgatgtataagtgacttggctgtctttatttcttcatcagccatcttgtgatacagttcatgcctgctgaatgctgctgatagcatgtgaataagaaactctagccaagaaattagcctaaataaaaaccaaaaaagaccagtcagtcaaagatacagagaacaaataaatatggttaaaagtgatttatgattttgggcaagggggcatggggcaaatagatt

SEQ ID NO: 4052 - DNA, 10158 bp, Sorghum bicolor
aacacactctcaatcttgatttttttttgttaagatagggaaaacaacactctacgacgaagcatttagaaaatggatccaattgcatggaaatatacatgcgtgtatacttagggaacaataagagtaatgacagggttcctactatttatatctatacttaataataaagagacaagattgtaatgttcaaatttaagaaaaatattctagtagcacaaataacttttttcccttttagaacaaagcaaaacaataatgtcattcaaaataattttttgctcgtgtgacattgttttagtgctccaatttaaggaacaaagtttcattatcttctttgttatgggcccttctcccttgtttaggggtggacatagactcaaactgaaggagtgacatcgtcttaacctcctgccttgagcctcttctcttatcttctatgtgtccaaaaatggaataggggctcaatgaggggctttgcagcaagtaggagggcctcgagccaaccatgccccatcgatgaatttgcccctaccacatgctaaatttagcccatgtggagtggatagacaaaaatttacttctacacatatgcaagggaagattccctagtgttgtcggcagacgcatctctagcaacagatgaggtcaagtgaatgatggactaggacattcattcaattgtttcttttacacatgtttccttttccttgaaagagcggtgtgtttgtgtggcatagtgaggttagttggttactgctcggctagacatcaaactccaagtcactggtccggaccatcctatggcttgttggtcaggttcatgttcatggtgatacccatgacccatcaagcatattatcatcaagttgttagctaactcgcctacacaatagagttgactagtagtgaacagaagattgtaagttgggctagagagcttatattgtttcgttggggtctaataggcacatgtgggccaaaactaaaatccgaccttgccccaacccctcccgagcatttgacctactaatcaagtgaccaactagacaagtgggtgtaaaagtgcgcttcaaccgacctctattgactaacccaaggatgcacacaccttgtcctcaactgaattccctagtatttaacttcaaagggattcaccactcatatgaaaaacattgggcttctagagtcctggttaggcataagagttgtttagtgcaataggctaaaggtaaaactattggcctaactttaacgattatcggtacattgccaaaagttgaaggacttggctttttatgggcttgttttgcatcgtggattgaaaaatgtgcctagcctaggcagtattcctcgaggtgttgggctggaccaaactatatactagaactacttgggccaagatccgaagcaaacaagcctatgcacaaaacattgggcttttataggcttttacatgaatctttagctaacacacacacaacctaatgatagacttgtgcagttgacttatatggtgaagttcccttttagcgattattgcataaaattgccaagacatgggctctttctattttttgaaggcccatattcaagaatgttgtcgagtccaacttgaaacatccattatatcatatgttgtatcttacaagtctaaaaaacaccaatatataagccatgagaatgttgatagatttgacaaataagccaaacgaacatgctgtaataattccactgtcagcttcaaaacatacatacattactcacgtgcactcataaataagaataatgttaaatacatatttgtaaaacattaataaataaaaatattttttattttttattcatacacaaaaaaaatcaaaaggataaatacttaaaattatttacagaataccaaggggtctggacgcaaaagagtccttggggaatcgtgtgccgtgtggtctgcgcctggttttttatcctagcggaaggaacagccccactcccctgctcgcttccgcttctccgctcccaaaccttcccaaccagcagctctctagggttttcgccgccgccgcccatggccgccactccggaccgcgccaatgccgacctccgtcgccgcctcgccgtcgacacccctccgccgccccagatcgccagaggtaaccgctccgcccccttctcgatcctcacgaaaccctagctcaggcccgcttctcgggctggtctcgattcggttctcgttgagcccttcgatccgcgccgtaggtttggggtttgcgggggttttcggtgggtgttggatggcgccgccccccttgggtttttcgtgctgttgttgcaggtgctgggttcgtgtctgggccattgatgcttggtggcgccaggtgtttagattagatgcgtcaagggggtggtgctaggatagtgaagggagttcactttgatttgggtggactggatgcagtggtcaggttgccttctgtatcgattttgggggcgctgatttgactgattggattagtttcagtcagttatagttctgatttttgttgttgatgccggcagagatccctcttattatgtttgtttgatatctatgttttgtgtagatttgttgttgtgggtgtatggctcactgcaatcagttcgatgtggtgatgttgatgcacccgatgatattcttatgttgcacaatgtagctgaaaaccaatgtctcagtcctgtttcttaaaacatgccgttagctttatgttgtggtactacatctacggcagatttagttaatgcttattcatttgatatgtctacagatactagatcactcttttttttttaaattactttcacgatttatggcattctcatggtaaaagaagaatctgcttgaactttagaacacattgcaaatctcctctatgcaaatatatacatctatcagttatatgtgaaggtttactacatctttctcttgtctgatgaatcgataaagtatcgattatcaacttagaacagatgaaggttgcatcagcaataataatttgtttatagatcttcctcattgttaatgctattttgatactatggtacatctctcctgtcatattgaagtagcttttggttggtgcagagaagcaaggccttgatactgaaatacccctttctcctcagtggcttatgaaggtgggagaaaacagggttagtcctcgaggagaaaatcgtactaatatcatacatgacgattgcagtaatagggtacttgttaggtgtatattaataccatatagtgatctatatgattgtttgtttgttgcaggatcctgtttcacagggtatccgctcagatctttcaaagacatcagggactggtgaagacccaggctacagcgcgaagaaaaaagatattttcaggtcttctgtgcttgatggtgaaactgggcgccgtgaccgctggcgcgatgatgaaagggaacccaattcgacccatcggtggagtcgctggagggagacagataaggaacatggtgatgcacgcaaagtggaaagatggtcagatgacacctccaagcattctgtagatggtcatcgtgttccgcaggagcgctggggcgattccaataataaggaaggcagttatgaccaacggcgtgagaataagtgggctgcacgttggggttccaatgataagtggggggattcaggtaaagagggtgatgcttcccgtggaaaaggtttctctcactatggaaaggatgtcaacagttacgaaaaggatactgaaaaggatgacaatgtttctcgttcatggaaatctagttattctgcgggccgtgggcgtggagatttgcctcactatccttctcagactccgcagaaatcatctgctacttatggatatggtagggggaagccagacaatgattttgcaaattttccaaacaatcgtggaaagttcacatctggtacaagtgcaatcagtagtggatcttcacgaccattccatcttggtctactttctgacagacctggtggtgtatcagatcgttcagcattcagatatagtaggatgaagttgcttgacatatacagaagttgtgatgtcactgattttaagttatctgtcgattgtttggaggaagtctctgtgttcatgcaagaagatgctttggaacctttagcactatctgctcctgttgctgaagaagcggtaattatgctattatttcctcagtagtttcttagttttgttgtatcaaaacattcttatctcactgttgaattaaatttgtaggccattctaaaagcaattgacaaaggggatatcataaacagtggtgtccatcaggcttctaaagatggttctgctggaaaaggtaatccttgcatcaaagcagccaaaattttactgagaaatggtttatctatttatttttgatacgctggcatgtatatatactacttactgcatagtttctcactgaatgctttttttaactttctccagctggtagagaagagcagccaggaggcgtagaagtctcaggtgccctgcctggttctgtttacaaatgttgtttacatcatctcacatgtctgaacaagcttaagagatcacgtagagtggccatgcatatttgagaactattcatgttttgagcatttgtgtttggaatattactaatatcataattggctttatgctgttgataaacaaaagtataatttatgaggaaaatatcattactgaataactcatttgttatatttcctgtagcatactgttgatgtagtttgaagcttgcaattgttcttaccctcttaaaagctgtttatatttatctttaacaggtgttgctggaaatactgattcgacagcaagaggggagtcaatgcgtcctgggacatctacctatgttgttccacaaaggtctcagtttactggagaacataagcttgggccatctgaatttgggcatcaaatacctagtttcttaaatcaagaaactaaaactgttggcatgatgggttttgataacttcgccagtccagtgcagcctcatcctaatccagaaagcctctctctgtactacaaagatccacaaggtcaaattcaaggccccttttctggtgctgacattattggctggtttgaggcaggttattttggcattgatttgctggttcgtccagtgaatgccccccctgatattcctttcttaatgcttggggatgttatgcctcatctgagagcaaaggcaaggcccccgccaggatttgccacttcaaagccaagcgatatgctagctccggagacccaacctacagggaagtttgtcagctctagcatgcaagcaggatcagctggcatcggaatatttgacagtgggccaagcaggaaagacaatcctgttgaggctcaaaatcgtttcctggagtcacttatgtccaatagtgtgcggaatccttcggcagacactatctctttaacaggaggttcgttactgtcatgaagagttctatttgtgcttatttcatttcatattagtttcttaaccttctttgatacctgtcatttccttgtctgacattattttcttctgaactaggtatgaatgaacttggcagtagtagctttggcaacatttctgtgcgtggaggtgagagtggggtcaatatgaactatcttttggcacaaaaaggactgttggagaggcaaaattctttgcaaaaccctgttacatattggacaggagatgctgctccagcatcacaagcacatccaatggctgatacatctcgccaatctttgcaatcccagaatgttgatttactagccatgctgcaatcaaaggagaaacctcaagttgctactggtaattctggactgccactatggcccaattaccctgaagcaagaaatgttaatcctaacatgcatggtggagatcttgctcaaggggttcttaatatgcgtcaagatctgcagaactcccagaacattggtattggtgttcaacagcacaacttaatgccacaaaaccgaccagctttgtctcatttgccacctgagaagcttgccgagatatctcaagatccacagctgttaaatatgcttcagcagcaatatcttttgtcacaactacagttgcagtcacagacacctttgacacctcagccacaactctctatgttggacaagatgttattgctcaagcagcagcagcaacttcagcagcagcagcaacttcagcagcaacagcagcagcagcaacaacaactgcaacagcagctgcagctggagcagcaacaaaagctattgttgcagcagcaactactttctcagatggtacctcacgttcatcccaatcagcacactgatgattcttatacattgaagcatacttctgtgccatctgatgattctatgggtcttggtcttagaagaatgcaagagactatcgaagtcgatcagaaattgcctgtccatggtatgcaggtggggcagcaacctaatcagtcaattatgaattttagaaatatggatggtgtagctttatctcaaagctctcctggaatgttggaagattttgcgaatgtcgacttacaattgaaatcaactatggtaaactcaaagctggtggaagctgcagatagaaacgaggggtttaaatctcacgaagtgggcactgcagcagaaaaaaacatgtctggaaaggatttggattctggatctactaggattatagggagtgcttcagatgaagctaaggatttacatgaaccaccactagatccaaagtcagaaaatgtattatctgatatatctggtcaggttcaagaattgaatctgtcggcagaaaatacctcttctggcattgtgacagctgtggcaactgaagtaaaagttactgatacacaggagaccaagaaagcagagaagaaaaagaagcaaaagaaaaaacaggctgctgcagatgctggcaaaggagcatcaaaggcggtttcagcccagcaaccaaggcaggaaactgaggttgacagttctgatcttggtggtaataagcatgatttaccagatgacacagaggaactattttggggttcacctatcagagtgcaaaatgagatattaccccccaaaagtcttccagaggaatatgacgctggcaaagctgaatcacagttcagttctctatcatctgatcctcatagcatggcaagccagcgtgcatggaaacaacctactcagggtcccaggcctaagtcactgctggaaatccaagctgaggaacaattgcgtgcacagaaaggattagctactgaaactgctaagccagcagcttcagtcccttcaattccttggaatggcatgacaatatcctccgagcaacattatgggggttcaagtaaatcattgggaagcacggaaagtgctggtgagagaaataaaagaagccagttgcatgatttactggcagaagaagttctggcgaggtcaagcattgcagataatgagaacttaggtaatgccaatgatgcattttaccctcctctgtcgcctgctgctgttcagcctcagcctgctgctcctgctcttgatgataatgacttcattgaggccaaggacaaaaagaacaaaaagaaggcagcaaaaacaaaagcttctactgtgaaagctccatcacctgttggttcctttgatccaccagctatttcaatgccctctgaaaagggaaagtctgtcaagcaagcacaacaggagttagaaatattgccagctccaccaagtggtccatcctttggtgattttgttctttggaagagtgatcagactagctctgtgcctgctccagcatggtctaatgactcagcaaaggtacagaaacctttgtctttgagagatattcagagagaacaagaaaggagaaccgcttatgtccagcaacaagcaccctcaccaactccagcaaaggtggccccgaaccataaaagtcaggggaatgcttcttcccggcaagcttctggatcatctccatcacaggcagttgcccctgtccaaataagttccaatgctcccagtcgttccaagtcaattgctgaagatgatttgttttggggcccttctgagcactccaaacaagataaaaagcagtatgtcttgcagcagctcttacaattgaattaatttgtttggtgttgcttcaagatgttattacatgttttattctggattctatgctttcaaaggattagtgaatttattaataaactaaattagcagcagctcttgcatttgaattaatttatttggtgttgctttcaagatggtattacacgttttattctggattatctgcttacaaaggattagtgaatctattaataaactgtattagcaaaatatgattgaacttcatactcaaaataattgcagaaaggatttcttttgaaattaaacttaaagatttgttcccttatctagtctgtttgagacttgagatctttttaatagctatttctactttcattggtgtttttggatcacaaaagatggatatatggatctgcatagtttctgagaatttttatgttttatctttatcaggtctgagtttccatctctgtcaagtcagagcagaagttccatgatgaaggatcaatctccactgaatcgtcaaaagtctcaggcaggcagattgccagtttcttctgctgctactgccaaccaatctggcaaagggaaagcagaggctgcgaacaagcagactggtatagctaatgctttttatttgcattctttaaagactatcatcacgttcaaagttctaacaactgtcattatgcagaggcaatggacttcagagattggtgtgagagtgaatgggccaggctcactggaacaaatggtatcaaacttgcttgaagttaggataattcaatcttttgtagtacttttattaatgttgatatgcttctgctttcagatataagcttccttgagttctgcataaagcaatcaactaccgaagcggagatgctccttcacgagaacattggttctcttgaccgcagtcaccagttcatcgacaagttcctcaactacaaggccttcctgtcagcagacgtgatcgacatggccttccaagctcccaacacgcgtggtacccgcggtgacggcgcagggcgtgcaaacgctgctcctgcagccagaggaggcacgagcgtggacgcggagctggatgttgtcgggaagaagaaaggcaagaaggggaagaaggtgagcgcggcagtgttggggttcaacgtggtgagcaaccgtataatgatgggcgagatccagaacgttgattaggaggacgacggcggacggaccgtgtacataaccttttggttttccctccaggacatccatcgccgcatgacccatatacagacatagtttaacctcttgttatatgctgaagtttcgggcttaagggaagatgggtgtgtgtccccagtcttgctcggaatggagcagtctagtcttttgatagacctgtttttgctgagggtgggaaactgagttttagatgcagggtcatgcggttggtgattttgggttcctgtaacatttggttagtgtcctgtaacagacagaaaatattttcttctcaatagaaactcaccagagaacatagatggattcagttcagtactaaagtctgttgctgttgtgaatttgtgatttttgatgtggttcactgcttcaaggaccgatcttttggcacggggtcggcaggggcagtggcctcagcgctgctatggcctacgttgttggggtgggccgtgggtggggtcttcgaaggcaagattgctattgggctcaataggccgaatcctcacctgctgtgggccgagacagaaactgtcttgaaaccttaaattaattattaactgtagttatcgaatttgctcgtagttgaatacgttatctgacagtttcaaaaaaaaaaaagaatagttatctgccgaaaggagttgaaatgccattcagaaattcctgaaaaaaactgggctttcaggcctgctcagaagttcccacgattttttgttatatcttcgtccattgttgtatctgaagtttgaacctgtcgaatttatagattgccccgaaagagcttcaaatat

SEQ ID NO: 4053 - DNA, 6064 bp, Sorghum bicolor
gtacccaaagtggcgctgccgccggtggtcccgtcgtccgtgcccaaggttaccttgccgccgatgccgtccgtgcccaaggtgacactgccgccgatgccttccatccccggtgtgccgatgccgttcttggcgccacctccttcggcttgaagcgcgcttctgcggcatctgccaatgtctgaattcttgtggatgattgggtcattcgatagtgtgtttaatttaatttgctggacatgcatgctgttcttcgcatgagcagatatgattatatatacttgttgatgatctgttgtattcatgagtgtattagttgatgtattccgttgtatacatatatatacatatatatcatcgcaattttcacatactcattttttattttcctatgagaaggaaaagatggttcactacaggaaacgcgagatttgcctggtgctttttatcggacacccggtaaataatttatttgcctagtgccctacccagaagaacccggcaaacaaaaacacccggcaaaatatgatttgcctggtgttttctggacaccgacacccggcaaaaaaagacacccgccaaatatataaaatttgcccggtgtcgacacctggtaaaataaaacacccggcaaaaaatctgcccgtgacgggcccgtggacggcgcgatttgccgttattcttcacctggtgccttgttccatggcaccaggcaaacatttatttgcctggtgtctttgaaggcaccagacaatttaattttatatttttgtttgtttttgccctagtttttttttgtgtgacctttctacagtaattcaaactcactatcaagcgatgtaggttcaaattctaaaaagtccacacgattctcagtttgaatcctagaaaatatacttgctcctattgtgaaagagaaagattgtaacgtctttaatttgaatgaaaatcataaaagagaaagtgtttaagtaaaaaaatagtgtaataacttaaaacaaaataaattctaacttcagaggaaaatgtagcacctaaattggaaaccgtaatctcaaaaaaaaaaagttctcgccaatttggatgagagattagaattagatatactatcacttgtggttctttaaacatggtggaatttaatattcaaccgtagcaacacaaaaaaaaattatcaaataatagttaaggagataaaactattttaaaatagctatagtggtttaatattcaactgtagcaatacatatacattctttctaataaaagttaataaagaaaaaataaattcctataatgctaataaatgcaaattggggatgtagctcatttggtagagcactatgaagagctttctagaggtacggggttcaactcctcgcatctccaattaacttttttaatatttgagttaaataaattcacaaatggtgttggtttttaatatttgagttaaaaaaaaaaattcacaaatatggtgttgccatagttgattgggccactcccggatcatctgatgtacgagtttagggctttgggctgcttgcctgcttctcaagagagtttttttttttctggttggaggcaacagcttccttcactctgccggtgtcgatctcgctggttctctccatcaaaatatcttgaaggcctcactgctaccttgactttgcttcatcatgacatatgttcgaacgactatctctgcgaaaaattgaataaccataatcttgatcttgattttttttttacttggccatcaaatatcttgtgtaatttttcattgcttctattgtaacgcatcggatttttttttaaaagaaaaaagagagagagaaatggaatttgtaaggggaagtgggccgagaggcggcaattacggcccagcccacacgtgcgcctccagcgagtccacgttgcacgcctgacgccaccctctccgtctcccggccaaacaaatccctcgcgcccacccctcctccccgccactcgccacccaccagcaacgcacctccacggccccacggcgagccccgagccccgtgcgcgcgcgaccagctagccagcagccactacccgccgacatgatcactggggctctgcaggtcgccgccggcggccagccgctcctgctcacccgtcggggccagcagcggcgccgggtgttccggccgccccaagcagtggcgtccgacgccgctgccgccgccacggcgaacgaggagggcggcaaagtggcgctgggcgggtccggcgtcgccgtcaccaagctcggcgtcggggcctggtcctggggcgacaccacctactggaacgagttccagtgggacggtacgtacgtttgcgtgcttcttcttggttcaggatctcgtactcaaattttcttcctgtactcttagttagctgcaagattacatgctaggcgcgacagcctctttccaggaacaagaattattacagttctgaaatttccaccaacttataaatgccataaaaatcagcattgttttagtatagcccctgagtttctgaatcctccagccttctacctgaatcacgaatcctgcagggcaaaacatttctttacgagctaaggttgctgcagctttggaattcgcttcagattagtatgacatttcagaaacaagcgtactggtatcggttggtagttggtacacctgtcctacgatactgaagcttcatttcgttcagatttctctctctctctctctctctctctctctctctctctctctctctctccaaattttagctaaaattttataaatatcttgaaaaattcaaccatattttgaccgattttcggtcctaccggtgctctccggtatttatgtctcaaccgcggtaggctgaacccttacaagtgtattggtatgatgggttggtgctactagtctacttcgatactgaagttgaaatcacacggtgaaactgaaacccatcccaggatccagggccagaaagtgtggtaaaccatcctacacttgtgctccttattcctagcatctcgttggaagaaattttagttggcctgaaattctggtcatacttccagtgcatatgaaatgcctgctgctttgaccaaaatccaaatcaacctgatataattgtcaaaactggcatttccttgttttaaattagatgctcttcagctcagaatacttcacattacaaaacgttggaatgactgccttttgatatgagtgaacactctcaaacaaataccagataggaaactgaaggccgctaaaggagcatttgacgcgagtatcgactgtggaataaccttttttgatactgctgaagtgtatggagcaggggtaagaaacagaaaacctttttttgatactgctgtccgcttcattaaggtaaaatctaacactatttaaaaatgtatgctattcagatatcaggagcgattaattcagaaagtttactaggaaggtatgtcgtgaaccattcttcatggatctatttataccttaatttaagtctgtgcagtgtcagttctgaagctctctcttcccatcagatttatcaaggaaaggcaacagaaggaacaggtagacgtggctatcgcgacaaagtttgcagctcttccatggaggtttggtcgtgggagcgtcatttgtgcgttgaaggcctcgttggatcgccttggcgtctcttcagttgagctctaccaacttcattggttggctcatcagccttttttcaaccaactctcttttacccttctctctgtgtactctatcagttaacctctcttcgcatatccttttcaggccagggatatggggcaacgaaggtataagaaaaataattaacacataagtactgatgaacccctctttagtttttaattagtacaccaaattcactgatctatcatgattcagattacctggatggccttggagacgctgtcgagcagggccttgtaaaggctgttggagtctcaaactacagcggttgctgtctaactccaacactaatataatatgtgatctgattattattgtgctggttacttatttcagtgaaattaattcataccaatttcgtttttctcatacctgggtaccagaaaaacgtctccgggatgcctaccagcgcctcaagaagagggggattccactcgcttcgaaccaagtgaattacagtctgatatacaggaacccggaggaaaacggggtgaaggcggcttgcgatgagcttggcgttactctaatcgcttattccccaatcgcccaaggtaggacctgtttcttctccacacactttttgatgttctgcgagtgtatacctatgaactgtgtacctgttttagttggtgaactcaactaagctcactagccttttttaggtatacaaataaaacctaattcataacttatcccctagttcaatgtgtgggtgctaatttgatcgagtttcagctttcctatgtggtatgaaatcatgcatgtattgttttgatgtatcaatcaatttccttggctcaggtgctctgacaggaaaatacactccggagaatccccctaaaggtcctcgaggacggatatacacaccagagttcctgacaaaggttgcatacatttccaactatttcatgatcgtttgttcgttcctagatactgtctactcactgaaggtctcctggatcatgccatgccatgcagctccaaccacttatcaaccggatcaaggagattggagaaagctacgggaggacttcaacccaggtgctctgtccatccatatctatacacagagctcaactgtactacaatgatttgtcgttggctccttgcaaagtgtcggtgctattggcaaataggagtactatacattcacatgtgcagactcagacatgtcttacaagaaacaaacttattagtgacagacagaataatgacaacagttcctgcaaccagaactggtcatgaaacattagcaagcaatccaccaattccagactgacatgctgtctgggttctggggacttttggctcattgcccttaactattagggcatcaattgactgacagagtcgacgagcagcacagtagtattactgtactcagttgtgtttcttcatgatcatacgtgaattgctgatgagcgatgctttgtctgtataacttggtcgtcaggtggtgctgaactggctggtgtgccagggcaacgtggtgccgatccctggcgccaagaacgcggagcaggcccgggagttcgcaggcgcgctggggtggagcctcacggccgacgaggtggaggagctccggtccatggcgcgccaggtgaagcccgtcatcggcttcccggtggagaagctgtgagcggtcggttcagctgggagttttggtcaccgccgctcatcagaaaacctcatggcagtgacaccaggccagtgtagtagtgtatagtaggactataggtagatggacaaagcgtaccacttccattgcaagactgcagacgatgtattctactgtactgtacgtaatgtaacagcgaaattcaacagcatagtgtagtactctctccgtcgtccttaaagagtgtcgcaaccagggaaattcaacagcatacagtagtatactctctcttttactagatttataaaaaaatattagaaatatttatatctctaaataaatttattataaaaatatatatttagcaatttatctaatgatattaattatgcatcataaatatcaatattttctcacatatatataatatatttggtcaaagttggaaatttttaacttctcgaaaagtgagatgacactatgtggcatgttgggagtataaagcttaaggccgttgaccagatcacagtagttgtgtgcgttaagaatgcgtttgctatagatctagattaacgtttcagattttggtttgttcttagaaatgttccttttcgaaaggaattattagaaatgatttttttttgtgtgtatcagaatcactttctcaaatcatgtggctagttgactagatttgattctcgaaggtagcgaaatttattgt

SEQ ID NO: 4054 - DNA, 12828 bp, Sorghum bicolor
atagagaatgaaacaaggccatagtaaaatagataaataaataaataaaactcgaagcgacttgtaatttagaattgatggagtatttgcgtaaattgcgtgaccaatagaacatgtttttgtttagcatttcaggatttagattgtccctgagttacatgcggatgtttctttctctcatcaaaaattgatttcatatatgtgtgttggggaaaagaaaaaacttcttgtaatttgaaaaaaaaaatcaggcaagcatttccggagatggcaatacagctgaagtggttaccgttttgcacgtgttgattcgacgggaacgaaaaaaatttcacagccgggttcgtttccaggctggaatgacatagaattgtttcgaacatggaaccatttgataaattatactgcgctaaaaatgttccgatccgtttcaagccggaaacacgtaaccaaacaggcctgtctgctttatcttgtaacctgcatttactttagctgcagttataagttcatgatttataaaagttggagttccgttgtgtccatggagtctccatttgtcagacttgtgcaataattcccaatttcccacacaagttcagggagcacatttggcagctcggaatggccgcggatgtagctagagcgctagaattgctggcaaaaggacaaattacaggtgattagtcacaaactcacaatagaaaaaaaaatcatggcactcccgtttcaactttttccatgctttatatgcacttgattacgcatgcttttggacaaaccatagttaaagtgggtatattttttctttcatttctttagcactcagcagtcagcacctccttctcacttcttttcatagggtgtagtttagttgagggacgcaagaggaacacattggatatctcacttcgtctcggtgtttgttttgaaaatagataaaatggaaccattttaaggaggggaatctctataagatgtcatccctagatgctcctcaaaagttgaggtacgcgttcgtcccttttgttacggtcttgttctctgttggtcctttttttcttctttcctccttctgtttggcttgaggtgagatgatcgaaggtgaaggcatagactgcaagtgacggcttctcgggtagataagcagggcacaaagtcatggtcgagagtaggcagataagcgatgcatggatcatgggctaggacagctagaacaacagagcgaagggctcgacaaactagcgactgaggctaggtctagggttgcagactagaaggaagaaaaaaaaggtaggtgaggtgacataattatcccacttaacagatgtctaatgcatcacaaactatgatgtatcctcttcatcttggttgctccaaccaaactcggagtaggacgtcccctcaacaaaacatagagattgaatcgtcccatcttagagtactcaaatgaaaatatcatactctcctatctcaaaatcaaacacagccttaatcttcccccacctcatgatgagcatcccataacctaacattagaagatctacctcttgatgaacctagacgacatcgagctcaagtaataatatgactaaatcatcctcccacatccttcttccctctcggtttatccctcgttgggcaagttcctccgatttgtacctcaggtccacttagcaagccgctagactagcccatcttacatacgggcccatatgccatgatgggctaactgccatggactttgttagtgtaggctagtggagaggatcggagccccgtttcggctgctgcctaggacgtcaatccagcccatgcgtcggaaatcgacggcctggaggaactgcctagcggcctggcccaggcgtgtgttcctcaggtcttcgatcctaccaagcccaagtccattcacctgacatcacctcatgtgaaggtcagaccatacgaccccacctgccattgaggttgttctccaaacctccgtgcgcttccccggcgccatggcgccaaaatttcatttcccccaaacccaccccaaaaattccccaaactccctgtgagtctgtgaccctgtccccgtgtcttctcgaagaagccataactcgtcttcgccgcggcgatcggcggcgccgatggtgttcctgcagcgcacccgccccatcaacccgcgcaagcgcccagccccgccgcccgagccccccagggccgccgaccccgactcttcctccgccatcgacgcggcggcggcgctgctcgccgacgcgggctgcacgctcctcgtcccgccgcaccagcccccgtccctctcctcgccgcacttgttcgcggcccgcctctcgcgcaagctctccgcgggcggggacgcctcctccgcctccccctcggcccccgcgcggcgcctcctcgagggcctcgccgccttcgtggcctcctcccctgcgcggctccgccagctgctcctcccgacagcgccgcacgcgccgagcctcgcgcgggctctcctctccgtccccgcgctccagccgggccttctcgcgctgctcctcgagaagctgcccgagcacttcgacgacagccgcggcggcgcgctcgacggattgccgctgcaggacgacgtggggaggctcatcgtgtcgcagttccgatggctcgatttccttgtcgacgccgacgccttcgtcgacaagctcgtggaggtgctctccgtggccccgccccgcctgaagaaggagatcatcggctcgctcccggagatcgtcggtgaccagagccacgccgctgtggtcaccgcgctcgagaagctcctgcaggaggactccgagatcgtggtcgccgtgcttgatgtgctgtcggatcttaacctcaacgaggagttgcaggagcaggtgatgtagacacattttcttctctgttctgtgtgtctttcagtgaactttgttttgtatctgtatgatgaggagcagatgatgtggacacattttcttctctgttttgtgtctgtcagtgaactgatgacgtggctctcctgcaggcagtgactgttgcgatatcatgcatccggacaattgctccagaccagatgcctcatttgctcaggttcttgcttttgtcggctacaccagtcaatgctgggaggattatattgcagatacgtgagcagctcaagtttgttggtgctgtggatccacgggctgcacgaagtaagaagcttaaagggaaggcatcggctaaaagcactgatggggcaatacttgatacactgagatcaggcctacggtttaagaatgtaaactatttgaatcttcagtttgttttgcggcaaagtactgtagattggggaaactctcccctggaactttttgaaatcctttttgctgctatgttcaagcttcttattggctgtgctttgttgtgaatgcagatgctttgtgaggctttcttgaaggagctgaagtcagttgaccacccgagggatcacaaagtgattgatgtttggctcatcatgcttatctatgccaatggtggtgctctacagaagagtgcagagaaaatattgaagtccaagatcttacaggagtgcataagagagacgctgtttgatcaatgcattcatggaaacactgaactggtgaaggttagttcttcattatactgcaatgattgtatacaggcagcatacatgtaaatattcatgctaatttggagtctaaatgtgacatgatttaacttgaatcaggaacatttcatgtcatacctctcagttagtgattacttgttggcttgcaaggaagagaaagctagagagtttgcggcttatttgttcacagcactatttgaagagttcactgatacatattccaggctagaggtaccgcttggctttcgacacttctggttgtcacgatccacaggctaaaaagttgagaatgtcttatatatgctgatggcacaatataatctttgtgatttctgaaacattcaattttgtaatactttcatacactttgttggtttaagtgcgaatgcataataaatgaatatgtactctgtgaattagtattgaatgaccatgtcaggtccagcatatatatgaatgatacattaaaaaggatgctattaaactcatagtatgcctgcatgctagagggattgtaggacttatactatgggtagaagagtgttggagctgatgatgaagtgatatcgataactgattacagttgagaaacttagtgtcatctgatttctggtcatgacaaggttatgttctgtcatgtacgggcacatgtatacacgtaggcgccgggccagggacatccgccgcgcggctgagcgcgcccagagtgtccagcaaggccaggaggccgcggctagcgcgcagcgtgtccaagggggacacgggcagtagttggatttagataataatagatttagtatccctgtaatcagggaaaggttagttgctatttctattcaccaaggactatatatcctttgtaatcgggaccttgaagggaaagcaagaattgatatcttctaaacctatctctctcaatatttcctaagcctacggcggaggggcaaacctcgccggagaagacggaccgaggctacgaactacgtagccaagggccagctaccctagggctcgacgcccttgacatgttcatatcccacagaagcagggaagcaagtgttatgatatgttctatgttcaggtagcataaccttgggagggatcctttagttgcaatctgatattgctttcagtgagtggtagcttttctttgtttctagcagttggcaaaaaccatagtgttcggatgtgatttctcatgtgttaagctgaagaagtttactcaatgaaattttcttccacatggaattgctatcttcgattacaaattatctattttgttttgtgcatttcatctgttcattttctaatagtttgtcccttttttttgcagcttgtgggttcattggtcgctcatataggttctggggttagctatgaagtttcatctgctctggatatcatgatttctctgacatccaacaattcggaggaactgattcctatatcttcacatataactggtaaggtactttcctatgctggtagttggtctttagtccacactttttattcttctactgatatataatgcaatggtaaggtactttcctatgctggtagttggtctttaagtccaccctttttattcttcttccgatataaatacttttctttgtacttagtgcttttcaattttcatttgctgaacagatttatcgaccttttcaatacaggaatattggattacttggagagttttcatgaagataatcttcggaaggtttgtgatacattgttcatttctctcctaatatgtctccataaataatacctgatcatgatttatataggtttacgatatcttctgtcgtttggcactggctgctggcttcaatactggttcaggtggctctaaagtagccaatgagcttctaatggtggtgagaaagcaggtatgacgaccccatttcttacatgggcagcacattcttctcagaaagacatctttcatttgcaaattacaatctgttattgttttctgtgcctgcttcttaccttgtaggttggtaatccagacatgaagtatagacggatgggaataattggggttttaaggatagtttctactattgcttccactgatgtcaatgctgctgtgaactgttcatcatctcaggtttgttttaagcacaatgtaaatttaggataagtggcaatgttttgttgaaacaacacgccaagtgcatatgttatgtctgaccttcataacaaatttattgctgaaattattaaacaccttgagtacctcaggtataaaccatctatcatgacaaatcttcatagataatatataacaaatttttatgaataattaaactaattattagttggtgattctgtttgttgcaaagcatcatgagcgactgataaaatagtataccatatatcttatacacatgctgaaatgaaggatgacatgttaggaatgcatatattgtaaagcaaaattggtaaagtttcttttctgggacacaactgcacttactgcatcaaccttgttttgcattcatgaaatcctaatgctaattttatttggctggtttggtagcaaccaaattgtgaggaggccctggaattgctgacgatgtctgttaactcatgcaaatttgtgacattacccttgatttttctatatgatgaattagctgctttgctggatagcaaagttattcactcttcaattcatgagtggtaggtacaaaatgatggtatatgttcgatatttcgtcatatgtattttctgctggttgagctcatgcaagatggttcattttaccaattggtctattcagggtaggagagcatgctgcagaattatttgagacaccttttcttgctgacctagaaaatggcgaactaccggagaaatgtgtatgtgatgacatagaaggttagctattgatgtcatagttattttttgttttggactccacttcttttgaacataggctgtcaatactttacaataaacaagtgcaaatgtaattgttgacaccttggttacaggagaattatggatgaagttggatggaaatgtctctccagtatgtctaaatattatgcctctagcctccactgcaccccaaaagtaaaataccattagttattaatggtgtcattatttgttactccattcattccaaattataagtcgttttggcttttctagatgcataactttatctgtgcacctagatatatattatgtctagatacataataaaaatctaaaaaagccagatcatattattggaatggaaggagtagctaattagtttcaaagaacatgcactagccaaatttactaatatttttcactttttgcagatctcaatcctgcttgcagatccttatgtcccaattttcacttttaacaacagtaagtgcataacaatgtagttttacatgtcttaattgctgagcttacatttttcttgctttatatcaaagattgagcgtttagtaaatgaaggctcacttggtggaataaatgcactacttggctgtcctttgcaccttccctctaccaaggttatatacgtttctccgttcaattatattgctatctactttcttggtgtagttctaaattgcttgggtgtggaatacttctaacttgctgttgcactcaaatagtttctagtggcgaatcacaaattatttacttcctctggtcatagaaacatgtcgtttcagacaagattcaccttaaaaactacatcaaaagtttaaagtatagtttgaaaaatgcaagttacatgtgtagaattgcattgaaaagcacttgcaaaatctcataaatttgaaggattttaaaaatatattgttaaaggaattagtgatcaaatatatgcattgaagactgtgcaaactcaattgtgaagtatatttttgactgaagggagtaattcttaaggtagtttgcaaaatatttccaaatggaggtgccaaatatatgcgtaatatcagatggcaagcatttaagaatggcaggagtagctattttttttttcatgtttacctataggttgtttgcagatctcttcactcttgtacaaaagtacaagaacttcactgcttccactatataaatgtcacttctgcagtgtgtaaattttcaaaactttgagagatgctatttaatgatcaagcaaaataataacttctaatatgtaccactgacagcacttggatggagctaaatgggggaacttgtcaggactgcagaaaaaaacagtgtgctattccctgtactatgcaataaactggatcagggagttggtgagtggttttgtatgctataattttcaaactgtgattttcatctcttttgtctaactagagcatcaatgcagctcaatgctttcggcacacaagttgaaagtagggttgataatgtttcacagaaagcaagggatgagacagcagtaaaacttatgaagcgtgtaagaaatctgatgtgagtgtacacccatcgttattgtgcttttatactgataatgatcacattcatagttaggcccatttcaggagacatctataaatggaatagaaccatttagatccttgttcattggatattgtttgctctgccatcatcattcttgggccctgggcactgaaaattttgtggtgttcttatttctgactccaagtgtgtgggcagtgaatttccatcagtattgtccagttgattaatctaaatctgagaagttagtagattccaaactttttatgtattcatgtatggcatatatatgagtaatgacaaatgacaaatttgtgcaattcagattacttgaaggtttactgaatgcatttctcaaaaattatccattatctctgcctgagctgcgatatcttggggattgttctggagcaacaagcaccagcaaattcaacattccaaagaacatgggagaacagagcataaatggtgcttccagcaaaagacagaagggttgcaagggcaaagcctcagaaaaaatgaatcctgatgataaactcaagcaacctacaatattagatgctttcaaaagagcaggagtaacagtcagtcaagcaacaaacaaagcttcttcacaaccatcgtcaagtggaatgatgtcaaaggatattgaacaagatgctaatgatcctggtgaacttgggcttatagatttaatggcagcaccaattaaactggatatgcaaagattcaaattcagaactctgcatacaacatgcttgtctttgttgaactactcagaggtatggatttcttcagtttaaattgactagtggatcagaaaaccttttcttcctatcttagttgccatcttatgttcattaaaacaattgattttttttgtttgcagtgtcaaggttcatcttcttaccttgaaactgaggtactttattcgtactagataattactgctaaatgttgttaaattattaacgtctggctattttttcgcgcagctgccaacatatatatatcttcttcgtgatctgcataacaaattagataatctaaatccttcagccaagccttttcttagtacttctcaagcaaaatatactcgtagtcattgccataagagcacacaagaatttcttgacaaaatccagccactattcttagttttaaggaagcatctgaatggagcagtttcaatgatcaaagatggtaaacttctatttcataatttctgcttcttgttacttttacattgtttgaattactaaattactagataattaatgggctgagtcgatttctttatggtcggggctgtttgtgctggtaggatgagccccccatctcctcctttatgtactttttgttctaaatgcatgaacatgcagctctcctgcattgttcgaggggaaaaacattgtttgaattttgtattatccttcattgactctccttgctttcggttgataacaagatacgctactattcttcagtatcagagagctgtccagataactggagttcacattcatcttctgctggcaacccagacataccatatgtggtggtctccaaatcatcaatagtgactgctgtatgcaaggagattcttggctgctacaggaaggttgttctatggatgtattttctttcatctgaaaatagacaagagatctcgaaactgaagctgcttgctaacaagtctggtgccttttgcagttacttgccattcctgatctgttgaatcaaccaaacatgtcaattctgaagcaacttttgcagactttgcagccaactaaaaattttgatgatgttctttccgagttccaaccatctcttgctccttgcaatgttgattacctatattgtggagcatgtaaaatgttggaggatattatggatccaggtaactagctgttggtgtccacagtgcttggacatttatgtagccttttttgcctaattttagtgttctaatctttttgcagtgtcctcgttctcataccttttgtcttctgatgtgttaattactttacaatcaattgtaaattctgttgttgtattgttggaaaaatctggggaaccaaatgggaaaaatatccacatgggatgctccaaagcgatcattccctttctgcgaaagcgtcttggatactcagctcataagctgctaagcgctgatttccctagcgaagatgctgaaaaaggatggcagaataaagtaagcttaggttccatccaactacctttttaatgtgctagctgataggtgataagcagctcctaatatgttccctgctttttgtcttcagggtgatcttatacagaagatattgcaaatatacctcaggaatagtgactctacttcagatctacttgttgagatattgcctaaggtgggatatctctacttcttgagtggtgctctgagagacacctcatttagcgtatagttgtagatatgaactacatgatccttttcttttttgcctgagaatactccttatagcttcttattccatgttttaaggaaccttcactcaaaacaaaagatacccaagatgtatcgtatggttttccaacattgtgttcctccactattccctcttggtaccgtgttcttgtaagtatgacatttgatgcatttatgaactatcccatgcttgtcttgtcttctaacattttggtcactaatgcagcatgaggagaacactgggagtttaaacaagacggtgagcaatttaaatcagcatatatgcactagaattgctcccttttcccctattgctgtgtcctttaatctaaagctgtagcgatgcctgatgtttgagtaatttccatcctactctagatcaaacaagcactgaaggctagagcatcacctgaaagaggatcagttgatactattctgcaagaaattcagaaatcagtggaggcatttgtctctctaataggaatgtgtaaggctcacgaaaaggttagttgcactatagtgactcatgctcaaatctctcaaacagtaccttgtgcggttgtttaagtattgggctgctggatgaaagagccactacttatacgaatcttaaattacaggtttctatgcatgcaatggcagttaaacatgggggaaagtttatcgacacatttctgaaaggtgaggaattgtggttctgtaagttcactatgtatacatgcctttaacctttcaacatcttgttggtaacacccattttggtgtatcttggtcttggctttgacaaaataaaatgttcaatttactatttgccttttgcagccttcagctttctagagacacatttcgagcaacataatggcaccatagtcaaaatggtaatggctgtaggttacacttaagttccctttggtatcactgatgaattatgatggctgatcagtgtcgctgatgaattgtgctaatacagctaagaatacttcagaaagcaacaagaataatccaatccatatgttcagatgctaaggtacagtgtacagctgatgattctgtgtaagatgttcataacataagccttgtgctctgtgcttgtggcagtaacttgacaatcttgtgcagggtaacaagcggacaatgatcacaagcaaagtacctcctgcaaagagatctatggaacggttcttgttccaagttaaggcgctgctacacaactgctccgccgagaaggaattccagatgggtaaattttggaatctcattcacagtttctccagcaccatgcctagttacgcacaaataccaagttgggagacacggcatctcaacccagacctgtgttttcgtaaggtaccaacccatgaagctgtgcctacctcctgctctaatgccctccactttgtgaattctgcactgtgacaggcaatttgaagcacaaggacttgcaaggccatgtggtgagctctcaagcgtatgggagcgtggatgaggaagatgaggagcagatggagaccgactccgatgctccggctgatgaggagaacaataacgacaatgccatggacgaggatgcagtgggagggagtaacgagacgccgatggaggaggaagaggaatagtggcataggtaccaatctgtacatctctctctaacctgagcaaaatttctccccaaaattagcagtttgtgtagaaagataggatcccatcaggttgcaatgtcacttgtaaatacaaagtctaatcaggagcccaatgtcactagtcggatgctgagatcatgagggtatcgatcccgtttgacagcagtttatatatttctagcagttgtcgcttataacaaactcataagtcacaactcataagcacagacggacattctagaaagaaacagcattacaatgcgaggggagggaagcaagcctactactgcatcgccggcccggcctggctccgcctgcctctgggaggagatttagatggccttggcgggtggcgcggtggaggcggagaggtcggcgaggagcggctcggtggcggaggcggcgccgccggtggtggcggtggcgttggcgttggcgttggtgggggagtccgggtcgtagttggggtcgagcgcgcggtccatggcgcggcggccggtctcgaggcagggcttgcaggccatctcgatggtgatccagccgagcaccaccgccgcgatcgcgatcaccgccgtcaccaccgcccccatcgcgacgaaattcctctggtcct

SEQ ID NO: 4055 - DNA, 5365 bp, Sorghum bicolor
gagagccaagaaatgcgttaggggcttccaagggaaggagtgccgatggccgatggccagccggcgccgccacggccggtggtggtggtggcgatgaaaggccacccggggtccggcaagtccacggcggcgcgcgccatcgcggccgcgcttggttggccgctgctggacaaagacgatgtcagggactgcacgctgcccctcgagggcttggctgctgcagggatcctcaacgacctctcctacgccgtgctgtggcggatggctgagcgccaggtacggctcggtctgtctgtcgtcatcgactccccgctgtcgcgccgcgctcaccttgatgctctgacacgcctggctggtgcgcttgtcgtcgtcgtggagtgccgccctggtgataacgaggagtggcgccggaggctggagagccgtggggcggctgtcccaaatggtggtggcagtgatggatggcataagccgaagacgtgggccgagctggagaggcttctggaagggtaccaaggctgcacggactatgagattggggatgtgccgaggattgtggtggatacaactgatccggcggttgatgcgcaggcgatagctgagaaggttgtgggtttcattaggtcccttctttcttgtagccaatcatcttgtgagagacaggattcacctgtctgctattggaaaccaaaatgtacattaacttaagtattaggtagagtttcattgcaaaaggtcaatctgttgtactgtgatgctcaaagttcttgtttttgtttatgggtgtagcctagaggttctgttattgttgggacttgaaaaggatgttgttgtgtgatctagaggtttagtaaaaagatgtaaaaagatgcgcctttgtgtggggttgttcctatcctctgtccagtacgtctgtcacattccaatgaaatggaatgtgacttttcagcatccattggaatgtgacttttcagcatccatgtttaggaggaaaaggggttcaagcaagtgtgctaccaagataattatgcaattctgttttttttcccttctgcagcgatagatgctttatgcctccatttggttcatttttacattatttctttagcagattctgtatggaaatactggggtttttgcttgtccttgatatctatattccatttgctatactgcacttctccttttcatgatctttgttttggaaattgcgacatcaaatcccagtcaatctaaaactttttgtttgcttgcatggttttgtaactagtcatatgtactacttaatagtcatcgctgttcagtgtctgctttacaaaccaaattgatggctagatgcttgcctatttgttctgcctgatttcatcgcagctcagttgttatgattactgggtttcctattttccagcttttgttttctgtttcatgtttgtagtgttgttttgtttcatggtctgatgagttttggtcatttacttttaataaagatctctgttggtgtgaagatctatagaacaggcatttgtagaagtgtaggcttgagatgtgctgtttacctcctttatctgaataacattattgtaatgagctgtcaatgttacaagactacagaacaaatgcattgcattctattttagctaaaaggtttattctttgaaaaagaaaatgatgtgctaattaactcagttctggggacttcaggagttccaggccggcctagcttattggaatgacttgttgttccattacattcaaagtccacatgttattttgttcagctccataatgctgtggcatcgtgttgggaaaacattgattgggagtagattagtacatgaataattgatctgcgtagttcagtttttgtgcatgtgaacatatggaaaatacgaagtcttagaggaactaattcctggcatgtggtgctcactgtgcagggcatcaggatctagaaggaagcacaacatcaggttttgacttttatcagttctcagatcaagatggtgtctgttggcccaaaaccaggggtgcctgttattctgcgggagctggagccatcctcagagatgttcaagcaaggagcgtcccttcgagtcacaggaaggtatgtgaagcatcctttactccttttacgtctacctgtgaacaacctatgttatagccatgtttttttgaaaagagttttactctgcttttaagaaagcagatattcaagggtacagacaaaactggggatatcagctcgcaagcaagtctaacagcctctaacaacagcaatcgcaaactagatttctattacatcagacatcatggtgtcactcgctcagtagttctgtagctatgcagtaattctcttctccgtatcttgcactttagctttgtccttctcctgtatcagcacactccacttctgcacaaaggagatagcaatgtatatgacatcagtaggtctgttcggaaaccgcctctctattgccatcttatttcttagaggtccagattgcgcaaattagccctgcaaacataaacatacccagctgtttagaggcaccaagttttgttcccacccagttctcagcaaaatcagccaaagatgcgaaccctacccatccaaaggcatctctgataatgcaccgttcaagatgagcaactgggcaatgaaagaaaatatgttcaatggtttctgatctatcacatagagtatgattgattgattatcatttcctttccaccctcttttttttaagaacctgagcagcctgtaatttaccattgaagagctgctaaaggaagaatttggttttgggagggatcctgcacttccatatcagctttgctatccgactcttgacccctccatttgacatgaaatagtacatcgattttgttgtgaactttcagtttttatttaaagcccaaaacacctcatcttctccagattcacattttggagttcttcctttaactgtcctcattcctctactgacaacccatgtagcgatcttctcaagcttatatacaccattctccctcattacaggtatcagccatagtgtcaaaactattatcacaggcgttgtacagctttgaatatttgattttcagtggaaccctatacggacacatcctctcagaacacagttttcttaccatttttttaccttatatatatatatatatatatatatatatatatatatatatatatacaaccccccccccccccccaacacctaaacagatgttttattttgtgtaaaccctgccgaactgtgatgaccctcttgttttagagttcaaaaaaaaatcccatttgacatgtattttgctgctaagattttatacctggtttcagtgctcccctgaactaatttccagatccacttggtcataatacagttcaggactttagtgtctatagcctcccagttccccttggtcttttcgcctgtttataatttcccattttgccatttgatatctaaatttcctatcggccccgtaagtgagtctgttgatgtctaagttacctatataaaaaaatcctgaaacatcccatagtaataatctttaattaagtaccaaaaattctgaaagaaagatccatttggtccaggtgctgaatcccctttcatttccaatactgctccctgagtctcctctagagaaaaaggtctgctgagatcctccctgtctcttggctaaaaagagctagatagagtaaggctacattctagatttgggcgaaacaacttgtaaaattccaccacatgatacataatgccctgttggcctttaatttcctttcctgactctaaccccaaaatagtagtctcctcccattagtgaactgatgaaaaaactgtgtttgtgcactcgcccttaataatccattttttttcagtcctttgtctccaatatatttcttccctctaggagatgcttcccagttgattttccaaattatttctttgttttcattccaatcctgaaatccccatgctgtctgccaccctgtccaattcctccagctgtttcaaaattttccttttgtctctcttttgctctcctttttttttttgccagcttcatcctttcaaatgtttcctgagaaactggaggcatccatgccacttatccagcgaatagcagtgatctggactcctccccctacatttttccatctgtgttgaaccatctccctgaaatctggttgcagtaaccgctggttttgaaaatagaaatatctctgtcttcattatttccagtaaagccacaatatctagtttttcttgtgtaacatgctcctttacttgacctcttaactttcctctgctctttgttgtcctctgtaagtgctttcatttttccttgcactactggatttgacctccatggccaactcttggttttcctgctcaccttgaggagctgttttctcttcttgtttttctaactacaacttttaattagcctcttgttttttatcagtcttcagtcgttcgaggtggactctgcaaccgctgtcattcaagacggcagcgtgagtttaaaggttgacacccaacatctgagggacatcagtttccgcacgaattcggcgtaccagttcattggtgaacttcagatccgtgaaggcaatgatgtacgtgatcctccttcctcaagttttttttgttcaccctgcttgatactagcagctataacaatgctacaccaaattttgttggtttttgcaggcgactctactagcgcgcattggaaggaacgtcgatggcctcgacctgaacctttaccagcaggctatactcatccgacggcaacacgaagcaaagcttgtgagctccaggaccaggagagcatgatctgctgcgcatgttcttcgcagttgttagatttctttgttttgtcgcagtgcaattgcatatgtacatgagaagagaacaagaccgcctggaggctttggttataagaattggtcggctctgcatattgatttgtgggacctcagccacatatccctgtttgctggtctcaagagtcatgactaaaaatattgtttcgctgatttattgtgagagaaaaacactgatagttggtagaaaaagtacggcttttaagacaaataaacggtagcaaggcttgtttctggctgttctctggtctggtctggttttttctgttgctccctacgtaaagggctgccatggcatgtgtagatatgtgattcccgactatagtatttgcagtatagggccttgtttagtatttgcagtaggccttgtttagttatcgaacgaaaaaatttcaagatctttcgtttgtttgtggtaattattatctaaccatgaattaactaggctca

SEQ ID NO: 4056 - DNA, 3202 bp, Sorghum bicolor
atatcatgatttatttttctatgtctttgacacatgtgcagtacgaatctttatgtaaggattgggtttggtatttttagaagaatttttacgtaattaactcctagtaagctgttcattagttttcttttttattttttatatttctttttcttttcttattttttattctatgttactttacactaattaattattttatttttcacatacatatttatttcttattttcctatatatttatcatttgttattcatgctttatgtttattttctcttctttgcttttcatttttatattattattgttgttactataattgattaattttaatttatgctctgatttttatattctatattccatgagatgtttatatagtatacagttatgttctacgatgttttttatgatcatatggtatataatatcatgttctgtgatgtttttatgatgttcctgtaatataaatttgacattttatgttactttttgtgatgttcacatgttataaatgtgatgttctatgatgtttttatgtctgtggctgtgatgttttatgatattttttgtgatgtccgtgtagtatacatgtgatgttcacgtcgtatataatgatgttctatgatgtatttcgtgatgttcatgtagaatacatgtggtgttctattacgtgtttgtgatgttctacggttctagtggtgtttacttactatatacgtgatgttctacaatatatttagtgatgttcacttactatatatgtgatgttctattatgtatttagttgtatctatggtttatttaatgttgttcgtgtagtatatatgttctattatgttttctatgtttgcacaatgtatgatgttctataatatatttagtgattttttatggtgtatttactgttattcacttagtatatgtgatattctatagtctattttaggacgtttaaaaagtatacgtgttatattcatttttatttttctttattatgttttctcttatgctttactctaaattttattgttatttactatttaagttatctgtctatatttatttttatattatattatcatcaatctaaactagaatattattattctaaactgagaacatttttttattgaagacggaacattgtttctataaacctagaacatcatctctgctcaataatgttctatcttcataagataaatgttcgttaataaaatattatctaaatatatccatgtgggatcttattttgaaggatttattgtaacaaaaccgatggtgcaatcggaatttaatttgaatgattactataaaagttatggcttttttaaaatctgtttaaaactatctgcaagcgccagttcagatgacgtgggatgagatgagtgtgaatcaaaatctgccgcgtgctactattggactgtaggtgctaggcgggaaaatctattggtaaacaacaaaaaaatttggcgggagtctgccggacgacggaatcggtccgaacgccggacccgaagagcccccgacatatcgggtgatatggaatcaaccgacgcaaggcgattctggtgcacgcacaatttttttttaccttatcgtgatgaattcatatttcttgggattaactgaactatataccatttcatgatgacttaaggccttgtttagatctattttttttttgaattttgacatcgtagtattttcgtttttatttaataaacattgttcaatcatgaaataactagacttaaaaattcgtcttacaatttacagacaaactatgtaattagtttttatttttatttatatttaatgctctatgcatgtgtcgtaatattcgatgtaatagagaatcttgaaaagtttttgattttttataaacaaggccttaacaaagagccaccatgtatattgcattgcagcaacggatgctgctgctgtggcgaggccgccatcacgcggcggccatggcctgcatgtcgagcccgggatgctcttcacgaggaagagcttgcttccggggacagtcctgccggacggcaccaagttcggcggcggcgacggcttccccggtccccagaggttcgtcctacgggcggacgcggacgccatccctttcagctacagccagctcgacaccatcctgcggatgttccggatccctcgcggatccaacaaggcggagcaagtcgccgccacgctccggacatgcgagggcgccaacgagtccccgtccccggaccctcacacctgcgccacctccgagcaggcggcgaccgacttcgctgccgcctcgctgggggtcagtgccagcgagctggtcgccgtcgtcaccgtcgtccacgggaggaaggacgccgccaggtacgtggtggcgccagacggcgtcgcgcgcatcggcaaggcgggagccgccgccgcggtgccgtgccaccctatggcgtacccgtacatggtccactactgccaccggccggcggacgtggaggcgctccgcgtcgagctgacggggctcggaggagacggcggccacgcggaggccggcggcgcgaccgcgatcgccatgtgccacgccaacaccacgagctgggacgcccgatacttcgagatgctgaacgcgacgcgcggggaggagatctgccacttcatgccgcggaactacgtgctgtggctgccggctgccgacctgtaggcacgcacgggcaccaggaacaagtgctgaataagagagaacagtaagtgatgagtatggattagcagattgtttgtggctttgtgaatcaacacaatacaactttacatttttcccatgtagaatgttcatgagaaacaatctgcagtatattcgtttgaagctgttggctgatttattgtgagagaaaaacactactgaatggctgacagattcagctgacaagcccaaacgaacaaggattatttttgtcagtatatccacgacagggctaaggagaaaatagaaggttggcaggagcgtttgattagcatagcaggaagaagagaactcattaaatcagtgattatagcccagccagtatatctaatgacatatatcaaacctccaaataaattcgtaaaggaatttgacaagctcaagagacgtttcttgtgggcgggacatggtgacctctctggttgcaagtacaaggtggcatggccaatagtgtaggccaa

SEQ ID NO: 4057 - DNA, 4257 bp, Sorghum bicolor
gggtttcaagcggaagatgaagcgcctgcgcgaccttcacgaccatttctacgagaagatcctcgtcgagcacgaggaacggcggcggctagctcaagccggcggcgagtttgtggcgagtgacctcgtcgacgtgctgttagagcgcgccgacgccgaggagggcacgcagacgcaggagtcggcggaggccaggctccctcgagacggcgtgaaggccttcatccaggacatcatcgccggtggcacggagagctcggcggtgacgatcgagtgggccatgtcggagcttctccgccacccggaggccatggcggccgccaccgccgagctcgaccgcgtggtgggcagcgggcgctgggtcgaggagcgcgacctgccggagctcccctacatcgacgccgtcgtgaaggagacgctgcggctgcaccccgtgggcccgctcctcgtcccgcaccacgcgcgcgaggacacggtggtggccggctacgacgtccccgcgggcgcgcgcgtgctggtgaacgcgtgggccatcgcgcgcgacccggcgtcgtggcccgacgcgcccgaagcgttccggccggaacggttcctgggcggcgccgccgccgccgtggacgtgcgcggggcgcacttcgagctgctgccgttcgggtcggggcggcggatctgccccgcgtacgacctcgcgatgaagctggtggccgccggcgtggcgaacctggtgcacgggttcgcgtggcggctgccggacggggtggcgccggaggacgtgagcatggaggagcacgtcgggctgtccacgcgccggaaggtgccgctcgtcgccgtcgctgagcccaggctgccgacgcacctgtacgccgccaccgactgatcggaaatacgctatggacgaagattggcgcacttttgacgtcaaattctacttcactcgatgcattgcaatgttcaataaaaggatctgttacagcactcgaattcgtgtggtcgttcaatgaaaaggatccaacgatccgtatataggcatatagcctccttcttacctcatcaacctcagccacctccttccccgtgacctccctcgttgtacacaaacgaaatggcagagcaagtagaaaacttcgtccaaaactttgtatgaaggagtaacaacttgtcaaaaaaaaagtttgtggaaactactttttctatatttcaggtgtctaaattttaagatgatttcatgcaacactcttgtactatacaattagtacaagtaaattgttacttttatgatttgttatttatctttgtgtaacaatttacttgtctgaaatcatcttaaaattcagacaagataaatactcagacgatttcatgcaacgctcttgtctgaattttaaaatgatttcatgcaacactcagacgatggtggcgggttcaacgcgggtgtgtcagttagggctccattgagcttctgctatctctctctctctctctctctctcttccttcttctctaactctgacgaatttagaagagatggggctcgggagagacagggttggcgggagagtagttttagggttctagtggtgacaaatgtggtcggactagattgggggggggggggcacctatggccatggcaacagcagtagaaggacaaagtggaagaaagagatcgctgcaagcgtctcgctcgcgaccgcgaagctttaacaagaccctaccgtccatggcaaggcggtgggcgatgggcatgcaaggagagaaagacaataagggcaagccgaggaggtgcgtgtttcacacactgtcttgtcccgtcctttttccccagagagagagagagagagagttgtgatcgtgtgtgtatgtggcctgtcgcatagttcatttgtcttgggccacgtaccgcaggcccatcctcttgggttggagcccagccaaaaaaaagccctgcttgccgattgtgacgattttgtttgtagcggataacgtacgtaccctgctgctctctgctctacactctactccacctctgctccgcagctcatggccatggcttcctcctccgtctccctccgtggcgccatcctccagcggccccacctcgcgccccgccctgccgcggccgctgccgcccgacgtgcccccacgacgaggcgccgcgccgtgcccgccaagatctcctgcatcggatgggtagtaattcttctctctgtctctgtggtggttttaccccagcggcgcggccactcgtttcttgactatgagagacggctgactgcctttgggttgggcaggaccccgagggcatcctgggcgcgccgcagggcggccacatcgcgcgcctcgagttccgccgccgcctcgagagggactccgacgcgcgcgaggccttcgagcgccaggtgcgcgaggagaaggagcgccgccgcaacgagcgcgaggtgcgtgcgtcttcctcccccacctaccggcgttccgttttctgggcatggggcagcggcgacggcggcacccccgctcctgacggccgcgttcctactgtccaactgctgctaggataggcgcgggtgatcccggacacggacgccggcctcgtcgagttcttcctcgacaccgacgcgcgcgagatcgagatcgagatcggcaggctacggccgaggctcaaccacgacttcttcggccatatctcgcgcgaaatagcacagatcaaatttgcagtcaccagaacagcggtaggcctacccttcctttgtagactgcagattagaatgatgaaccggctgaactctgctgaaatcaatcttttctttttgttgtaaacaaaaaaatgcaggagatggaagacagactgatcgagctggaggcgatgcagaaggttcttcttgagggagttggtcagttaaactctgcactgacggtcggcattagcgtgaaatctacattatagccgtgtctaactgtaacggttcctggtattgcagaggcgtatgacaagttgcagaacgaccttgttacggcgaaagaacggctcatgaagatcctgcaatcaagtgacagaaaatcgactgtaagatccatacaaggattaaataaaactctttcaacttttttccccctgaaactcctcgatcggtcagttaataaattggttgctgttgttaactaattttacgcagttgctggaaatggtggagcggaatgagctcaatatatccatattaacacttcttgatgagaatattgcaagtgcgaagacgagtaatcaggtggacgctgtgtctcagctgactatcaaatgtgctgaatagactaggagtatggtacatctttgatcatctgcattatttcctagttttactacttatgcgatttttgttcatctgctttgcaggatgaggcagctgctttcttggaggatgtgagatcatctcttgtgaaatatataacaatataaatcttgtttttacgtattcgcaaagaaaaaggctcattgctttggcattgtagttgtatccaaggcataattttcagaaacattgggttcattggaaagcgacatgtacttgtattttgttaggatatattgcggagtggaaatccgaattatttccgcctgtctgtagttgggccgtgtcctatctgaactatcggtgtcttacctcatgagtcctctatcgactatcggtaaagggaaattgtactagcaacatactgtaaagcttggactctcttctagctaattttacttctggcacatcctcaaaattgctgttttcttaatataagatcgggatggtcttgtttattgagttaatatatttaatgtttaagtggatggatgtctttcctcttgatgatcgtgccatttttattctttgcatatatcagtatatatatgacaagggaatatagttaatcttcaaattgcatttggagtccatgtagcccccaatattaaggttttgaaacatcacgaggcacatgtgtcagaatgttgcaatgccatctaattatctgtttgacttcttgttggatattcatggcctgctagcctgcttgcagagctctgtcaaatcacttagttcagcgatgggagcattgtttcttgtacattctaggtttcaaatgttcttgatcccatgaatcataagcttaaaataattgaaaagaaaggtgtacatcaatgctcatcctactgctctagtgttagaaatggtacaaagttttaaattctaaagtagaaagtttaaaatgtgctagt

SEQ ID NO: 4058 - DNA, 4703 bp, Sorghum bicolor
tttactttctagaaaattttgcaaaatttttcacattctccgtcacatcgaatctttagacgcatgcatggagtattaaatatagacgaaaataaaaactaattacacagtttggtcgaaattgacgagacgaatcttttgagtctagttagttcatgattggacaatatttgtcaaatacaaacgaaagtgctacagtgtccatttcccaaaatttttcggaactaaacaaggcctaaaaaaatatattactgtaacatatagcatggctccaacggcttcatgtccttttttttctatgtgtgggtcccgctatcgagccagattcggttctatacattgtgagccgagtagcaggaccggtcgaatcattggtagagccctctgtcgaaccgaacacagtgtttcccactacggctgctctaatgcagtagtataatctaatcatagtgctagtccacattcgcgcgctgggttaaattattgtgaaagaatgattaaacaacggcaagtacccgccggcgagaagttatggtattgggcgctctcggatgtcgttcgggcatgttcctacgatggagaaagctctactctagctagccaagcggggcttataataataataataataataataataataataataataataataataataataataataataataataataataataataataataataataataataataataataataataataataataataataataataataataataataataataataataataataataataataataataataataataataattgtcttggtgatcgattatggccttgtttagatgtaaaaagattttagatttcgccactatagcatttttatttgtttatagcaaatattgtccaattatagactaactaggatcaaagattcgtctcgcgattttacaggtaaactgtgtaattagtttttttctatattcaatgcttcatacatgtggtgaaagattcgatgtgatggaaaatcttaaaaactttttgattttcgaggttaactaaacaaggcctatgttatccgtttttgcggatgaggacctactattgtcacaagtgtttagctttaaaatgtatatacttaaaatcttttttaaaatcacgtgaatttgtaattatttttccatacaatatcttgatgattataaagtcataagccaaaatatttaagctttattgatgtttgtaactttaaaggtttgttcaattttgtattttgcacacgatgaccggagtgagtactacctacgctggccactacccatttgtggtagttccattacgcgattggccgtaaaaaaaatctagtttgttcgcttagctgataagctgatttattatgagaaaaaaatatactaaataactaacaaattcagtagataagttcaagtgatcaggctatacgtgttagtgtaacatatttatacaatatcctatttccatcttcttagatttggagcatgacaaacgacaaaagatgaaagcgccatgcatcttctatgcagtgttgagaaataaaatcgtttttagcagtaacgaaggcacctatgtatactattatagaccgtgaaaactcgagttttacaaaaatggagctacctccacgattacaaatcctcgcatacaaaagtgcgtttaaataaagtcagaaaaaaaaattggccctcgtcacgaagcccattgtgcagatgcagccatagcccaccgacctgtcgccacaaaagccattgcagctaaagcccaaccccgagatggccggccgacacagcagatgcagatcgctcgccacgcgtctccaccgtcggcaaaccttcccccaccgacggacgcggcgacccacgtcaccttccgccggccttcttctcctttccacccgcgtcttctccgccactccgctcttctccgtataaaggaaggccgaaggcccgcttccattctcgaagccgctgcggcacgcgtcctgcttctgatttgctttgcctcccagatcttgcagactagctggggggcagcccagccgagccgagctgatctcccaccccgcaacaccccggccgtcggcggatcgttcgttctgcgtctactacttgatctttgaacaagctaaagacgccgaagcgtcgccaccagcaaggtgagatcagagcccaagaaacgctcctctgttcctccccattttcctgcagtcctgctatgttactccagttggatggatcggtttgccatagcgcttgccttttgtccactagatttagctgcggttgcacagcctagatggtaccgactgccgagtcgattcttcggatactcactttgttcaaccactcaatccagatgccattagcctgttccaagattgcatcgtatgctgaacaaaattattgaattgcaactccgtgagtgatgagcagattcaatgctcgttttggttgtgccttcgatgtggtctagcattatctgcgtgaacatcgtgaaatggttttttggttgatagtataaggacctgtaagattctgttgtgggggaaaaaaatccatgccaatagaccaattgtcttctaggaatatgctccattcactagtaactgaaatttgtagctgcatcctgcagggcggcttgatcgtattcaagatggggaaggacaaagaagctaccaagcttaaggaggaggagaagaagtccaaggatgaggtccatctcaagatcaagagcaaggacaagtcgaccgccgaggaggacgacaagaaggagattgagatagagattgaggccaagtttgttgagaaggaagaggtcaaagactctggtgacagtgcagggtctgcaggaggaaagggtaaagaggggaagaaagacaaagagaagaagaaggagaagtcggagaatcatgaagatgacgaagatgatgagaaggtgatcaagaagaaggacaaaaaggagaaagacaagaaaacgaaggaagatggcgaagattcagaaaaggcagacaaagacaagaaggataagaaggctaaagagaaggatggatcaaagtcgaaggattcaagtggcgagaaacaagagaaaatgaaagatgagaaaaagaaggaaggtgacaaagatgtaggggaggaggagaaacacaagaagagagaaaacaaagataaagataagaaggataaaaaggacaaagaaaaggatggatctgaaccaaagggttcaagtgatgaaaaacaagagaaaggtaaagataagaaaaagaaagacaagaagagcgaagagatggaacagaaggaggaccatctagagaataagaatgataaggccgcacagaaggatgtccacatgaacaaagagttggcgggagctgcggactcgggcacccgcgaaatcaagctaactgacactgaaccacaggagaaagaaattgatagtgaagattcagaaggcaagaagaagaacatagagaaggacaaggacgaaacgaagaagaggaagaaggatgatggtgaggacgatgaaggcgagaagaaagacaaagaaaagaaagagaagaagaaggacaagggtgacaagaagggagatggtaagaagaaagagggtgatggcgatggcgatgaaggcaaagaaggtaagaagaaagacaaggagaagaaagagaagacgaaagacaagggtgcgaaggagaagacgaccgatccggtgaagctgaaagcgaaactggagaaggtggatgccaaattgcaagacctacaagctaagagagaagatatcctgaggcagctgaaagagctggaaggcggcggcaagggaaagacgaatggagagaagcctcctgcacaggtacaggaggacaaagggaaggactctggagaggtgcctgcacagatactggaacagggtggagagagcaaggtcaaggaacagaatcctgttgccgcagcctgatcttgtggagctcctgtggcggttgatgtaacaataactctgatctggttctgtacacatgcattatacactgtgtataggaatgtacattttgagctgagttgtaaaatggtacacatggcatgcactatcaggatctatgtctctcttactatccagtgaacggaacatatatagccgagtggaatgcgtccttttcctgatacataacactgtaatactttgctttgtgaataaaaggaatacgtggaaatgttgttgctgttgtcatatttgaaacacgtccaaacccaaagaacatactacctcaatttcaaattataaatcacttttctaaattataagtcattttaacttctttttttatacatccaacttgctattgtatatcatacatatagcaaattcgatctaccaaaaaagtcaaagtgacttataattagaacagaacggaatgggtagaaaatagtctcagtttcactgctatatgtatatgttcccaaagatttttacacccagaggaagtccgtcttgctcggaacccaaaatggcaaagacctgatgatatcatctactatctatctacacctatgattctctcttctctgatgacttcggcacaaccgcgtcacaacatatgttatctacgtatggtattccacggctgagtagggaaaacagagaatggctcttcattcggaactcggcaggctctgcaggtacctc

SEQ ID NO: 4059 - DNA, 4658 bp, Sorghum bicolor
aggagtcttgccaaacaggctctaagttttgcacaattatgttgttttttactctgtaaataagatataaatctcgttttgagtagccaattaatcttaaatttttctaggtttatagaaaaatattatagtatttatatctccaatagatttgttatgaaatatattttataattagttaatccaatgatacttgcatatcataaatgttagttttttatatatatttggtcgattgatttactcctaaaggtgagatttatattgtttttttaatggagggagcaccactacttttttatgcttatctttctaaaagctttgcaatatatacacccagcaggctagcagtctacttgacaaatcagtttgaattcaagcatgtattgtattgaatcacggtccgctttcccgtttggttacgtgaaagttgcgttgcagcttggttacgagacagaagtgaaaaacgtctttttgaaacaggataaaaacagtaaactgaatgacaaataaatagaaaagtatatctaggaaacaataattaccgagatcaaccacagtacgaatagtacctcaagctctgtttggtagtgatacagggctatattagtagtaatgttactacaacagtcaaacactcgcacaatcatgattttttctgaaaccgataagagtaatatgcaattatgcatataggcatatagcgcagtggtagagaaattattgtgtgacatatatgccaatcgaagcaatactgattgtgctaggattaatagccaggattcgtcacctgttcttgcatgtggatgtcacctcccgggaaggtgttgttttccgaaggtggttgagatcttgttaatgaaatatctcaggaaaggccttcccatgggtcaagttttttttttaaaaaaaaacaaaaaagtcgcaaaaacccaagtttctaaatattttggtaaagagcatctccaacaatgtttttttagaaaaaagtacttgccaaattatttactatttccaacaattatcgataaataacctttttaactcactctcagcgattacctagtcggcagctgtctaccctgagcacaacccctctcctaaaggcagcaaagaaaaaacacgaaacatttttttgtaggaacaacgaaaaattatgaaaaagatcatgtgacataaagaaccgaacgattcaaatatacgaggactcatacgagggattgaattaccaagataaggctatttgatctttcgaaaaaaaaaagataaggctatttcgagactgtttcattttatattttttagttctgctctatattttgtagctaaatggtttctacttgagaaaaaaaatatggagttgtaaaaacatctaaaaggttctccacaaactttacgttttagtggagtcactctacggtagattttatgaaacagtctcaaacatcctctaagatatactgtttagaggcccgattttttatgttttactagcaaaacgtgtttaggagttgaattaggccagtctcagtgtggttttcaccaggatgtcatgcacatttattagagcgtcatgtcagcaaaattgcactttttgcatgaaacgaagaggagagagaaggaagtaacagtgctagtagaaaactgtgacatccaaacgggtcttaaattactgttttgctatgtgactgaaaatcaagcattgttttattgtttgggaatgacaagagatattatattaataaactttaacacaggaactaatgaggacatgggcgggtccacggtacagccgctttacgcaaagacctctgtgtctgcaccagtaccagactagagaccaccagcatcaactactactcggcttcgcggcagtacagatccggccgacactttcgtcgtcaacctctcgccatttccacatccttcctccgccgacctcgacgcaaaccacagcttcccgctcgcgcttctccagtctcccaggatctgctctcgccatggtaccgccctctttctcggcctctgaatccagtccccctctcctcccctgcttcctcctgcatttgctgccgttcttggatgcaggttgcagggacggacccaaataagggggccgaatgttctcttagagttcccacacttgctgatgcagtgctgcaagtgcaacccctgccgctcacgctgcgtcgcccgtcggcgcctgccgctcacgccacgcgcggcgcagccgcagctcgccggcgtgccgtgcccgtgcccccactggccaaatgtggaacgattaatttggtcgttgctatcgattgttctgttctgcgtgcggcttgatttcgtttagactctagtacttcatttcctattaagttttgggcccaggagaaacaaagctttccttttcactgcaaacaagtactcctaaccactgaaaggatagctagcttcaatttgccgtatttgtgagcatgtaagctgtaaataaaggccaacctaacccacgactctgcttattccatgctgcattcgcctcccaacatgatggatgggctatgacttcaattacaggatagggaagccaagaaagaagcgttcaggaagtatcttgagtccagcggcgtgctcgacaccctcacgaaaggtttgtgttccatccgctgtgtgcctctgtaaaccactagagttatgtaacgcgctagttatatcttcattttgccacgcagttcttgttgcgttgtatgaggagaatgataagccttcatctgcagtcgagtaagttgactcatgtatatctactagtgactgagatttccttttgcttatttggtttgacgaaatggcaatcttggttcgatgacctcaacatttttcatgtagcttctgacatgcttgtatactcttagatttgttcaacagaagctgggtggcccatcaatttctgactatgaaaagctcaaggcagagaagttggatttgcaattgaagtatgataagcttttagaaacccacaaggaaacatgcagacaggtatgcaatgttactgtgttggcagtgtacactactgtctgtttagactatctccaacaatcgtcacccaaaatacaagacctatttatcctttgggtagcgctacaggtaaaaggttccatacctatttttagtcttctccaacaacaagacctaaaagacaacactctctgcaaatgggtctcgaggaaagaggatacctaaatttgggttatgcctctcatgatacctaaaatgagtcttctgtataggtattctgttggaggctataggtattgtgttggaaatctattttgggtttgggttcccatatgggtttcttattggagacagccttacatggcatacttaatgttcagtagcatttggtattacgacttcaccaattttttgtacaaatgttatgtatgattaagaagtgttagttgttattgtctcaaagcttactgcttgtttgaagtaattgtgcttgtttgatgatgaagctcttgcattccaataatgtattcattgcgataattctgtcttgaacttaagcgctggtaatgttctgaattccactagcctgcataatgttcagcagtacccaactggatgtgtttggtaaaaataccaataattacatttaaaaaaactctcattttcatcacactctgatctggcaaaaaaatatttgtcctgtaaggtcatgtttctctcctcaagtcatcattcttgtgtcttggttttatgcataaaaaaaattagttagactgaaaggtaggtagaatgtgcggcaaggagttgatataataagctagatggcatttcttaaccagtttatcctgtggatttctaagtcctagttaacttgtttgtgttgtttcctcatatgacagttagcattttagacttgcaaagtcctatgcttttaggggaaaaaagagcttgtatgttctgacttctgagcacaagatgacatttatctggagttctggactgtatttcagttatgatttcacaactttgttgtgaatcccaagcaaatttcgcatatgatttgaacataaatgaaactggcattgatcagttgtctatctcattttgcagctggaagaacttaagaatatgaagtacggtgcaccttggaactgaaacaacgtgtgttgacattgtaaatgtgtcatgaagcatgtacttttacacctctctctgaagcattgctaagctctgtatacaatcgaaacatctcttactgaattcatgtatccgattttagccatatggatcccttttggatatgaaggcacctaactcgctcccggtcccggatattagatatcggcaatgcaggatgaaggatgtgacaactaccatagttgaaccattagctagtatcaacaaggagtgtgatctattgactttaagactttttcttagcatgccatgtaaatcagatttaaggatatttcagtggaagagatatagagcctgtttggtaaacccctagtcaggcttccataatacagactgggtctgtttggttctctagtcggcctcttagctaggtttacgaaagcccaatttgtacggttttcctccaaggaacgcccgattcgaccgtctccacggggccaagcttgcgctaggctcga

SEQ ID NO: 4060 - DNA, 5036 bp, Sorghum bicolor
gaccgcgctgagcccgtctaaaaggatcctggtggacgacgagtaaaacaacctgtgttccttgttgatatgggaagaagtttagaatagatgtaatgaagttagaaaataaagctaagtatcacgaaattaaaatatggatttctcgagctaagggcatatcacaaaagatcaatccaataaaactggtgttgaaatttgtagatctctcgggaatttatttcacatttatttaagttctgcgcattacagtaaaatttttttggttaggccttgtttagttcactctaaaaactaaaagcttttcaagattctctgtcacatcgaaacttgcggtacatgcataaagtattaaatgtagacgaaaataaaaattaattgcatagttcacctgtaaatcacgagatgaatcttttgagtatagttagtctatgattggataatatttgtcaaataaaaacaaaaatgttacagtatcgaaatccaaaaaaatttcgaaactaaacaaggccttagaataacatgtgcaaacttatttaaaaaaggtagaggattatgttatgaatctaaaaataacgattttatattggctctattgttattttcctgtgattttcacaagttaacagcaaatgcattcatagaagaaacgaccaaaccgctacagatccacatcaagtcaaatgggatccgcaaccagttgagggctcctcgatcgtttagggcagtaagtatgacaccaggattcattccggccgatgaaatcttattatatatatatatatatatatataaataaactaacaatttcggtcgggaattgtttctgggttgactcaggggaaacgaacagggcctgaagaaggagctcgagtttacctcgttgatgttgaaggacagcaaagctagctctgtgtgggcgtgatccccggcgaaagtgacgatgggatactggtggagcacttcgtgcaatcgtgctcttttgtttctcttgttgtgactcggaagcggccttactcgtctcctcgtgccgaggagcttccgccactctgccgctgcgctgtagcgtgtgactcggagatctgacggccggcgccgcgtgggcaatggcgagggggtgcgagtcgctgccgctgcagctaggtggggggcggcgggccattgcttctcctcgcgagtgtcgcggcaggcagacgtcaagcaggaaacgatcgggagatgcaaagcctggacaggggtgctccgcgtctcctcgccggtcgccgcgcgcgcgctctcgcagggagcacgatggccaagggccgagaaacttcgcgacacatcggatgtgggaagcggacagagacccggatcgctaccgcatcatcagacggactgccttgcttgcctatcggatccaacgggcgacgtggccaaatacggtgcaagattcgtcttttcaagatactctacgtctctaccatatatatgatttatttatatgaagctctttttggaatattatatagggtatataaaaacaaaaggtatatccatccaatccagcatgtgcaaactttgcacgaccacacgacatttatccatgtgtcaaaaaggattcactaatttccagcaaagtttatcgattcaaagttctttctagcaaataaattgcatattatatatgaaatactttggttcttaataaagcaacaaaacttaagattgctctgagaaattggagcacgtttaataatctcaaaaaaaaaaaaaagaggagagaaacaaacaacaagaagaaactggatcatgtttggacttgtctgcactgcagacagacagcctgcagtgtggctgaaatcgaagatcctgatttctgccggtgggagtgggagcgagcgacgcactaccgacaatcccaggatggaaggaaatgcagaggccacgagcaccaaatccgcacgagcgcagccggaaaatatcgaaatttccgtagtccggcgccgccgcccgcctgatcaatggagctctccgtcgtgccatccctctcgctgtccccgcgccgcgcccttccgccgctcccggccaggagggcggcgcggcggccggccttcgcctgccgctgcagctgctccgcggacgccgcgtccgcggtggccacccggcggtggttcgcctccctcctcgccgccgcagcaggttcttggttgctctgctctttggttgtctgggttctgttcgccggggggactgcgcgttctgatcgtttctttgcgttgtttggcgtagcggcgggggttggcgtggccggaggccgaggggaagccggcgcggtgtccaccagcaggagggcggtaagcacctgacgaccttgtactcctttagaccatctatcaggattgcgtcaggatccattgatcttgtgaagttgggttgagatgtctgtgctttgttttcgtgtggttgcagctcagggcgtccaagattcctgacagcgaattcaccaccctgcccaatggcctcaagtaagcgcttcatctgatttagtttgtgttgctgtcattttgggggaaatttggttctgtttttagtgtctcatgtattagcatgggtatgaatcagagttcaaaataggtcgtttcactgacataaaatctttattcagagatcaggcattttgctgatccttgtttcactgaaaagatgaagcatgcttttctattgcctgaatctgcaaagtacttaccaaatttctgactaggtactatgacatcaaggtaggaagcggggctcaagctgttaagggatcccgtgttgcggtaagtaccaccacaatttgtgtatctgggatctagcatgacatagccttaatggacgaatcattggcatttgcatttgtctgcagtatgcaaatcatacatgacactgtatctccctaaaaaatatagttgacgctgaatgcaataatccaaggaatagaggaatggtgaccatgaggtcccttgactcctgagactgggaagtctgaattgtgttcatttgcttactgatttgaagacggaattaatctcttcttgttttctaatgtgctcttgtttttttaatcatgtgaataaattaatgacttgcttgaaattagttagcatgctataactagttgaccgctgaaaagtgtcccctaaaactaagagatcccttttgaactttgattttatcatataccacatgccagtgttgtcatacaaaaaatgatatttttttaactacttacaaacgacctgtatgaatgtttaccagctgcattgttattacagataacatagctgcatttatcttgtataatgatcaatgcttaagttagtgtaggtacattatgtggccaagtggaagggcatcacattcatgacaagcaggcagggtcttggtgttggtggtggaacggtactgctataacatattctgcctctttctccatataattgctacatgtcctcacatcagaatgtgcttttaacttgtaccagtcagtggtggtattgagctaaattttcctgacatctttttttttactgtcatcctgacatcttatgaaatctaatattggagaagttccttgctcctaattatataagtttatcattattttggtgcttctttatttgcatgagtagaagtttctggacagtttccatgttacttatatttgataatctcaatgtggttgtttaatatttgctgttgtttacaagtcttaagattatgtgcagccatatggatttgacgtaggcaattctgagagaggcaatgttttaaaaggattggatcttggggttgagggaatgaaagtgggaggccaggtcagtaaatgcatcttttgatttggtttccatatttgacttttcatttcaaataaaaggaaatacatggactctatctagaacttatatgggcactgatatggttagctatgaacctgaatgagtatgactaagttctccgtgtgtccatcattcaattctttacgaaagaacaatgttaatgtaatttgttgtgcaagttccttgtgtgatgccttaaaaacaatattgaatatccatttgtgtttcaaacaaaagaaaagatgcataacaaatgttggtctactccatccatttcattcttttcaacacatatatatgggagttttaacagcattggaaaactttcagaggttgataatcgttcctcctgaactggcatatggaaagaagggggtccaggaaattcctccaaatgcaactattgaggtaaactgacatttgtttccacatcatttacaaattgtcatgttctttatcagttgaaatcatctcttcagttttggttttttccatcttatttttttatgttcccatttttcaatagctggatgtcgagctactatcaatcaaacaaagtccattcgggtaagtgtggttgactgcttgtagttgacattaaattttttttctctccaaccgccatgacaatataaattttcttttatgcaggactcctgtgaagatcattgaaggatagttgtgcatagagttctgaaggaaatggtacataactacatatttgcatggacagtggagtgttgctattgaaaaaggctagtttaccaaatatgctggtgctattgcattgatagtattctcttgtaagatttcaaactttattgaaatatagatttttttccccccacttatatttgattaagatggatccttaccgatttctccattacctgtattgttagaagaatccttgcagtaaacatttagttgcaaagaaaagtataaatggttggctaccttgatagttatataaataaaaataaattgatgtttgggattccatgtgcagtttgttatttgagttaatggaagaagtgcatactctctgcgtcccaaaaaaaatgtaatcctcacttttcggggaattaaacaattttaagtttgtattttcatagcaaacctattttttgaagacataagtttaatactattcttttgtataaactttagaacataaga

SEQ ID NO: 4061 - DNA, 7003 bp, Sorghum bicolor
ttatattgtaactattaggtattataaatctttgtaattctctctataatttgtgtccatgccgtttatcgattttccttgtggaataattctttttgcaaatgaacaactctgtttttagtcttctttttaatgcctatctaagaatatctttcattcccagattcaaaagatgtctaagccaaattgtcaaatctggctcagtttatgcccaaagacttactttggagtgcgtttagcttttcttattacgtatattccttctgtccttccattctcaaataggaaggtgcatgtgaagcttcattctcgtccgtatttttatggtgacacgataaacaatcgtgctcttcagtttttttttcaagaattacacgtagatgttcacaatatgcatgcacacttatctctatgaacacatatatataaacctatcctgagcatgggcagatccatagtcaatacattggctgcggccgcacccagagaaaaataaaaaacagagtaagtgctaaattttcactatatttgcacctagatgtcacaaagtcttgcacccataaaaggcgagtgcacctccttggatttgctctagctccgccactgcttatcaccttcgaaggattgagtcaagagatgttaaaattcatatacgcaaaccctactgctaaaaccttcaaatttatataataataaataaaataacaacatttataataccagtaagtattattatattcttcataaattatactttcatactataactatttattctctctataattttgatcaaacttgagatatttttttactctcgagaaagttggaaagtgagtactacaaaagataactaactccgtgggctaaggtcatccgatcttttgtcattgaaaaaagaaaaaatccacattacctcttcaactttttactaaagtctattttcctccctgaactctggaaacgggtaaatcacctccatgacttttaaaactgttcattttacctccttaaccgattataagcagctttcaaaggcgttttttatattttagctgattctttgaaaaaatcatagtaacttacagaaaaatcattaaataaaaaatttaatttttttggactccaaatgagtctacacaatggacatataatatggtatgtttaatataatttttttgctgtagtcttagatctatgtttttctgcaattaatacataggtgcaatttcgatggtgtaagagtggtgaaacttttatagtggaataattataatacatgcttaagctgtagtaaaaatttcacttattgaatcgtggatcatgtaataagtttatgtattgtcgcgcgctatgatctgtgggccgttctgggcctgttacatatatagcctgggctgccgctggattgaatacttttccacaagatagatagcgagcccccttgcttcaccgctgtctcgctttccttctcccgttcaccccccacctgcaacaagttcctctcccgtggcaacgactgggcgacgcttccgccgccgccgccgcctcctcctcctacgcagattcccagttcttcgccggtcccttcgccgcgaaagagcaaccactaggtatgactaccccttctcttcccttagctgccgtgcgaaacgagcacccaaaccctaactccagctatttggctattcgtattcggatctgatctagtacatgggtatacatgtattgcgcctactggcttcgatttgtttcgcaaaaattatagggtgtatagcggtatacgcatgtcctttactggttccgcgcctgcttgcctcgagcgcaaaaatcatactggattttagatttctggactgttttttattggttataaattctactttatcctcgtttgttttgagcggttcgcttgccacttaagctataacttgcgtcgaaaatatgtttcaggctaaatctgcgagcggggcatctccatcaagtgactggtgctaattatgcgatcttcatgggctgactcagttgcgaacgccgaggaatcggcgcccgcgactgctgctgctaacggctctgttgtgactcatggcaactcgcgccccacgcgcagctcctacgtgcctcctcacctccgcggccggccagctggtgccggctttgacacccaagcgggcctagtagcaccggcacaaggtggaccactgccctcggctgccgcacaaccttctggtcagggtgctgctgttggtggccctcgctgggctggcattgtgaatggtggtggtggcagcgttggtgctcctcgccagggttatggtggtgctggcgggggcggaggacgtggtgcttggaactcccgtcctgggggttgggaccgcagagaccgtgagcccgatccttttgccaaagctgaggctgaagaagttgactttgagggccaggagaatactggcatcaattttgatgcctatgaagacatccctgttgagaccagtggtcatgacgttcctgcaccagccaacacatttgcagagattgatttgggtgacgcattgaatgagaatatccggaggtgcaagtatgtgaaaccaacaccagtgcagcgttacgccatcccaatctccattgctgggcgggatctcatggcctgcgcacagactggatccggaaaaactgctgcattctgtttcccaatcatcagtggcatcttgaagtctccaaggccacaacagaggtcgcggagctcaaggactgcttttcctctggctctgatcttatcaccaactcgtgagctttcagtccaagtatgtcaaaccaataaacatttagtcactaataatttttgtagatcttgtttttcttctaacaattgatgccttagatccatgaagaagcaaggaagtttgcataccagactggtgtcagagttgtggttgcatatggtggtgcaccaataactaaccaggtatctgttttgttgatgatgtgtttctattgttattgcttgtatattaattgctgcatatctcttcacatttttttgtttggtagttattgtggctccttccagtttaaattatcgatgttttttttttcagtttggattttttaacaatatcaattgctgtaaactttgtttttttacattcttttctactgtaagaatgaaatggtacatggcaattgatgtaaaatattgtagttgtattgtactgcaaggaagaaaaaggtgccatgactctcatattgctattggagaatcaacattggttgttctagtgtaacaaaagtagattcaaagtattcttttgctagttgccatgccacatcaagtatatggatatctggatatgaaagcaaacatgtcttgaatcactagttgcatcattattttttcttatgtatcagaatgttgtggtgtcattgggttattgatttttggtctacactactaatgaaatgtgaaaatcatctttgtttataatgtatttcttgaaatattgcagctgagggacttagagagaggtgtggaaatccttgtggcaactcctggtcgcttaatggatctgttggagagggctagagtctcactgcaatcgataaggtatttagctctcgatgaagctgatcgtatgcttgatatgggttttgagccacagatacgtaaaattgttgagggaatggacatgcctcaacgtggtgagaggcagacaatgctgtttagtgcgacattcccaaaagagatacaggtttgtttctttcctgttctctttccacccttcaagtaatgtcatgtattctgttgtgtctattattactctagtggtttcatagacttgaagcaaccaatggatatgcagtgcctacactgtatgattgcatgtgtagtcgtttcttctcttggtttccttcatcacaatgactgtgtgcttgatacacaaaaaatgtgtttaatgtcagttctaatgcgttaaattcttgcgatcaatcatggtttaatcagaaaattattaatttatggaagacagaccttattttttttttctatttctggcatagtatgtttttttgaacaagggtctgactaattgttttagagctatggaggctatgtttgcaatgcaatactgctgagtttcacaactatatgatgcaagggccaccataaaatgtagaatttttgctgaaaatatttgtgttccttttcatttcctacgtaaatatttgttatgaagaagctgtaaagaaaatgaagtacctttctgtccttatttacctctcctatgtacttccaaaacttcttcagtattatcatgcattattttctcttggagaagtgcaacacagttaattgatggtacatgaaaatggtatgatggtcatgactcaaatgtggggattatataaacttggttaccccccacaggtcgagttttttcataacggtatagtggtgtttcccaaagcattttgtggttaatttctgctattataggatctttatcacaagttgttcgctgtagaatagtttggttttataggagttgtgtgctgaatattatatatatattgttatgcagaggatggctgcggatttccttgctgattacatctttcttgctgttgggagagttggttcaagcaccgatttgattgttcagagggtggagtttgtccttgattcagacaaacgaagctacctcatggaccttcttcatgcacaaaaggctaatggcacacatggaaaggtactatatttttcaggatttgttgttatgttattgggttgaagtttctaacacctattaaacttaatggttatatcctactattttgtatattattatttcctaacttgttcacagttttcatggcactttatcttttttttctttgtttgatgcagcacgctcttactttggtctttgtggagacaaagaggggggctgatgctctggaggactggctttttagaaatggattccctgcaactagcattcatggagacaggacacagcaggtaggttgttggtttcatggtttgactaccttgcatgcttttttttacattgcaatcaatagcgcatgtgcatacttatttaatcacttagtatcttcgtaagataataatatgagtaatcgattgtgcaatttgatttgttattaatgctagtatatcattagaaaagagtacatatatcagatgcaattttgttacctatgtgttttgtgacattattgtgtatctgcttaatgaataaagctcaaaaatcaaaatctgagcatccaattaataaaactcaactctaaagtttgcaatcttttctgtttcttcagcacgttaaaaggtgccattgatgtgtacatttgaaatttcaattattgtttttattggaatgttattagggtgttgattacatctagcaatttgaatacaaaagaacacatcttctggcgctgttatttcatttgccgaaaaatcactgctttcttctttggtgcttctgacctgtagagttaattgttagtacaattcatgagtagaaagataatgagttgcatattcagaaaatagattcacttctcatccacatggactgctgaatttttattgctattgctttaatgatatggctattatgtaaccttaatgttcgagattccttgatacttggttgaccatattactgtttgttctttatgcaggaaagggagcatgcacttaggtccttcaagagtggagcaactcccatccttgtggcgactgatgttgctgctcgtggtcttgacataccgcatgttgcccatgtgattaattttgacctccctaatgatatagatgattatgttcatcggattggaaggaccggacgtgctgggaaatctggtctggcgactgcattcttcaacgagagcaacactacacttgcaaggccgttgagtgatctcatgaaagaggccaaccaggaggttcctaagtggcttgaggggtacgccgcccgttcagcctatggaggcggaggtggtagaaaccgcagacaaggtggcggtgccagatttggtggccgtgatttccggcgagataggggcagtggtggagggtatggtggtggttcctttggaggaggtggcggtggtggtggatatgggggatcatcaggatacggtggtggctatggcggcggcggtggcagcggctatggtggtggtcagagtatgagttcttgggactaaaccagactctaagcgaaaaatgggtcaaccatgatcaattagtccctgttgggtggaacgaatgcttggaatttgttgcttgacttgacgagtacggtgtcgggaaatgtcccctttgccttggttctggttaaatcttgtgttttgtgttgtactagggattggcttatgttattatctgaattggtgggttcttctacgcctcatgcttgtgctgtctcttttcacggaatatctgtttgcattttatatcatttgtttactcccaatcatagatataatttcatttgagtttgtcatttaaatcttgaccaccatcactatcaaaacttcagtataaacataacattggtgttacgaaacttcttatagaacaaacttttatgtagacactcgttgtctaagataatatatttttatagatgtttgttggttatatgagtaaaatgttcataggacaaacctatatggatttatattatatatgatgatggaaggatctatatttgtgatgagaggaaagttttcagatgttgactttcatgggattatatttgtgattgttcagggtaatatttgtaatagggaaagttgatgttatttgttctcagggtagctcaagctttgtttctgctattttctggcaatctctgctgatgtggggaacgccgacttttcatttgctatgactatgagcatgacattggccttttgttattctcctgatcatattcattggcatcccaaacgtatcaaagttatcgcttat

SEQ ID NO: 4062 - DNA, 20498 bp, Sorghum bicolor
ttgtaaaatatattgttcaaactcgaactcgtttgtgagatataaaaataataaatttctagcaaatcctgtagtcaactttcttgcttgaaatttgttatttttatatctctcaaacggatttgagttggacaagatattttataaggttgtgtatcatcatatcatctacatgtgtgatttttggtgaatttaaatgacctttttactatggtttgcacgacttttcactaaaattatgattaaccgaatacgtgttagtttagcattgagcttttaccctagtccacgtaagaaagtaaatcgaattcaaccctttgccatacgtccacagattttaagtaaattagtttcaactcttgccatacgtccacagccttgccgcacacaccgcccctcctaccttctgtcttcttactccaaccagcaaaccaccatgtcaaagcttcaggagaggaaaaaaaccgtgcgcgccaccttcccacaccaacctttgcttgcggcctccaacgccggcctccacttgcgctgcatgtactgctcccgaggaagcaatggcaagggtcccttggccgacgagtgcaaaggcggcggcaccggtgcaccggcgcgggcgcttgctgtggatgtctgtcgacagaccgatgttagttttgtgctcgatatcttatctatatatatatatatagttggtgtctttttttgttataaaatttcatcgatttgatatgtgactccgttttgaactagatgtagaatctggattggtttggttcgttgctgggaatgtgtcgtgcccgggctggataccagatagccatgacctttagcttgttgtggcctcgaatcaattggatatgtggaagaacttggtcttcatcagaggatgctttcggactacggaccggggattagtcaggagaccagatgaaattacgtctagacgaaaattttggctgaaattttggctcttcagtattaaagatagaggtataggtatattccctctgttccactaaaagtgtcgtttttgacttttcattcttcttatttgaccattcgtcttattcaaaattttataaatattatttattttgtcatgatttgtttcgtcaataaaaatactttaataatgatgtatttattttactatttgcataaaaaaattaaataagatgaatggtcagacaaaaaacctaaaattaaaaaacgacatttttaatgggatggagggagtacattttaatcaaaaccaataataactcaaacgtcccaacatgttagagctattttcctaataccagtcttaataataaaagaaattgtgagagtttcatatatattaaataagatgacatggcataatataaaatgaagagagagatgataaaaattttagaggatgaaatgagttttataagaataaaacttatttacactgttttaaacacctcagagtcttggaaacagaaacataaaactttcactgggactgctctaataaaaagcctgataaaaaactaaaaaagagcctaagggtccgaaactctgaactcattttgaggcgattctcctattctattttttttagggaaattcttctattctaataatgagaaagaagaaagggaaaaaaaaagagcgtcagctatttggaccaacgcaacttgggccggccttacgagaggcaacaaatggcctaaacacgtttcagaaaaaaaaatggcctaaacaccgagcccacagcttttcaaaaccctagcccagcccatttgactcactaaaaccctaacccccaagaaggaacaaccagcggcctcattcattttacctgcccggcggcgactctgctctaagttgctgacggcgagcggcgcggacgacgagcaggcagcccgcggcgtgtcacgggagcgctaggagagtctgttagggcatatagccgcagcggaccagcgtggcagcggcgcgcgaccgaggaggttagagcgttcgccgctatggcgccgccgcgcggcgacaggaagaaggggaagggcgccggcgggaagaccgatctgcgccccgaccggaagcagttcaaagggcatcgcaaggaggttgcagccgctgagcagggggatggcgacggagagcggcagcagttggcagcgccgggttccgctgcgctcctcgccgcagcttctgacgaagctgacttcccgagaggtaagcgtcgagctgcgcagtcccgcaacaccctcctccctcgtccctgtcaattttgctttgcactgatgtggtgttgtgcgtttgggttgggtggtgcgcagggggacgcagcctcctgagcaaggatgagatggcggaggctcgcgcggaggcggagcaggatttcgagagggaggggaagaagggtaaggggaaaaggaagaggaggggcggcgagtcgtctggttttggcccggacgacgacttggggacactctttggtggcgccaccactgggaagctcccacgctatgctaatcgcatcacagtaaaggtgacctcctaaattcagttactgtgtagcaatgggtagaccttccaattgaactgcatcataggtccttaaccttgaaatccgcacatttaggatctcttaactgctcagtttaagtcaagagtattgttttatctagcgattggaaatgagaaaatgctatagagaccctaagtgtgatcccctgttgtgcacttctctctaaacagtcagcctgttaaagagattggttgtcaggttgtaattgtataaccttacacgatagaattaaatcttgtccatcataatgctgcaatgcgtgattctcgtcggtcgctctaagctccaaccatcctcgtatgcagcccttcaacaagtgccggattgtgattccatgcaccatgtaaacagtagattagtttttatgaagttttataaaatctcggaaggaccatttagttgtgatatgcattcatatttatctggtagcatgaaatgggttcattagagtcagaggcaagctttgactgaaaaaataacaagaatctggatcacatattcttaagatcatttatgtgctgtcccaattggcacacttgtctgttatatgattttcatatgtttttgtcttagctactatccaaattattcaagcattttaaatttggagggtaacttgactaaggtgcacacaccattttgttagaagttggaaccatggttatcgaggtggtaagacaaggcatggcgactgactactgccttacgcgtaagcagctaaggtgtgagatgagccgaggcgatgccttaccactcgaagtaaaatgcaaaatagcagggtagagcctcggaggatggagaaaaaggaaaataaggaaaaaaagtaaggaggaggagtaaaatgtgggctagaccaacccatgtgcccctctcctcgtggtgtgaacctgtagatgaagtctccaattccctctctcccaatcttcagtgccgcagttgcacctctgcccctctcactcactttcctctctccaactttctgctgcttcccctcctttaccaaaccactctgcgcccctcagatcgagtgctgctgacatccccatccaaatcaagggattgacaggtgtgagaaagtgaaatcaagatagcggcagcagagccaagcagggctagaagcaaaattgaacgggccagcagcagaattgggggggatagggtggaatcgatggggtgaacgcatacgagcaaggcgaaggtcctctgtggcgatcctagaccggtctgacgcttaagcaacacttgaacaatttcttaataataaccatggttatgactaattgtatatttctgtcctcttccaaataaacacagaattattggtacgtggggctctacctctcttctgcaccaagcgcagagcagccggggcttgaccctggcgctctgtcatcctcgttacaggctatactccctgcccattccaattattcaatggcttaaggagctagtcttttattcttatgttgtcaatttacactgaacttctctggcatgtttggtctaacgagtagctggtgagagcaaatatatttgccattgctattcctggaagcgtttcaaatggttcagatgaccattcaaaccctgcagcacatatacgatgcacttcccatccaacctttgtaatatttttgaactaaatgctctccataaaaggttaatggattagcctgttttagacagttgcagttgcaggaatattgtacaagttatttacctcaatgctcattaagattaaggtgatgtagcgctacatacggatcactcattggtcattgcatagttgaggctgacagggttgccatttggtcttttgaatgagatgtctaggttatatatcgctatcttgtattgggtggtgttagtgtgattattcttatttgttaccttgaaatgtttgggttttggaacatgtgatgactggcctcaggttggtagtaaatgtccttattttaagtcagctatgtgtattatctgtatctatttattgagagcatgttaacatggacatgtagtggtcagttctgggatctcctattgttgttgtctttaaatccttcacaaattgctgaactggtcatgacatttccctccctttatcagaatatttcaccaaatatgaagctctggggtgttgtaattgaggttaaccagaaagatattgtgttaagtctacctggtggaattagagggtttgttcgctcagaggatgtgtgcgacattgctttgcaggaaaatcgcaaggtagatattttctttttaagtaatccataatcgatatttctttttcagtgatttgccatctggtgaaccaactgatactgtccttttgcaggatagtgagaacagtttatgtgcaaaagttgttcatgttggtcagcttgttccttgtatagtcctacgagttgacgatgataagaaagaaggaaaagtaaacagacgggtttggctatcattgcgattaagtctactgtacaggggactttccttggatggcttgcaggaaggaatggtaatttttaatcaccctaatctggatgtgcttcataagctgagcttttggggcagaaaaatatcaactatggatggttgtttcattgtgcacctctgtccttaatatttttgtattataattcacaaccattcgagtgtttggttcttgattaaatgatttgattattctactgaaattgtaaatggagcatgttttctgaagaaaagttggggcaaaaatttacatgcaaaatcagaataactggttagcacacacaagcttgttaatatctgtatgagcatatacacccagaaaagatcagatccagttttatagtgaaaaaaaaatcctaacaggctattgggaacattcaccattttaaaagaatctcatttcctcctcatcctgtcccatgagacatggtaacatgcacttcccttctctctcccccccctcctgccctatttgttgagctggagtttaccaggtttttcaataaactattgagcttatctaactaaatgtttgttcataataaatcagttgttcctttgatagctatacttactactgagtctcatatgtggaggtgttaacagtcttgcaagttgcaaccgcatcgaaaacaacgagcttgatagggcatgcttgactatattaattttttgctacctgattactactacttgatctgaagtatgctagatttacttaaccttttctttgtataggcctgttttatgctccctgctatttttttgaattcctaaaatcctagctgtggaacttcctaaaatttgacaattgatacatttaaagttatcgggatttgctgtgtgaaaattatattactagaaatgcttttattattatatattgatgtaaatttatagaaggtagaggccaaagtcacatcatagggaccacgaaacgtcaaaaacattcaaacaaaaagaatggagggagtagttcccattggaaacagttagattctgagtcaaatcttttatgtaatggatgcacatgtatgcgtttcattaggtacttgctgcccaagtcaaaagcattgaggaccatggttacattcttcattttggagtatcctcctttagcggatttatgcaaaaggatgacaaaggtacactaatcaataaattcattagatcgtgaaatactggtgtttcttcatgacatattaaaaataactgatttcagtagctgctgttctaatagcacctgttcatattagacatcagatcgtgaaatactggtgtttcttcataacatatttaaaataactgatttcactagctgatgttctaatagcacctgctcatattagactgcgctcactgataacatataagttttgcctaccaatcttgaagttctttctatctgttttagtttggactggacttcctgttctagcaagcttggtcgcttatgagcttgtgattatattgtttcgtacagttccaatattctaaacatacattttgtgcgaaaatacaaatgatctggcccttctctcatatgctttctttttgatgtatttatgcaaaaaaacagtttagttcttagagtttcttttgttgtcttcatgtttgtagttcatgcacttttataaggcatagtgtggagtatataaactgttgtggtgttacttatgtaaactttaagctgctctctatagatttatatgcttgctagaaggataaacattagtgttatttgtcttacttagtatgggccatatacttgaaatctgtttgatctctcccattgccaatgccgatcatgatgttctttctagggaggtactcagggagttgtttaactgttgttctcttgtacagaaaatgtgaagattgagcgccgacaactgatgcattgtgttgtgaaggcgattgacaaaactcgggctattgttcacttgagctctgatgaagacttgctttgtaaatctattgtatggcaaatcactataaatgctatttaatatcttctttattctgattgggacctgacacctctaatttgtggtttattgttgtttttgtatagattaaggatctgaaaggcctttctattgatcatttgattcctgggatgatggttaatgcacgcgtccattcagttcttgaaaatggagtcatgttatcatttcttacttatttcagtggaacagtaagctattttttcacagactagactcgtttttggctttacaggagtgtttgtatttcatttcacagtctgttccttctattgtcaggttgatatttttaatttgttgaattcctttccctctggtaattggaaagatgattacagtaagaataagaaggtattcactattttcttattttttgttgatataattgttgtgtctggcgcctacatttttgcagcatctccgatagtctgatgtttttttttatgatattggatatccggagtgattttctgagtacttccactataatttacaggtaaatgctcgcatcctgttcgttgatccatcaacaagagcagttgggcttacattgaacaaacatttacttcatcttgaagtaccccctattgtaagttgtctgttttgccatgatataatcagtttgatatattcttatacgtttccctttatgcctgtaaagttggcctctgtagaaaatagaagtgctgttattttattcagtgttcttttttgatcggtaattcttcctcatgcagaatctaaaagctggagatatctacgataaatcaaaggtgctgagggtagataaaaaggctggtctttttctggaaataccttctccaactccatcacctggatttattagtgtatgtgaaactgtagtgattattttattgtatttcattgttgaatgatgtgaaagctctcacaaagatgcttcttaatatgctgatattgtaacctgatcctcagatacatgatgtgtcagacaaggatgcaaaaaacttggagaagtttaaggaaggcagtagcttacgtgtccgtatacttggagtacggaatcttgaaggagttgcaataggcactgtaaaagtaactacaccatgtcacttatttttttaagcaatggtattcgttaaaaggaatgctagtggcacacttatactattgcgtcctgatttatttcacttgaatttttaattttcaacaaagatactgagcaactttcttttattttatcttccatagctcatgtcacttcatttaacttctggcaccggtttggtgactcatggcttttgaatttgttgtgaacatgcatatatattatatccatgtttacatggtaatctaggagttgcaatagtgcaagctgttaattggttttcatatggtttagaagacttgcactgttgtgaacatgcatatttagtatatgtccatgtttacatgataatataggtatttgatatctgttgagtcaattttattgccttaggatctctatgctctctgtgtttgcaggacagtgcttttgaagggtctgttttcactcatgatgatgttaaacctggaatgttagtgagagctaaggttgctactgtggagccattcggtgctattgtacagttttcaagtggtgtgaaagcactttgcccgcttcctcacatgtcagagttggaacatgttgtgaaaccaccaaagaaatttaaggttgctcatttccacttccaattgtttgatgtttttttttgggaaactatgttaagagatgttgaatatgatgatgaatgaactttaactttgttctttgtgtaggttggagctgagcttcttttccgtgtattgggctgcaaatccaagagagttacagtgacatacaagaagtctctggtactttgcttttaccttaagaatttctatgaattctggtatattatatacaacagtacatgatattgtttttaaatccttcctaatttttgtctagcttagaataatgaagatagagctcatatccctatttatatgcattctttgttttctctgagactgtccagtagtataaccatggatctatttcaggtgaaatcaaaacttgatgtgctagcatcatatgctgatgcaaaaattggtttagtgactcatggatggattactaaaattgaaaagcacggttgctttgtaaaattctacaatggagttcagggttttgttagcaggttggtatcaccatttcctacttctgaagcagatcagcttggtgttgtaaatcaaattagatttctctacaaacttgtagataatcaatagtgaaagatgcacttatttacttttgaattgtgtatatgtctgtgaaggttgctggtcttgtgctgttcttggcaccattatttttagatattttatcacggttttatttatatgatatgattctaaatcatctgctttcttgattcctggtaaattgatactagatctgaccttggattagaggctggaactgaagcagaaaatgtttatcatgttggtcaagtggtcaaatgtagaattatcaatgtgatacctgcttcaaggaaactaaatgttagttttgtcatatcccataataggtgagttctctacacgctcttttgttatactatttttatgttctattaataaactgcccttatttgacatgacgagctgtaattgttgccttagtttttacatgttttttttttagaatttctttgaagtttattgtttcatagagcattttctgtcattttacatgtcatcttttaacaagaaaaaacaaggatggtgctagttctctgctatgtttttgaacttgtactgaatatccagaattgatttgtagatttataatttaacttttatcctctttgcatttatttttgccccatgtagggttattccaatagacactccaaagttgggtagtattgtctctggtgttgtggaacggcttactcctgcagctgttgttgtcagtgtaaatggcttctccaaggggacaatactgaatgaacatttggcagaccatcatggtatatcctcatctgctatatgatttgcatgttacctattgcatcaatagttttcccttgtgggttcacactcatactctttattgctgtttatatttcatataacattactgctctactgaccatggtctgttttttcccattaggtcaagctgctcagttgaagaatttgctgaaacctgggcacgagttcaaccaacttctagttctcggtgaagtcaacgaacttcattttctatcaatgcactttgaaaataaaaaacagaacatccttttttctgttaataatcacttgacgctttggtcatttattacacagttacgttataaaaatgatagcaaaagaagaatctaaagtcattacacacacttgtagcttatcatggtctgcacatgaccacacgataatcagttgtttgcactgctaatgatgatgcaccttttgttgtcatatggacatttgatcacattgctaatttttccatctgattttctaatacccgtctgcagatattgaaggtcacaatttagttctttcggcaaagcactcacttatcaattgcgcaaatgacattccttctgagatatcgcagatgcatcctggagttgtagttcatgtaatgtttctctaggtttttgttttgttttgttttgttttgttttgcgtagcctaatttgagcaactcagctgacatttatttatcttagggttacatctgcaacattatcgaatctggatgttttgtccgttttctcggacatttgactggtttctctcccaaggacaaagtaagaaattttcagctctgtcattctttttgttgttttgatttgaaaagaatgtctaattttcttgtttcacaaaggcagttgataggcggatagaaaggctttctgatgcgttctatgttggccagtcagttcggagtcatatactcagtgtatgccataattgttagtattttttgttgtcatcctctattacttgtgttcttctaatttttttttgtcccccttgcaggtaactgcagaaactgctagagtaaaactctcacttcaacagtcaatgtgctcctcaacggattcttcgtttattcaaggatactttcttctggatcagaaggttattataataaaaacaattacctcttactctatgttgaatacaagtttccaaaactttatggtactgcctccattccaaattaatatgttttggcctctctagattcatagcttttgctatggacttagaagtgtatgtctaaatacatagcaaaagcaatgtatctagaaaaaccaaaatgtcttctaatttgagtagcttgtaataatagtgcctcatgtgtgggcatgtgagattatgtggaacctgctatgtagttacagttttcttgtgggaatgtgggtacatgtgtaactaatggctattttcttgtattatgttactgtatgtagttgtccggatgctactttcctttctttatgtgtactgtcagggcatctcgctcatttgctggcatatgtgatagatgtggcctattggtctcctacaagataatctaggacgtgtgagtttgctgtgtgtcatgtagggtattttattcaataacttttagcttagatcaaaataccactgccagtaactctgaagataaaatctcattttgatatgttaagcttaatgataatgatgttttatcatttgtgtctacctctgatatagattgcagcattgaagtactcaagcaatgattgggctcacacttttggcattggtagcttagttgagggggaggtgggagcaatagaagaatatggtattatccttaacttcaaagaccatctggatgttgttggcttaatcgagcaccatcagcgtaagtaattttgtcctttcatgatattaactatccaacccgcaatcctgccaatttttatctttttatatttttgcagttggtggcagtagtgtggaagtggggtcttctgtgaagggccttgttttggatttatctgatggagttgttaatttgtcccttaaaccagagctaattggcagtgttagaaatgttggaaaaaagaaggtaatgtttgtacccttggtgtgaagttgttaggccagtctcaatgcatagtttcatgacacggttaccaagactataaactaggtaaccgagccacaggagttttatggggatgaaactcctccctcatctgatgaaactccttcatttaatgaccctgccaagtcggcaattttctccctcatctgatgaaactccttcatttaatgaccctgccaagtcagcaattttgcttatgtggcaacctatttaatgtgcatgacactctcatgaaacatgcattgagactggccttagtatacctggtcaggcatgcccttggtaattggtataggttataacattgtatcatatcgtaacaactttatccggatctcaatccccattttttattgttacctttagtaagcacgatatgcagtttttgaaactatatattcaatctctatttcatgtgttatcataactttacattttatctcctgtttcacttcagaaacgccaaagggctgcagttgcagacttggagcttcatgaggaagtgaatgcagttgtggaaataatcaaagggagctatttggtgtgtaaattactctcttgattgaccaatttgtttgttgaattgtaggctgattgccattatttacttttttgttgttgttttgtttaattcaggtcctttccatccctgagtacaattacgcaattggttttgcaccactgatggattacaactcacaactgcttccccaccaccactatgataatggacaacggtaatatttggaagtttacccattttgattccagttcttgccttgtatagtgtatacttctcccgatgggaaaatataagaacatcaaactttgtcatagtcataggtcaaactcttttaacattgatcatcaatatgtaaatttttatatagattgacaagggaagatcagcaattcagcattactagatacattgtagtcattgtaatagttcattcataatatgttaatacataagctttttcattaaagataatatattttgtataaggccttgtttagttcaccctgaaaaccaaaaacttttcaagattccccgtcacatcaaatcttggagcatatccatgaagcattagatatagacgaaaataaaaactaattgcacagtttacctgtaaatcacgagatgaatcttttgagcctagttaatctatgattggataatatttgtcaaataaaaacgaaaatgctatagtgccgaaatccgaaattttttcggaactaaacaaggcctaaatattactactcaagttgaagaaaagtttaaactgtgtcgaacatttatggacttatatttccaactggacgaagtacctgctactatttgagtaccccttacttggaaggctttgacaattgacataaatgctgaggaaacttgaacctttctctatttgtactaaatagtgcagaacaatgtcataattaatctcttgatataaattcattagggttacaggcttatcattttatcagtcttgacataaattgattttgaattgcagctttatcactacagaagaatgttgtaattagtctattgatatgggcatctcatgtaatgtataaatgagctttgttcatgtgatcccagctaatatttgatcgagcttgcaactatcatagcctaagcaggaacatgtgagcgaaacaataaagaagaatgatattttgtgttagaaaagattgtacttttctttagtgcagaacaataaagaagagtgatttcttatctggacttacgttacccacttgtttttatatttttctgtgtgtttctttctttctttttgaagcattactgtggttgttggaaatatcccaagttctgactcttctggaagacttatcctactaccaaaggcttcagctcagtattctgccctctctgaatctaaaagggctaagaaaaaatcaggctacaaaattgggtcacttgttgaagcagaggtgcaattattttcaattatgatcctaaaattggtaactgttttcatcttcaatgtctgcaaactttgcttacacaaatcctttttggacatcagattattgatatcaagccgcttgaacttctactgcaatttggtggcaatcttcatggaagaatccatattactgaggtgaacactagacattgcttgagatgcctttcttataacaacatgtattggctaattactaattagtgatacatttctcataggttcctgaaaaggattctgatgagcatccctttagtaaactcagaatagggcaaaagcttactgccagaattgttgcagaggctgaaccttctggaaagagtggcaaaaacttcaaatgggaattgtctattaggccatgtatagtcaacggtatgctttaatgtctatttttaatttgtctattccataataaacaatcatctagaaggggagccttggcgcagtggtaaagctgctgccttgtgaccatgaggtcacgggttcaagtcctggaagcagcctcttgcagaaatgcagcaaaatgctgcgtacaaaagacccaagtggccggacccttcccctgaccctgcgcaagtgggggctacgtgcactggggctgtccatgataaacaatcatctcatatagatcttacagctttcattcagttatagctaaaatcctatttcctatatgccgactgctttgcattttgtctacctttttgtgtttcttaatctttgagatggctaacttttcttattgttggatctttttgttacttgaaattaaacaggagagtttgacgaattaactgctcaaaaagaacaaaagcacaccacaaatgagattgtacgtgcttatgtcgtcaaggtggataaggaatgggtctggttaactgtatcaagaaatgttatggctcatttatttgtacttgatagttcttccgagcccagcgaactgaaagaattccagcagcgctttagtgaaggccaagcagttaaaggccgtgttatcaatgtgaatcgggagaaaagattacttcggttgaaggcacttgataaccaatgcacacagctgaatatagatgaaatacaacaatcaaagtcctctgtgtttgaacaaacaaaacaaggagatatcatcggtggacgtgttcaaaaaattctacctggcgttggtgggcttgtcgttcagattggacctcatctccgtgggagggttcattatactgaaattgttgactcatgggtgaccgaacccttgtctggattccatgagggccagtttgtgaagtgcaaggtcctgtctgtgagccgctcatcagaaggatcacttcgagttgatctatcactccgttcatcaaacctgatcagagactctaacaactcaggactagttgatgatctgtaagtgctagaggtcatgtttttttttcatcaattaaggaacaatgctcttttatgtgtcaagtgttctcttccattaaaaaacataaattgtagtccaaactggctttgtgtatgaagccttagctccagatctcccttttgggggataaaatcctgagtcactaccacatagccaagcaggccctatgattgttgttacattgtccagaaagtgtatgtagcattcccattgtcatttacatcatgtatcattgttgtttcttagggcaacctgtacctcccggatcgaaaagatcaaggatctgcttcccggaactgagattaaggtatttttcacaaattttttactattatacttttatctgaagttctgtgcaataaacataatttaacatgtgaataggacaagtctataattcaggcattatctaaacatatattggatttatcattcatgaaaaacacaatctgctacttgccaacaaaaaaaagctgtaaatagtgttggtgtcaactcgcatagtataattctgggtgaattccctatggtgtaccagaacatctgggtgaattccactgatattaaactttttgtttataccttcaactgtcattgctgaagttgtagtatgccatgaattgaagttagtttttttagggctaatttggaagcaaggggaggcacacccagggataaacccctccatgaagaactaaataattattcaaattatttccccattgatttcccaccctgggaaaagtcagggatccgaagggatttaagtttccaaattagcccatagggggaatacagtaggggagtcccctactgtgcattttatattagaaaaaagaatgaagagaaaaggagttacagaaaaggaagacaaacatgtatatattttcttttctcgaactaaaacctgtatatataggtgaaaggtggaaaatagcggcatgtaacaggcagccaagacagagaaaaagagcgcacaagctagtgaatcaagtttagccataaataaattgaatttagtttttcggtgaatatatttgataaataaaggcgtgttttttgtaccatttactacgaagtgtatcttctgtaatgtgaagtgacatgatttgttctgcttaaattctagggctatgtgaagaatgttaattccaaaggatgttttattatgatttctcgaatggttgaggctaggattactctatcaaatttgtcagatgagtatgttgaaaatccgcagaaggatttccctgttggaatgcttgtacacggaaggtgagatcttaccattttcaaatgctcatataaattcagatatgttctcctgtgaaactaacaaaaatccacagggtcctgtctacggacccatcatcagggagagtggaggcatcacttaggaagaccactggttccaaattggaaaagctggatgatattagttatagtgatttgcatgttggggatatcattgatggccaagttaagcgggttgaatcctttggattattcgttacaattcggagaagtgaactggtacattgttatcacttgactcagccttttgaaatcattgtgtattctgttttgtaaatactcttttgcaggttggtctgtgccatgtatcagaactttctgatgaacctgtcgttgatattaactcttgctataaagctggtgatatggttaaagccaaaattctgaaggtaaggttcatcttttttcaggattttcattttgccattgcacgttttcaaattcgttattttgttttaaaataataaagattgatgagaagcggcatcgagtatcacttggaatgaagaagtcgtactttgattctgatctgactgctgacacaaatgatgatgaagatgatgaaagtgctcttatggacatcagtgttgcccctcagatggttgaatatcataatagaagtttagttaatcgcaaagcagaaccaatagcttctgtgccgcctcttcaggtttccttggatgaatctgaatgttctgacctagaggataataataataataaaggccctgaaattgcaaatggaactgaagcaaatgctaaaaagaatgataaacaattaaagaaggaagcaagaaaacaaaggtattcagacatttgattctactctgtgaccttattttgttgacatatgcatcaaactttacatccttctatggttttcaacagggaactagaaatcagtgctatggaggaaagggctttgcagggagatgtaccacaaactccagatgattttgagaagttggtcaggagctccccaaatagtagttttgtctggataaaatatatggccactttgttagatcttgcagatgttgagaaagcacgtgcagtagctgagaggtctgtctgctgcccaaaacatttgtttttaatattgaaaagatctttggtgataagaagttgctttctatcatctcaatagtgttgataaatttgatttggtcttgtgttggtttcattttcaaagaatgtagaatttacttgttgaaacgtcctttcaaaaatttccttttgtttctgtcaattcagatgatatgtgtttgtcctttttctgttagtttatttaaactttttggatgcatcacttatcatcatcttttacaactgtctctcatgtttttagggctttaaaaacaataatcccaagagaagaagaggagaaacttaatgtttgggtagcatatttcaatctggaaaatgaatatggtagtccacgggaggtaaagctgaataatgatgtattttgggttgctttgctgtacatggatatactgagacacttgattgtgtacaccacaggatgctgtgaaaaaggtattccaaagagccttgcaatattgtgatcccaaaaagttgcacttggctcttcttgcgatgtacgagaggaccgaacagtatgaacttgcagatgaacttcttgacagaatgaccaaaaggttcaaaacatcctgcaaggttagttttttttttaaaaaaaattagtagttgaaaccataaggttatgccacattcagtatgtcctattcgtatctggagatcctatttgtgaccctgtataatgtaactgcagatatggttatgccgcattcagttcgccctcaagcaaggcaaggatgttgcgtgcatcaaatccattgtaaaccgtgcgcttctaagtttgccacataggaagcgcataaagttcctctcgcagacagctattctagaattcaaatgtggggtgcctgaagaaggaagatccagatttgaactaatattgcgggagtacccaaaaagaacagacctttggagtgtttatcttgaccaagtaaggagcattaagatcgttcaaaatggcatctgtacttcttattctttcaaatcatgcaagtttgttgacatatttttttaatgcaaagtttgttgacatagtttgaccttttgtaggaaatccgccttggtgacatagaagttatacgggcattgtttgagagggtgacttgtcttaccctacctccaaaaaagatgcaggtatggctcctttctaattgtttgagtattttgctgccttatatgtattgtgaaatacatgcaaaaacttcactgagtgattctgtcatcatgctgctttcaacttcctgtgtgtacttgatttcatgagcgaaatattaccttttttgctttatgttacatttctttgctaaaactctaaccttgaaatgggtgttggcttatttgttagttgtgtttctatctcaaaatctagcatctttgttccttttactgtaacactgatgttattgcttgaactagtattggattgattgttacttgttccactatggttttgtgcttctctatgtttttctggtataaaattataatgagatgtcacttgttctttggaacttgatctttatgctaaatgctgtgagcttcactgtcgcagttcttgttcaagaagtaccttaattttgagaagtcacttggtgaagacaacgaaagaattcagtttgtgcagcagaaggcaattgaatatgttcagagttcactgccgtcacaagacaacccttgaacttatgatacttgatctttacctgagacggagattgataatcccatggacaatcacgtttttgaggaagacaagcttaggaaatcggagattgataagcccaaggacaatcacatttttgctcgttacaggaagacaagattaggaaatgccagtcgtacagtagatgtgatctctttgatgaccccttgaacattattgttaaaaggtcaatgtaaaatgtgggctattcaaaattttgtttgaaactgttatataagttatgaagcattaaatctagtctgccatgtttcacccgaatgtttgaaaggatccatcctaagataaccggatctggtccccataaattgatctgttctaatgtggtattcattgttgaggcagaatgaatgggtaaccgaatgtctttctgtgctactccagctaagaaaatactagaacacctgcctaaactcaatctattcgataagacaagcatgttattcaacgtacttagagcatttccaagggactttgcaaatgatttttgtatttggtgttgtttgcaaagtcccaaactcatttgcaaagtctaaaaatagtccaactccaagggactttgcatttagacttggcaaacccaaactgtggatcccacctctgaattttttttcaccgatcgctcccgcgcgttttttctcttcgcgccattttgacgtacgttgtgcgtgccagtcgccgtccaggccaggtcgccgccagttgccgcccagcctaggtcttcgtgccaat

SEQ ID NO: 4063 - DNA, 6093 bp, Sorghum bicolor
ggtgtttgtcgctgtcttataagtattttgaatatccatttgcttgcactatttccattcattaatgtaagtacttttgcgcgtgtaggatgagagcacaactacaacactcgccaattactcatcgaacttaaaaagaatatagatgcatgatcttgtcatctaattaagaataatctctagaagattagctctgaggaagctatggttttcaacgctattaatggaaaaaaatgttttgattagaaatatatagcactggcatgatcctatttgcgagaaccataacatctgtctcattctaagtaacttaagtatctcatttttgttgatttaattttaaaatttactttcttgacattgtcataaaatataaaaaaacacaccttttagcagacacaatagcatccatctttaatttgtccttcatttcaaattataatcggttccggcttttctcgctagataatttctattatgaacgtacactaggtctatatacattatttttaccatatatagaaaatgttagaattaatgacttataatttggaaacgattaagcaataagaaacaccattcaatttagctttgaaatataccatcaatagatgcatttttttaaaaaataaatctctgggctcttcgatactgtttcgaagaatagaatagaatacaagtgatagatatacctgggcatgcagcccgagcccgtgagcacggcccgaagcccgtcattttggcccggccctagcccggcccggcccgaaagtcattgggctcgggctggcacggcacggggctgcaggccgtgcttgggccgcacttcaggcccgcgggccggcacggcccggtccgtcaaataacaacattgtataaaataactcattttaatatctaaatctattctctacatctgtcatatgtatttgaatgtgttctttatactgatgaagtgatgaattgatgaatgtgtttgaaatatgcttttaaatctgtgtttattgatatgttattgttcaacgggctatgggctggcccggcctgacgggcccgcccggtacgcaaaatggcccacgggcccgtgcctgggccggaggtcaggcccgcaggccggtaaggcacggcccgcagggcacgacgggccccctcggcccgttaggcaacgtgccgggccggcccgttgcccaggtatagtgatagatcacattgccacttgatgacacattaatgcaaagttccacgtcaaccttttccatccaccctgtcacactagctgcagtgtcttgtcaacacgccgtagcaatgttggttgtttcagtgccattccataaggcagtgtcttgtaccactttagtttttatttgataaacattgtccaatcacagagtaactaggctcaaaagatccatctcacaaattacaagtaaactgtgcaattagtttttattttcgtctatatttaatgctccgtgcatgcgaccaaaaattcaatatgacgggaaatcttaaaaatttttgcgaactaaggccatagtgtttacacttcacattttcacaaaaaagaagtgtttacacttcacagtaaaaagaaaattcaaaacgctgcataaaaaatgtcatgagagtactttttccaagcacccgtgttctacttcgagctggtccttacctcacacccggtcccacaagtcagcgtcacgcccccgcacccgtcccgcgtccacgctgtgcgcctaataattcgcgaatcatggagcacgggaggggcagtttcgtcaatggaacaaaacaaaagctcggaaacggcaaaagccatggcgagaagcgcagagtgagtgctgctgcaggccgaccagtctcctccccgcccgcttcccaccgagctcacactgcacactcccactcccactcccactccccgctgcaggttcacgggaggcgaggtccctgcgcccctgcattcttcccgtattcgcggaccggtcctcgccgcgggagggcgagccgccagaagtgcgttcctgcgatttcggagagagtggagggggcgagtagaaaagaagaggcgttgctatctccttgctgactgctgagctagtgagctgaactgagctgagctgtggaagcacagcggcgccgcggcggtgtggcgactggggaagagcatggcgagggcgcgcggtggcgccgcgtgggtgctgctggcggcggcgtgggtgctgtgggcggcggcggcggcggaggccaggtcgccgtccgggaggagggtgcaccggcacctcaagcgcctcaacaagccggccgtcaagagcatcgaggtgggtggctgctcttgctccgtcgtccgtgggattcgaaacgattggtatttccttctgagtgttctgccgagctttgtgaggatgagtttggaagaaactgttccgaagtgtgggattgttcaaattcaggttcctttgtacctggatgctctggttgggaggacctgttctccttcttggggttactagttttttttttctggtatgatacttcaggttcattttgtagtattggagccagtttcagtgagaagttgcgttctcattattcaacaataaaaaaagctacatttgtctgattcttttgggctttcctcgccggtaaattttcgctgtcactttggagaattatttcaaaaagtgtcaccttttggaggtggactatgcaaattggagcaaaccagtgtaagaaaacaaagatgaatgggtctttcttggatacaggctggcacttgcaaagtcatgctctctaaggccctgtttagttccccaaccaaaaatttttcatccatcccatcgaatctttaaacatatacatagaacattaaatgtagataaaaaataaactaattacacagtttagttgagaatcgcgagacgaatcttttaagcctagttactctatgattaagatctatgattagccttaagtgctacagtaacccacatatgctaatgacagattaattatgcttaataaatttgtcttgcagtttcctgacgagctatgtaatttgtttttttattagtttgtaaaaacacctcccgacatccttccgagacacccaaaaatttttcatccccaatctaaacagccctaagtgaaaaggggcacagccttgccttttctgaacattttgttcccggctctgatttcagtaaatttatgagcttaatgaatgtgctgagttccacaatgtcagcttaatgctgcatatttgatattttttcctatatttcttttcatgatttgcaatcttaaagcttccttttcaatgaagtagactgaagctttcttttgagtgaagtagacattgtgaaaaatcaaaagtagttcacacgagcattgctttggcgaaaacagtgccttctttacatttgacactgataaaagtcttttactcttcagagtccagatggagacatcatcgactgcgtgcatatctcccaccagccagcctttgatcatcctctcctcaagaaccacacaatacaggtgagccaatcaactctgaatttttttcaggaaccgaaacaagtgcctattaatggtttattttgagcaaccatcattgtaactctcctcacaatctctatcctttcagtttaggccggcgtaccaccctgaaggtctatacgaagatgccaagagcagcataggctcaaacaatgccggtgagaagccgatgctccagatgtggcatcgaaatggcaggtgtccggagggcacggtcccaatcaggagaaccaagaaggatgacctgctccgagctagctccatgaggcggtatggcaggaagcggcatactgctccaaacccgctgtctgttgatcctaacatgctcagtgagggtggtcaccaagtacgtccacatggtttgttttgctgaaagtgaatggcttggtagctacactgatatgttgtgttgtgattgctcaactgttgctgttgtggaatgcagcacgccatagcgtacgttgagggtgataagtactatggtgcaaaggccaccattaatgtgtgggagcccaagattcagcaggctaacgaatttagcctgtcccagctctggatcttggggggttcatttggggaggatctcaacagcatagaggctggttggcaggtattgtaaagctgagtttatgagtccagcttgttcatagatacttgtgtcaagtagatgctggccattttttgcggtatgcaactttatgtgtctgtcatttatgtgatgtttggtttatcaggttagccctgacctctatggtgacaacaacaccaggttgttcacatactggactgtaagtctcacaaattcagtttcctgctgatattattaatgcgattcagtacttgattaacagacattctagcattgacacatcaactcattaactgccgcattgctttactattgtctattttgcagagtgatgcataccaggccacagggtgctacaacatgttgtgctccggtttcattcagataaacagcgagatcgccatgggggctagcattttccccatctcgaactacgcaggctcccaatatgatatcagcatcctgatctggaaggttagcatttaacatttaaagcactcattatgcctcactacattagtgccttcagaatcagcacgctgaccccatggccagagaatctatgcccacttggtacaaaattctcctgcccatgctcagttttttttcaaagtggtgtcctccaaaccacatgcactgcattgcgcccttttttatcgttatccaaggattctgatttgtgtaccctatgagcaggaccccaaggaaggcaactggtggatgcagtttggcaaggaatacgtcctgggctactggccatccttcctcttctcctacctcgccgacagcgcatcaatgatcgaatggggcggggaggtggtgaactcggagcccgacggcacgcacacgtcgacgcagatgggcagtgggcacttccccgaggaagggttcggcaaggcgagctacttcaagaacattcaggtggtggacagcagcaaccagctcagcgcccccaagggcgtgggcaccttcaccgagcaatccaactgctacgacgtgcagaacggcaacaatggcgattggggcacctatttctactatggcggccccggcaagaactcgaattgcccatgactgatgcttctagtgtgcagtgtgaagtgctttcaccatgaacagaaatgtaaccaagcattcaggttcgctatacagcgtcagcctgcatctccttgttcagtcagtcctaggtagttgtaacatgtgcatgtgatttctagatcttggtgtttttttcttcttttttgctgttgtattttcttcttcatttgccatgtaaagtttctgaagagaagaagcatggcttgaggctgcagtggtggtttggctggtcagtggtgacctttacggattttttgcaagtctgctaattggtcaccttcgccagttattttgaaagtgtgctatagcagcttattggttgatgggtgatgataatgatattgagtttattggttattgcatccagtactctactgctctgcatcagcatcattctcttcatatctcaatccaccctggaagcgcatgagcgtcatccaaagcaggattctggctgatctcaaatttatatatatatttttgaggatcagatctcagtttagattttcgttttttgagaaagagatctcaatttagatttttttgagaatcaatttagatagaaagtagaaaaagaactctggatatactgtaggcagctggctagggtatcgtagcccagcccaggacgcaatggcgacgtggcccatcaggtgcagcccatgttgacacaatcgtctcgcaggcccagggagaccatcttgtagccgagcagcagcaaaagtagcccgcacgtgagaacggcccaagaacctggcgacgtggcccatctggtgcagcccatgttgacacaattgtcctgcgggcccaggcccgggcccggggttaccattttgtagcggagc

SEQ ID NO: 4064 - DNA, 8868 bp, Sorghum bicolor
ggtggtggttgggggtggggaaggggggctcccctcctcctacggacgcacccggccacaaggcgacggccgttctcgtagcgctgcaggtgccggcccgtgcgggccaccagatcgcacatgcccgcctcccggcctctccctccgatcccacggcgggatacaggctgcccttagcccgtcccccccaagcttcctagagcctcttccctctcgcgtccggacggcgagtgccggccggcggcgcgcggcaatgcggcggaggcggggccgggccgtgggtggcggtggcggaggtggggaagttgtgttatcgtggggctcgctgcgccgtggggcttggggcgctcggccgctcgcttcctctcgctctccctctcttttccttttccttttcttttgtgttccttttgctttgtccgttgttttttccttttttttgtggtggttctttttattatctttattatatagtttttaatgatttttattttttatattttttaataatatataaatacacaaatatacatccacctttagaaacatatatatatatatatactttatctccataagaactattgaggtgatagagtcgagaacctagataagattctaccgtaatgttaaggggtaaatttctttcgtccctcgttctcactctttttagttctatttttgtgttgataatattcgtcgaaccatcacctctcaatcctacacttctagcttttactcctagaactgattatattattctcttacaagatatattggaggtgttcttagttacttgaaatgttccttgtattcgagctatgatagacaccttataggtgtagaatccacactcgatcctcgttgcagcttatttgtctgcggttgtttctagtatcggctaatgtagacaatagcttctttcttacaatcgccatcggtcctaagggcttccccatgctccatggtggcgtgctgccctgaactccacacgtaccttgagtatccatgtcacctcacctagtagtcatggatgatccattgctttgcccacttggatgtgttgggcaaaaaaccaatataccttgtcacatgtttgtcagaaaatcacatccatgtccatgttagaagcgtgattttagactttgaaatcataccagagagggagagtgcttagcgtattatcaagagtttaaagacccgtcttgttcgtttggttgataagtcagacagaaagtacttttgactgatttattgtgagagaaaaatactgctgaatggttgacatattcggctgataagctgaagcaaacaaaacataacaatgtgtatcactattttatattaggagtttggagaccatcaataataacaatgtgtaatcactatttttttggcttagactaacaggcttgtatgcccttgtttagttcaatctaaaaaccaaaaacttttcaagatttctcgtcatatcgaatcttgcgccacatgtatggaatattaaatatagatgaaaaacaaaaacttattgcacagtttacctgtaaatcgcgagacgaatcttttaagtttagttacttcatgattagacaattgtttgtcaaataaaaacaaaaatgctaatccaaaataactttttagatctaaacagggcctaaagtctacgttactgctgcccaaaacgcaagaagccgttgtaaataaaaaaaaaaaagcaaaaaaggccagcgtccggactccggagtcttctgccatcgccaccgcactgcccgttggcccgttgccggcccgcagcgcctccgcatgcccgtgcgccgccccccgctcaccagtgcgcgcgaccatggaggacaggaggagcgccgcccgtgctgcccctgcccctgggtgcggcggccatggaggagtgagaggaatcaggtgagtccaagtggggagggaaagaggataggatattttgcacgctactgacgccacacggcaattttggtcataaggctcccagctgtacccaaaaaaaagaagccctctccgaccgtcctacccctccgctcccctcgccggcgccgcggcggcggcgaggtagagggcgcctcttcctttccgacccggttctcaccgccccagcccgctcgcccccatcgagcggcccccgtggccctaggtgattcgcgcctccttccgccgcagcggaacaggacgcctggccgtcgaccatcgaagcgattcctctctcgcgggcgtcctcgtctcgcccgtgccagtggatcggagtggggaggggatccgtccgggcttcgatcggttcgttctcctcctggtaaggactaaggaaccctaacttggcttgtttttttccctatgctgcgacccgtgagaatcaaatgcagtagcttagtaaattttcgaagaaattaaatgtgcatgccaattgaagttaggggctgaactggacccctcacggctacacgttctttgctgtgctcgtgatatatttattgttcttgcggtgcagcatcatcttcatcttatgcagtggtggactcaggaattggccaagactagggccaaatcttggtggccaaaatccaaaaactacgggatacagtaaaaaccatatatatacacacgtatataaaaaaacaaaaattctcaagcaaactttgcaaatccagagaaattcttgaactatataattaatagtacgataaaatagctatgaaatatcaatgaacattgaaaaataaatacctattgtctagtgaatatttgttgcattcgcctcttcatctaattaaaatcaaaagtttacaattagcagttaaaatcaagagaaaataagaactgaactactggaaaaattaaaaggatttcgtaccttcagttcacattcacggaatcacggcttctagacaacatgcagacacggacaggccataggcagcaggcggacccggataggctgcaagcagcagccgagggcccctggccgcgagcgcgtctggccgtctggcggcgaggcgctgaggccatgagcaaagagggtaggggccagggcaggaggcgtcgtctcgccgtcgcatgcgggagcttgccccgaccgtcacttgcgggagcgtgctgagcagagaggataggaggagccgaggagggaggccggagcggaggcgacaagcgagggcgcgaggcgtgccgtgtggcgtgggcgcgtccgcgcgaggatcggtggctgagctgagcgacttctcttccgtagtcttggtctgccctagttttctatttaatgggcttctttcttgggccagaactgaagagttgcttctaaaatttctgggccacgactagggccatggccctactggccctaggcctaggcccgcccctgatcttatgtatatatatgataggcttgcactatatgtggacgttactagcaaagttcaagaaggcgctgacccatagcctagcgcctaggctagctcaggcgtttcaaggagtttttctaggcgttttgccaatttgccagttcagagcacttcaaagagaaaacagaggagaggaacagaggaagggagcagcgagcagggctgcaggggagaggagctgtggtggcgaaggggagtagccggcgggggagggactggccttggggaggagactgtcacagagtggtgcgccagcgagaggacgagatcggcggggtgcgctggcggggatgagcttccaggcaggagcggtgcgccggcagggatgagcttccaggtggggatgagcatggccggtgggaccagcttctaggtggggaaggagtgcggcctgtgtgacatctgcacggcggggaggagcgcggctggcagaaacagcttcccgttagggtcgcaggtaggtgagcgggcatcagggagacagctgcgcgcgcgaggcttcttcccctccttctccctcttatacttcccgcgtgaggcttctcttcccgtgctcgaaggcagctgcgagagcgctcctgcaggggcggaaatattcacgcgctcgcccgcagcgtctgcctctgcgctgccaaattgctgcaaaggcgttgccttgagccgcccaggcgctacgcccgcctagagctccacctaccccataggccaggtgggaacccgtcgcctagtgactagtccctaggcggacgcctatcctcgcctttttgaactttggttactagtttggtacatagttaaaaggccgaaaggatcggtttatgctttattgcataatgctgcaaattctagtttctgtttggatcccttcaatttcgaggaattgaaatctacttagggtttgtttggaagcccgacatttgacccaaaccattgtaaattataggtcctaaattttttccaacccagaatgaaatttactgtttggatgaccgttgagtctactaaatttacatcaggtttggtccaaaaccgttggaaaaaagtgttgcctcttttggtttgggaaataatatgacaagtattgggcttggtctcatagatgaatcgaacctccactgaaatcatgccgccgcccccacccgacaccgatggtccgccgcgcgtgtcgcgcatggcgcaggcctggtgggctgtaggatccctcgaccacgaacgcctcatcagtgtctgaggaggtgaggaggacacaacgatgacatgcaccagcgtcttgccgtaggaggcgcagaggccgccgatgtggcgacgaacggagaggataggcggcctgctgccggcgtcgaagaggagaggcggcctgctgtcggagggcgtcgaaggccagctccagggactcgaaggcctcgaagagggtgacgaactgcacgaccgggagggtgctggtggactcgcattcatttgggagcagttgtggcttgctgggatgaacgacagtgcattgaaggagatggatgccgccgaggcgtcggggagccgcgaagggcggcgatgttgtgcgcggtggagacgagtgtgatgttcacttcagggaaggagcggcggatgaggcatctacgctcatcctggtgatgactcgggtgtgagctgatttggcaggcggcgagtgaatttgtgatactgtgcttccaaacaatattccacaaagcgaattgttatccactggtgttcttgtgcacatcagaatacaagtgtaatcattttacaggtgtatatgttttagtcacatccaaacaagccttaatggattaggctatttggcttggaattgaaattccacaactttccaaagttcacatatatgccttaatgcctatctcaaattaatagggtgggagatgaaaattgattctatagatcatttgatatgtttctactctacaacttatagcacactctttaactcacttccctatagtagaaatgcaacatataactatatctcttgcatggctaacaatagtatacagatatattccatatataaccatattaacttaattaagatgtgcctaaattataatttattagaatgaatttaattccaaggatccaaacggggagtggaatgtgtgttgttgtccatgcctgttgacctatttcgtgacgaatcgctttgttaattcattgctcgattgctttggggttcaaattaggcccatgtgcaacatttgatactttcacccttgaccattgacttattgatgaacagttttagacaaatcgttttggctaaaaatgctttgataggtagtttcatcgggattgtagcatatatatgagacactagtactccattattgtaattactcattaatgaactgtttctgcaatatctattttttagtgtccatgttataacatatttttggtgagttgtattggatcccatgtatgtttggatcatttctaaagctatatatttgtggtgttcacattagtacataacctgataatcgcgtagcatacttgataggacgaggggtcctactggagttgctgtggaggttgtagggatggaagaggtgaggacgtggtctgtactctcgatgccggcgaggagccgtagcagcaagaatgcggcttctgctgctgctgctgcagccctagtgctcaggtgagagaaagagggcaaggacggctggctcccatgggaagccagcaacttaattgttgcttcttgcttaattgtgtcaatagagtttacagatatttatgtcccttctactctacctattttgctaaataacctatccgggactaatataaattgcaaatacaaagataactgagctaacaaagataactgggctgggctattagcccattaatcatggcgccgtctatcctaggcaccacctagccatctgttgtacgtcggccataacaatactcaaaacaatattctgtactgttcctttgcaaccactggtgctgtgcctgtgcatggtccagatctatgcatcaaccttgtcacatcactatggtgaatgagactgtttgaatcctacaccctcgcacgtagataatggttgtgaatgatatccaatacttttgcaatgcatggtctatgaaatcattgggatttacattatagtaaacattcttttattgccctagccacaggacccctatcgctgagcaaaataatagaggtcggcacattgttatcgattatatgatggaaatctagagtgttaatgttcctttatttttgctctaacaaacattaatagagttgtatgacatttttttttgtttatttcctttgatgttatcttatttttctaatcactaaagatttcatttctggactgccagctgtcaaacttggagttagacaatggatctggagacagagaatcgtcttgcttctttactacttgaagaggcccagagattacaattagaggctaacagggaagttgttcatgcatatctgcggaaacctaatgttaggcatcgtccaaactcacggttcctcacagccacagtccgtggagttcagcaaggttagcaatgtgcagtgaatcattgttgtcacttgtcacttgttttctatattttctattttctttgagtagatcttgtagaaaaaatcaactttgaaaaaacagttgagtcatgtaatcctgtaaaaaggtgaacttggctcttgtgagtatgttgacatacgtacttgggtaaaaattatattgctcccacgtcactaattttgtaatgacataactaaccaacattagaaaaacatgtggagccatttaacccttgtgactattgaccttacattcttgggggaaaagtatagtagccctgtgtcactaattttttaatgacatcaagtagcactttcgtactttgttctgagttgaaatatgctgtttgttgtgcagcaaatcgtgttgtggaggttgatgaaatgtggcgtgccagggaaaaggaactagagttggagtcaaaaatgaaaggcagaagtaaagatcgtgatgattttaggggtgagaagcgcaaaagtgatttgagaaaccatatctccagctcaagggttgaacaagaaggaaccacttataataattcctactcagaccaggaggatggtctcagggatgatgaaattgaaagatttcttcattcaaggtcagttagaatttcatttattttcttttatgcgagaaatagccatttctttcttgttgtaacacctggcatatataactaaatattgtttttactcctgttcttgcatgaaaaatcacatgatctgtgcctctctttgatagtaccacattattctattgattagtgctggtatcctattatgtggtatattgaaatttgtttatgctacaaccttcccatttttttaactatttccctgatgtttaggtatcagcaattgttgctaatgtatttattgttgctattctgttagcgcaaagcgaggacgtggggccgttggttctaggatggatgagcctggtccatacctcgattctttgtcccgccatcaggacaatggacctagtgctgacatacgcgtggaagaaaaatgggagcgcagagtacaaggcccagagaagccttcacttttgggatctaaatctcttgatggtcattgtcgcaaggacactttggatggtaggtcatcaagctctgaaccacagaccaaaaaagaaaagaaaaataagtctgagaaaagagagaagatagagaaaaagaaggaaaaggataagaagaaatccaaacaccgccgccaccaccatcacagaagcaccagaagtgaatgagtgatgttgcctgttagcagaacagaaaaatgtacacaaggggtctgccctgagacaagctagctgactgttgcggtaacttgaaacctgtatgtagaatggactatggttcttataattgttctggcgtttgttcaagttttgtcactttgatttagcatgattaacatctgcaacaactactaacattgggcgtctaatattggagttggaggagcctgctcttcaagcagggcagtgcaggactatctcttgatgtatgccactgaagtaaatcgtatgtttgttcttgtgtgattgcacaaacactttcagcattgccacaaactcaaaaatcccagaaaacaaaagaaaatccatcctctacttctgaaggctgaagccaccaaccaacctatggtctctgtacatataatgccgtgtatgaaatgtattgggacgaaaaatacactctctggctatctgcaacaagggatagatcattaggtaaagttgtaaatgcagatataaagaattaaccacctgtaaataagcataaatgaaaatgagatgaatagaggattccctactgcaccgtgtcttttattttgtcctcatga

SEQ ID NO: 4065 - DNA, 2956 bp, Sorghum bicolor
caggtagcacacggcgaagtttgttttcgccgtgtgccacggggcagctcacggcgaacaatgatttcgccgtgtgcctaacgggggcacacggtgaacattgacggcgcgtggcggcgttagggcgtggccaggttgcgtcgtgggccaccacgtcgccgtgagcagcacacggcgaagccaggctttcgccgtgcgccatggcttcgccgtgagcaacacacggcgaagcagccggccgtcgtgtgcctctatttcgccgtgggtgggcccctggctcatggcgaaccaggcattcgccgtgtgttgctcacggcgaacagccgggcacacggcgaatgccagttttcccgtagtgttaggacctagagttttcactgtctccctcaatgccggcaggaaccaatgtcgccgtcgctgcggtgtactcaaaccctaacaaggggaaataggctgaggagaaggggatgatggaggagacggaggccacaacctgtatcaagcgcgagcggttgtggcgccattgccggtagacctagtggcggagttggagttggaatcaagcagtggcggagtcgctgactgcgggagcgagcacgactcacgaggcatgagttcctggcctcgggtgaggataattcattctcccttggatcgacttgggtggagcgggtttttctccaatccaacattacccaaatgcaattttctgcatccacgtgtgtggaaccccggtgtgggttagcttccaccggaggatgggatccaccccaatccccgtcgatccaagcctatccaaacgaagccttagggggggtttaggtccatccgtatccgagtctggatattgaacatccgataccatatccgtatccgaatattcaaatcacatatttataatgtcaatatccaatcatatcctatccggcatggttgacactatctgtactcgaatccgaatccggacagaagtataaaaacaaatatgatatcccattcatatttgatccgttttcatccctagatatacataataatgtaccttttcacaccagctatttctaagataataaacttcccaagtgagtggtaagagcaccacctgtcaatacagttctcttagatgcctattcttttctgttttaaagtttgtatttccattttaactaatggaaatagggttaacctccggctcaaaaaaaaagcataacatcggatgtgataaatactaaacttcagtcatctgtatcctatggcggaactaggggggctagcaggggtagtgctccccctaagccagtcattcctttaaatacctatgtaaatattaatatttatagtataagaaatattaattttacctattttttgttcaaatataacgattttgataagaaatagtgtaatattttttaaaaagttcttcaaacatataattatatatatattatcacactaaaaaaatacagtttgtcggccccctttaatcaaacttgttagttccgccactgtctgtatccaaacacacttgtctacggcgtttgctcgacatgttgtagcgtcgacagtggcctgccgtaacgcttagcctcttggcggcaaaactcagcgtcgtttcatggcagcctcttgccgctggccccttgcggccgccacacagcagcacgctgtggtactataaggaattttcaaatagaccgttaaagatagcaaatgtttcatttcatttaggataaaaagatattgtgacaaaacgccacgcaaaacaacacaagttgcatatgccaccaaattctgttccatccaagaaataaagttccaactcatcactcgcatcatatcgtcgtccaaatttcagttccacaagactccatcaacaaacaaacacaaatataaaagcacatacatacacatcacgactttctctcgatatatagcacttactattacgtggtgctccaattaagtcagtcaccagcgcaaatcatcagcaccaagaaatggcttcgtccagcagcagcaacctcctcgcagccgccgtgctgctctccgtgctcgcagccgccggcgcgagcgccgggacgacctgcgtgccggggtggggcatcccgcacaacccgctgccgagctgccgctggtacgtggccagccggacctgcggcatcgggccgctcctcccgctgccggagctgaggaggaggtgctgccgggagctggcggacatcgcggcgtactgccggtgcacggcgctgagcatcctcatcgacggcgtgatcccgccgggcccggacgcgcagctggagggcaggctggaggacctgccgggctgcccgcgggcggtgcagaggcgcttcgccgccaccctcatcacggaggccgagtgcaacctgcccaccatcaccggcgtcgccgagtgcccctggattctcggcggcgaaaccatgccctccaagtaggactagtaactgtcaagagcatcctattcctacctacctacctacctacatgctgcatataggatgaggagagatgcatgtctcgatcggatcttccatccggaacaaaaaaaataaagggatccggctttaatttgttcttgtgatataattaatgattcctattagggctcgttctgtccggtccctgggaatgattctcagctggaatatatggttcctagacatggtcacatggatcaagtgaatccatccatacatgtcactagatcgtgttctcagccggtttggttcgatttcaagcaatgttttaaatagcgggctatagtgtttagcagtttatatctaaaacaggtaatagcagagctaaattaggctatatgggatataacggttaaattgtacatgaacacaaatagcagcatcctgcctcagaagctatagcggcagcatagcgggagattaaaaactataattccaagtgttcgtaggtgcagtgt

SEQ ID NO: 4066 - DNA, 4673 bp, Sorghum bicolor
ctttgtttagttctgaaaattgaaaagttttggaaacggtagcatttttgtttttatttaacaaacattattcaatcatatagtaactaggtttaaaagatttatctcgtgatttacagataaactgtgtaattagtttttattttcgtctatatttaatactccatgtatgtgatgtaagatttgatgtaacgtagaattttaaaaagattttgatttttaggtgaactaaacaaggccctcggcctgctgtgtcacacgcaatcaataggctagtttcgtggcagcaggttaggcaaaagcaagtaggatccaacgactaaggccttgtttagttcatcctaaaaaacaaaaagttttcaagattccctgtcacatcgaatcttgcggcgcatgcatgaagcattaaatatagacgaaagcaaaaactaattacacagtttagctggaaatcgcgagacaaattttttgatcctagttagtccataattgaataatatttgtcacaaacaaacgaaagtgctacagtatcgaaatccgaaatcttttcggaactaaacaaggcctaaagttgagtgtactaaatagaaggacttaaattaattataaaattaactagagaagccgtggctaattagtaagatgaatatattaaacttaattaatctattattagtatatgtttaaatatagcatcatgttatcaaattacgaactaactaatcctcaaaataaaaacagtccatcccatccatttttttgtttttttacacctatttcacgtgctcctctcctcaaaggctgacatcgcaagccgtcctaggcaaacttaatttggctccggcgcccgcgtgcctcctgcatggcctctggcggtgctcctcgagcgggatctggagagacgccgtcgaatcggacacctccgtcgtcaaattggtttcgaccgccgttgaatcttccttccccgccattgccaaaccatagaagatgaaggtaagctcaccataccaaagaaaaggtgactacactagaactagtctagcaaccaaacaagatctagccaggccagacttgcttagacacaacaaccaaacaagtgctggttgcataactaatgctgactacagctagcctaggctatttttgctagtcaggcttggtggggaaataaaccaaacacacccgtatgaagctagctaggtagccttatggtccatggtaggcaaacccaagaagacgcagcagcccgggcgagacaacgatgatctcctagtacatagcttccggtccaaataaatcatgcttagctaatgggctgtctactgggcgctaagggattatcaagagcggagctcggacaagggcgagccctggatccgcctatgttcaattgtccgtgggccatcttaaaatttggtcgaaggttaaactataacagataaattctctagaattataaaaattatacatggatcactttataatttagttttacatttaagatagaccatcttactctatattctagctacatcactaacacacatgaaaaaacttgtcaaatacagaggatttcgagctttgagtgattgaaccataaggtcacctgttaaagaaccttgtcaaatcagaaacatttttttgacaaaaaaaacacatctcaaatcaaatcagaaaaagaaaaaaatggagaaaaaataatttcccaaacaaatcagacaaatccctgattagcgtccatcccgtcacggccctttcaccgtttgttcacactcaaactccctcgattttaataataacagcgaaaagaaaaccatccgccggaggccggagggcagattctccaccaccgcctccaccccgccctcacgacgcgaatctgcggcgaatccccctctcggattcctcctcggctccccgccccgccccgccccgatcgcgccgtccagaggccgccaggctccggcgcccccgcccgcccgggctcgccgggggtcgggatgccctgctgcccgccgtcgctgctcggagtcgggccgcggctgcgctccttcctccgcgactacgacgcgctccagtccctcgccctcgcgctcatctacctccaggtgcgcattcccctgccctgccgcctccgacggccggatcggcctggccccactcggcggcggcttgccggcccccgcgagatcggcttacttcagctctttgttgctcctgctgttaggtagtgcctggtgacggtatcgggtttgagcgtgctctagtgtttcgtaccatagtgggcgtcattttggctgcccaattttgtctgtaattctagttgttgaatgaacgtgatggggaattgtagtttggttcaatgcaattcagatagggttccacttttctctctcttttatttaggcgtgagatcccttgatgcttgggttttgacctagtaggtttctggacgaagcttcaaggttcagttacgtttagagataactgcgccttgcagcttaatattgcggtttttgttctctggatttggtcagtttctgttgtctttgtttgcttgagcttatctgctgaatccaaaagccattcagcagtgtttttatctctcaacaaatcagcgatagaaagaatcgtacaagtcagcttttgctagatgcaactaagtgaatcccttagacatgattatgttggtgaaatagtgaagggaaactggtcggtatacaatatgatgatacttggctatggttagcgttttacattcttagctctgaaggtacttggagtacttgctttttgtttggttgtcttgatcattatgtgacttgaattctgataatgttgaaatgggccctcattcagcagaaattgaatttaatgaagttgtggtattcatgctcataattacttcatcaattcttgttttagattgtttgtgcactgatcggatcacttggggcattgttcaatggggttcttgtgatcaacctggtgattggtctatttgctgttgttgcaattgagagcagtagccagagacttggccggacatatgctgtccttctcttctttgctgtcgtcattgacgttgcttggtttatactcttctcacatgctatctggtatgtctttggcagccaccatctttcaatttagttaccccaattttttcatttggtacaatgtgaatctggcacctacaaaggaatgtgatatcctcttatcctctataatcgtatgtttaattgactgatttttttttgagtggatttctttattcatctttcaccatggcataactaattgttttcaacactgtataataattgatttggcaatgacttgtcatgcaatgactacatatatgggtttgaacttcttccattatctcactagagtctttactatgattattgaagcttataactttggagcacaagttctttggtagtccatcaagtgaagttttagtatgtgtgtaatcatatattctaaaccattgctttcatatatttaggaacatttaaattttacttgcaaaatgatatgtatagatttgtctcgaagtttattttcgtaacattctgattgtataaagttattacagtagaggttcatggcggtatgagtttgacaacatgtatcaatatcaaaagcattacttgtgaccgattgactgggaagtgcatgtgttctattggacgagtgtagagaaatctgtttgtgtaattctttttaggcacgacaacattcttctagtgtcataatatgtttcctaactttgtcttctaatcatacaggacgattactcctgatgagaagtatggtcgactttttgttttctcactcagactagcattgtggatgcaaatcattgggttttcagtaaggtttttgtcttcattcttatggattcagatgtatagattaggggcttcttccagcacgccaacatattttgaaaccaaccatgaagcaagaaatagtttcttaagccctagatctgattctgttagacggagttccatggcagatgatatattgggaggttcaatctatgatccttcttactactcgtcactgttcgaggatgttcgaaacaattcatgcaatcatcaggtattaccttctagtttctgcacactgttctttttcattcaatgcttaacttattaggggaaacagaataggatgaccaaattaacaaattcctctgtcaaatttgtgcatctttctatctcaacaaatttgtcttctctagaccacctactttaatatccgtgacaaataaattaagaatctgaatgtgctatgggctcattagaaaagtgtcactgtattacatagcaaaatctttggtgtacatcttttgttgtgtttgtttgtctgaagaagtaccaacgagatagtttcaaagtataaagtatctattcgattcttctggtaatactgacctacttaattgcactatttttatataagtagctcttttttccgtgaagacgcttgcacaaaagtaagattagataaatacatgtttgaactatacttttggactgcttctaaaatgtggaccatttcagccatcatatggaatttgaagtttatgtaatactcaggtttgcaagaatcaactgtgtatggatcactgattttgtaagtacagttgatatgtg

SEQ ID NO: 4067 - DNA, 4274 bp, Sorghum bicolor
aagttggaagctccacgggcaacacctagctaactaggggcaaagccccaagagtaacaaaagcaaatcaaactggcttgatgaagaaatcgagtgctcaagcttgcttcaatatttctctcaccaaatcccttctctcaactcaatctcttgcaggatttgaagctaggagcaaagagaagagaagagagaggctttttgaagctaggatgcgcacttttccgaagtttagggcgcaatagagtgagtgggtcatggttagatagagagaggataagtatatatagatctagctcaaatctaaccattattatgaaaatcagaacttctgctaggggaccagaacttctgagtttcacagagttacgcccaacattagaacttctcataggagacgaacttatgaattttgcaagattgcacccaacaatagaacgacatcataacttctaataggggtctataacttctgattttcgtagggttctaatgtaagtagtgtagtgcttatgtgcccctttttggtttattttagttagattcttaagcattctatctttctcagaccacatagatttgcatccctctttagagtgcgccatatcctaaacttaagatcaaatatcaaagaatttaaatgcctttgaattcatcaccgcgtctttttgtgatctgaggctccatcatcacatgtattatcatcattcttattttacctgcttatcatatcaataaaactcattagtcgtctaatcatgtggttattatcaccaaaatccataattagggcttgattgcacttacacgtatccttagactccgtggtaccttgtcaccccaacgcataagtgcgcctagctagtagctgactgtggactggcaccttgtagaacacacatatcggtgccaaatctattagattttttgttctagtagttaataacaaccctgatagttatccgcagttggccttgaaaataatccacattatgtatagaagaccaaatgtgatttcacgataaattaattaaaggtaagaagaccaaatgtgatttgaggataaattaattaaaggtgattcactcgacactaaaacttacccaaccaatctataaggcgttgcaaggggtttgttgtctgttgtccctatttgaggagactgcacaaccgcatctatatcaagtaatactcaagttcttcgtcaaaagagagtcactggtaatattaagtacttctactttgcctgttgtccatagagcctattcggttggctgaaaaaaggttaatattgattatgagaaaaaaaacactattctattattgaaaagtagcgctgatatgttccggacagtcattcagtttcatgtttttccgtcactctcggttcagtaatcagtagctagcttctgttctttggttcttttgcagccacacgataattctcctcccggacaaccggcaagaagcgaagaagcttagtgagccacaacatacacttgtctatctaattaacaaatcaataatgcagcactaccaaccacccacgtgtccgtagcaggtactacaaacatataggacatgcgtagcagctgtggaatgtttttttccctaatgataacttgggccttgtttagatgtgaaaaaattttggatttcactactgtagcattttcgtttgtttgtggtaatattgtccaatcatagactaatagggtcaaaagattcgtctcgcgatttacagccaaactgtataattagttttttgtttttgtctatatttaatgcttcatacatgtaccgaaagattcgatgtgatagagaatcttgaaactttttggatttcggggtaaagtaaacaaaacaaggccttggttcagacgatatagatcaatcaacgagagcgttggtttttcaaatggcgcgtgctcctgctgccaagctgcgtagctgtgcgtgctgtctgccgaatcgatcgagacgagctggcaggcacgggatcgatggccggcgtccacgaaccgcccaccggcggcgacgccgccggcgccaacggcagtagatcacggtggcggcgtccgcggcgcgtcctgatgttcccgctgccgttccagggccacatcaacccgatgctgcagctgggcgacgtgctgcacgcgcgggggctcgcggtgaccgtgctccacacgggcctcaacgcgccggacgccgcgcgccaccgggagttccagttcgtgccggtccccgacggcgtcccgcccgacgtcgcggcgtccgggaacgtcgtcgacatcatcgaggccatgaacgccgccatggaggccgacggggcggcggccctcagggccgtcctcgagtccgtggtcgcggacgagacgctgccccctgccgcgtgcatcgtcttcgacgccaacctcctcgccgtgcccagcgctgctgcggcggtcgggctcaggacgctggtgctgcgcaccgccagcgctgcctgcctccgatgcttcatggcgtaccccatgcttcaccaaaagggctatctgcctcctcaaggtccgttcactagagcatcactgcattggagcatacatttttttttgtgagcaaagagagaagcattattagctagccatcggcaaattacaatcgacatttaggaaaggcaaagcgcacgcaggcgagcatacatgatagatagtagaactctcggagatcttattttctcaactgataagtatgaacagtatgtacttcgactgtagagtgcgtgcttatacttcttgtaatcagactatttctaccttaatacaaagacgcacaaaccttttacatgatcggaaacaaaaaaaaaatatgtgctcttacttgatgtatgctctgttttttttagagtccaaactctacatgccagtgaaagagctgccgccgctgagggtaagggacctcttctactcaagccggagcgaccccaagaaaatgcgcgagctactcgctcgggccatggaagcaacgaggaattcctccggtgtagtgatcaacacactcgacgctctggagaaaccagagctgaagaggctctgccaagagctccacatccctatggtacttgctcctggccctctccacaagctgtcctccaagaacacaaggaggagtagcatgctggaccaagactgcagcagcagttgcatcgagtggctggacaagcagcccacagaatccgtgctgtacgtgagcttcggaagcttggcatccatggatgccaaggagttcttggaggtggcttggggcttggccaacagtggacatccttttctatgggtggttcgtgaagattcggtacagggctttgatggtggtccggattttccaaatggatttgaggctgcagttcatggcaggggcaaggtgatccggtgggcgccgcagctggaggtgctggcgcacccggcggtcggtggattttggactcacaacggatggaactccacgttggagagtatcagtgagggtgttccgatgatttgcaggcctcagttcgcggatcagatgatgaacactaggtacgtggtgaacacatggggtgtagggttggagttggaaggtgagcttgagagaggcaaaatagaggaggccgttaggaagctcatgaaggaaaaggagggagaggagatgagggatagagctaaggagctcaagaagactgtggcggattgtttggaaactggtgggacttcacaggttgccattgataagttggtggattatatactttcaatgtgatctttgtgtgctgcctatattattttttggcagctgtggaatctaaattgtagtttattcaggcattctagtgttatggtggtttgtacaaacatacgattcagatcaagtatatcaccttggcaatgtcgtaaacttcaatgttgtagtctgcaggttttcttttctaatgcttcatctccattttttttaacaaagatgcactaccggaattcggctctttgccgaatgtctagtggtttgctgggtgtttttcttcggacactcggcaaagagcttctttgccgaggaccaaaagaaaaacactcggcggcaaagagggttctttgccgagtgccaaaaaaacactcgacaaaaaccttctttgtctgagtgttttttctttgacactcaacaaagaccttctttgccgagtgccaaaaaaacactcggcaaagaaaatttcaaatcaaattttgaaaccctaaacaaattcaaatcaaaaagttttgaactacaaa

SEQ ID NO: 4068 - DNA, 8359 bp, Sorghum bicolor
aatccctgatcttacatgtctgctcgctcttctcttcagcgaatcaatagagcttgctcatacatttttcttaaaaacaagactcacgagaaatgagcgaaacagagatttacaagatttaatgatcaatggctagatcgacgctatgtgtgggttgtggcctatttttctttttgcgacaatagggatttcattcactaaacaatatcaggattacaattagagattaggagcgaagcaacacaagccgtatttgctgccaccgcccggcctatatgtctcactcataatctgctttgcaagagtatgagcatgacgctgtgtgtgggctgttccctgttcactctaatctgctttgcaagagtatgagcatgacgctgtgtgtgggctgtggccttgcgagccacacaaccatgtcaacatgcagcgcctaggagcgcgcgcgcgcgcgagggggtggccgggtgacggcttttttaagccggcggtgagcggtggaacggaaccgtggggaagcaggaagcattcagagccgggtcaccgccgaacggccggccaaggtctcgtgacttgagccgcgagctgggatccgaaaacacccccgtgcccccacgcgcctccccactcttctcggttcccccacaccgctccattccgttacaaaaccccaagctgcaaccccactgacagagacacagagagagagagagaggctctcccggactcccggttcccccctgcctgcgcggcgcgcggcgcctcctcccccccgtctcccgtacgtaacagtaccaccggctgcacggccgatggcgtgccccgcggcgccgcatgcgagcgcggccttcttcgccagacccgctgcgccgctgcccgcgcgccccgcctcgtccccgggcgcggacccgcgccgcgcgttgtcggcctcctccaccaccacaaccagcttcgtcctcgccgacgccccccgggggatcaaggtcagttgcgctcgcgcattgccgtgcggtccgcgtcgcgtggttccggcttccaacaatcggacatgctaggcgcctaggccacgccggtgtcaagtgtggcgccgtggcgtgatctctgtgtcgcgggtgccgtgccgttccgtgctacggcgggtcgatcacattttcgggttgtcgcctgtgtgccaggaggagcaggcggacgcgggcgctcaggcggcggcggtggcgcggagggacgtcagcccggacacggtggcctccatcatcctcggcggtggcgctggtacgcgcctcttcccgctcacgcggaccagagccaagcccgcggtaatctccacccctcacaaagtcgcgtttcgtcattcgtgattcacttgttcgtacaaacttgggattagcggttgcagattcccgttgcaatcgactgacggactgagccgtgaaggtagttattactgtataatagtgattcagctgtcgtctctcgcgtttcaggtgcccgtcgggggatgctacaggctcatcgacatcccgatgagcaactgcataaacagcaagatcaacaagatctacgtcctcacccagttcaattcccagtctctcaatcgccacatcgcacggacatacaactttggcgagggagttggattcagtggtgggtctgtggaggtacactctggagtctaagcagggtcaatcaattgtggaatactaccattgtgatgggctcgtgaccatgttttcctgcctgttttatttttgctcatcggataggtgctggcagctacacagacagctggggaatccggaaagaaatggttccagggaacagcagatgctgtcaggcagttcctctggctttttgaggttcttcctgggccatgtgtaatgctctacctttcagaggatgctgtcactatctccaattaacttttttcctgatattctgtgaaggacgcaagactcaaatgtatagaaaacatactgattctgtctggtgatcatctgtataggatggattacatggactttgtgcaggtttcctatctgctccaagttgatgttgtagtttcagtcttattttctctttgctggacaaagatatattataacactgttttgcagaagcatgttgactctggtgctgatatttcagttgcgtgtgttcctatggatgaaaggtcattcagctttgtcccttttgaatttgtttcttgctttttcttggcaattaaactagtcttcagttgtctaacaaagcaatatgccaatatgatatcttagctagttacctatactgtaatgcactgtttattcactagagcatacttgtttatgaccatcatcaatgttcatgctggaaagctttggatatctcatgctttgcattttataactagaatggccttgttttctgttgacatatcccacgctaacatattcctatctttttatttgttttttttatctcattgacatgcagtcgagcatctgattttggattgatgaaggccgacaggaatggtcgcatcactgatttccttgaaaagcccaagggtgaaaatttgaaatcaatggtacattccctctcactgaccccaaaatcaacaactacttaatgatttgttcagacaagtatagattgaccacatgttgcctttcttttgcataattaacatttttgttcatgggcttccttttatgttgaatcattttctatcatatttgatttgaatcctctgtttccctaacttcatttcgaatgctatcgtttgatttgtttactttgtggaaaggtttttaaataatctaccatacttgttaatgtagcaagtggatatgggattgtttggattatccccagagtttgcaagtacatacaaatacatggcttcaatgggaatatatgtatttaaggcagatgttctcagaaagcttctgaggtaagaattagaacgaactcactaagtaaggctttttttttttgaaaaaacctctttacatgaaagaacaatgcaacaatggcattttgtgttcacaatcttgtgtaccacaatacatctagctttcttttaattaagccttttcttttgtggttcccaacgaacgtgaaattgtccacaagttacaaaactgttacctcttctgatttgtaacctgtaagacaggaattattacattcctgtaatttctccatgcatcttcattcacattatgatgcagctggtggtgatgacacttatgttatttgtttgttgtgcatattaattagagggcattatcctactgctaatgattttggctcagaagtgattccaatggctgcaaaagattatgatgtgcaggtatttacactctacaatcctccaaaatgcaacatgaacttatgttacccactgtagttgtcatgaacacatgattctgaaggacatgttcttctgtttgctccaggcttatttgtttgatggttactgggaagatattgggacaataaagtctttctttgaagcaaaccttgctctcaccgatcaggtttacattttggctgacatcatttccagcttaatctttctgtgccaggataataatttatttattattttgtagtttcccaacttctatttttatgatcccgtgaagcctatttttacatctcctagatttttacctccaaccaaggtagaaaattgcaaggtcagaatctcttaccacctatatattgtttcgtttataatacattacctggtagccttgcttgatatatctgtttttgtgcaggttttgaactctataatttcacatggctgctttctaaccgagtgcagtgttgagcactctgtcattggtatccgctcaagattagaactgggggtgcagctcaaggtaaattattgagtgtttgtgatttatgtagttgcaaatgaaatctgaaactatcctgggggagtgggtgttaggtggggaaatgttaccctttggtattcaatctgcatcgttgatcttcagaaatttattaaggaagatttaatgctcacaatggtaattaaacgtataaatgctaaataaaacatcagattatgtagcccaatctgttgtcacagccatcagattattactctgcagtgcccatatatttatgtttgttttgtataacatacacatttgtggtatcaccatgcatcatgagcatttatgaactctgttgtttgtttagttttgtggcaattttgtacccttttgttaattttgattttgaaggaaaatgtgcatggttatttaattgtcaactgtactctacaatgcgactagttatccagtattgataacggatattttttttattcttgttgaatctcgtggattgcttgtttattttcaagtttattaatgaacaacaaactggtttaggacaccatgatgatgggggcagattactaccagactgaagttgagagattatctgaactgtcagttggaaaagttccagttggtgttggagagaacactaaaataaggttattgtgtatttgtatataaacttggttgaataagtattatgcatgttccattgaagtagagttttgtctacacaggaactgtatcattgataaaaatgctcgaattgggaagaatgtagtcattatgaactctgaggtatgaccccctctataagtaatttttatggaagccttttaagtccatacatttgagcctcttcaatatctgctagctcacttccttagtcatttactgataaaataaaattactttgtaagaaactaaaaatgagcatagcatggtaccataagattactcggtaaggatgaacattgagcatgaacatgcttgcaataatgaatcaatggttgactcttcatttgaccaactacagagaacaaagaaagccagctttttgtgcatttaggaatatgtactacctaccgcagaggcaagaaaaattctgcaatcaactatcacttgatctgaaatatgttttttgggttgcaaatttctttacaaaagttgtgatatatgctatctttttttggcttagaaatagccttatctcttcttaaaaagacattgctagaatgaaatgaccttaatctacttcgctaaaaaaaaagatggcaaggaaaacccatggtagaattggggccaatacgacatataactaaggtattaggttctgcaaatgttattttgttcatattattgttatgaaattcttggttgccattttttccagagtaagatgttgagatgagaatattcccttacgaatgcagaatgtgcaagaagcagacaggacagctgaaggatattacattcgttctgggataactgtggtgctcaagaatgcagtaattctgaatggtacaacaatttagaagatatagagttatctgcaggtaagctacgtgtgatgcttaagaatttgcaatcaatgttattgcacatgataatttcatttaaaaaaaaagttagagaatcagtgttccatgtacaatcctgaaatattgacaaataaacaagttaagcctacacataatgaataaatgaagaatgtccagatttctctagtgttagcaccaaatcaattgctaggccttgttttagttcaccccaaaaaccaaaattttttcaagatttcccgtcacattgaatcttgcggcacatgcatgaaacactaaatatagacgaaaataaaaactaattgcacagccgagatgaatcttttgagtctagttagtccatgattggataatagttgtcaaataaaaataaaagtgctacagtgccgaaaaccaaaaagttttcggaactaaacaaggccctactgtaaagttaggtactgaagaaacactctgtaaacagtgtactaactgctgacacaaagaatgaaatagctgtgtaatgtaggtaccacctcaattacctacgtctaaggtaatacctgcctgtgcaaagaatgaaaagaatgaactaataatattcactagctgtgtaatgtaggtaccacctcaattgcctacgtctaaggtactccttgagatcaaccttttccactgcctaattctctggcaacttgtagttgtacccttatgccctcttttcttttcttgtcagaggcagcattgtgaggatatttgttttctaggactaggattatcttctgtcatcagacttaccctttcttttgaaagtgttctttctattattggggtttgttcccaagtcagatgggatcaaggaatgttgtatgctacttgcgagaggtttatacatgatggggttgaaaatgaccctgtgtactcaggttggggtcgacgttcctgggtcgagggtcaatgccgttggacccgttttttatgactatatcatcctcagatcactcatgctaagtatagcagtggaaagatctgtacataaatccttactatctaccaaacatcatcgtggataaaaaggttgtcaggggaaagatttgtttcttgtatgtattgggaacatgctcaacaaacatgctcaacaaatgtattgatgctcaggggcaaattttccctagattgagctaccctagtgccaaggtactatgatagtagtatttttgccactaaggtcattcactgtaaatttcaatgaaataatacatgttccttgactggtctatagggctaatctagcactagcttcgcgcctgttcatactgtagcgccaggtactagggtatgtgccaatcatatagggtttgattggttgtctttattagcctgtgttcaggcttgtgcagtttgcccttgtttggttgcctacaggctcttatgcaggcttgcaaagtcaaagcaggccaatgcagcattagctaatacgttaggtattttttttttatattagacaatgcagatttgcataaaccgatgatcacacaaaaatgaagtattttgacgttctctacttttactacaaacatgagaactctaatagaacatataagatgactatgtgtaataaaatgttaaaaaaaaatgttattggacgcggcttgcttatgtaagataaccaaacaccaaagcactacataagtttatgctagcttgggttgcgctgcataaggtctaatcgaggctaggcctaatataggcaaccaattagacccatagtacatttgaggatatgcacaacttggagttagcagtacatgcttggagatgatgtagttgacacttacaataaagcatatgtgattacctagaaactttggtacctactgttccttgactaaagaaaaacggactagaacagcttaaaactgcttggaacagtactcagggtagggttaattttctggtgttctaattcccatcctatctatgaatcctaggtgattattttggttatatatatatttttgaaaatgatcacgaaatgcataccatgttcttactgctttgaaattatatgtcaccgagtcataaatccttgcctgtaaattgcagaatatcaatccctcaatgaagtgttacctctgaaacaccccattgaagctcagtcacagcagagttctacgcagatgcaatcaataaaacccaatagcacaaaagattacaagactgtcgatgcagctaagtactggagagcacctgcaactgcaacacaccaacagttctgccagaccatgaacatgaggccattgcacgttctttcacctcagctagtgccggcgcggtggcacgcacagagggtacctttcttcccttttttgcagcaatttacttaaagtgtacaggcgagagataggtacagtacgagagagcatgctatatatagtacattctagtctactgtgatgaagtctcctgattctgctccactcatagtccagtactcttagtgaaaagtacccactcttatttgtttggcgtttgccaaaccttcataatttgaacaactcaattcatcccaaattataagacgtttggctttttcaacactaagtttgaccactcatttctattaaaaaatttgtgcaaaatatcacctctttcgtcatggcttggtttagtatgtttgtaccactttttaaaataagatgagtggtcaaacttggggcaaaaaagtcaaacttcttataatttggaatagagggagtacttattaatttccctgacaaaagacgttaactactaataaaaatagttatgtgaataacattattttttgtttcattttgtaaatagcatctgttggcacaagtacacaatttcagacactacataaaccgaatggaaaaaggaggaaagaaaaacgagagtacatcttattttacctccgaattgaagtcatcagtcatgtgagatgacacaattcct

SEQ ID NO: 4069 - DNA, 3134 bp, Sorghum bicolor
aagatggaaatcttaaacattgccaccttttatgtactctaatacttatgttccaaaggctaaacctattgtaccttatgaagtatgacataaaattgaaggttgaagaagagatataatgaaattcttgatacgaccttcaactaaaccatcatttttttcaccttattttgttcttatcaacaaacaattcaaaatacctcgaccttttcagaataggtgtaagtcaaatagtaacgatttgaaaacacttcttttccattacatattttggaaacctaagggctggattgtatggatatggcaattcgggatttctagcagcgcattttttgatgggcttccatggaataaaatgtatgatttctcccttcaattctttatggggcatatccaatcaattggaattcaagttaaatttcagtgggttatttaaattgcgggggggggggggtggaatactcatattataagacttggtgaaataatgtctagcaaattagtcgaatttgcaaaagggaagaagccaaaactattctcctttttagaaaaatagatatatctagaatctttaaaaggccatttagatgttggaataccattaattcagtaacccaccatgagatcaatttattaattgtagcatcaacacttgtagatatgtttctagtatatgccatattttttattgttatatagtgatatagttacattttgtagttattgaaatactcatattctttaatcttgttgtattggtgaatttttttgtaaggattttgagcatagaatttatatgaatgttttcattggtctagaataaagatttaaatgaagaaagaaatcttagactcaagaaaaaaagacaaagacatctgacatcactcatcattggagtacataagatgataaacatgcatccagtaaggcaataacagcattggagtacataaaggctgctgccttttgggcagtgtaatggctacagtcagtttgtaacagcatatatggaccttaatcatttaatttgaactaaactctaggatattggatggatgatgtcacatatatctagttagtatcttattgcaacccgctctaagatcaattcattgttgcttcaacacttgttgtatgttcctagcattctagtacctattttttgttctcaataatatagtctcactccatatttattaaaatgcttatactctttaaagtatagttttgcatggcactcatgaacttttgtgaaattaatttgggaatcaaatttatatgaatgtttgctaatatgagcttattacaaccataattaggtgcataagaaacaatacaattgtgtgaagaaagacaatattagaatcaagaaaaatacaaaatacatctggcatcactcacgacacccttctcatgagaacataaaacgataaacaaccagcaaggccagttaggtacgcgcgtgtgatcctctttaaaaatgtgtgctggctatagtaaatttgtaatggcataaaaatgtatgcgtgctctgctttaaacaacccaagaatatttaggtaaaacacatccgaaggtggagacttttaggtgacacgtattttacaattccttcgctcttttataataataagataagatatatatagatagatagaatagataagcagatagctagatagacaaatagatagatatagatagattatgaagatgggccactaattacaaccatgacttagtgtagaagaaacaattgattgaagaaagaaaatcttaggctcaaggaaaagacaaaagacatctaacagcatcatagcacattaaggacgccatctgggcagtgtatagtggctacagccagtttgtaacggcataaaaattctgtgtgctcctctgtaaaccacccgagaatatctgtgtgctgctacacaacctacgcaagtatataagaagggtatcccgtacctagtctcatctatatcttcagcctgcagcataacactccggccattccatctgaaggctgaaatgggtctctccaccaaactttttgcggtcctcctcctgctcctcattggtggttatactggtatgtcaccataaatacatgccgctaggtaatggagtagattgtaaggcttcgaattttgcaagattctatatatggaactatcgcaagatattgtgaagccacacacacattagaacaacgtttaaatccatcaaatacatagatatggtggtaactgaccgactccggccgcacaaagtcatccaagaaatgtaaatgatttgatgttgctttgtgtttgtgtttgcagatacgcagctgggaccggtgactatggcactggcgaggaagtgtgagtcgccgagccaccgcttccagggaccctgctccagagacgcaaactgcgcaaccgtttgccggactgaaggttttaccggtggcaagtgcaaaggcctacgccaccgctgcttctgtaccaaggactgctagttgcctcgcgtcctgctcctgcatgcatatgtatgcatgtcctgaacgcatcaggagaatatgtatgcattaccaaatggcagtagtacatgaatgaagtaaataatggaacgcgtctgttttggaccttgaagtgttgagagcatcttctttcttatgaacaagtgttgagagcttaagcccgtacttcggtatttattagtaaacgaactctaaagtcaaatatctttgttcctcgaactattaaaacagcacggcgttgggtctggtctggggtgatgctatataaaaagagagagtattctggcatcacttttgacactgcaaccactgatgctagagcttattaggagcttagaaacttggagcaaatcaagttgaggaatccggccgcgcctatcgattaagcaaagaggaaaattaaagatgcagggtcctctactctacttcgttcaatacattgccttgtttatctttttgactatgtgatggaacccagcagacaacagtggtgcctatttccatgtagaacgttttagagcatctcgaccggatgtcatttttcgtttatcttacaatctagtatagaaattaagaaaactgaattatagagtataggggatatgtgctc

SEQ ID NO: 4070 - DNA, 3240 bp, Sorghum bicolor
tatatacatataaaataactaaaatcttaagtcttaaaataactcacatgctgctagaaaataattttataaaataactaaattcataaaaaaattatcctaaacatttttttctcattaaggatttgttcatccccacacaacaaaatttattttttcccaactaaaacatttttaaaagaacattctttctttcttagttgaatattattttctaataaatgaaacaatctcctttggcttctggttttatacgccatataccacttcgattggcttcttcttggttggcacgacatgttcgacctgatgtatgatgaaattgatgggaaatgatcatattgcccttgagtggtttgctcattgaaaaattaaacttaacccttgactcacaatcacccctccctctctcattcgattactcatttactcctcaaccatgcgtatggcaaaccccagttcaagtggcgaccatggtatcgatgacaaaatcatccatatcaaaatctatctgcgctagagtggtggtgtaagatagggtacaacgatggtgaatctaaggtttcggaggtaaatttgaggagtgggcacgaattaggatcggagtaggaatggcgaacatagagctagatggatgtctaactttgctttcaaatgggggagtgctcccttctcctactcgaatgcatctcatttcattcaagagattggctcattgaccgcatgagactgaacccttaactctcgattgtccccgttgtctctcttccttcattttattttatttttttggctacacatttaccaaccttatattacttttagatatttcatactctaaatgatcttaaatgaaaaaagttgttaattgtaaagttgtagtgcagtactaactctaatattgactttgtctctattcgacattgttaactatctcaaaactaattcgagaacttatactgaatatttggacatataaacattctcaaattaaaaattgtcaattataaagttttagatctctttgaactatccaattttgatataaagtttatcttatccgacctcatatgaaaaattatgaatctttttgtgcaaaatagtagcctatcactcctattgaatccataaaccgacattgatacgtggactttgattcatggctataaccagagtgatagtatgttgtatatcagtgctggttgtagccacaaaccggcagtaaaagttcacatattcactactggttccaaatcaaccaacaatgttagtttgatagctatttacgtgttctgtgtggtagtggttgaagtgtcgacgaagcctatgattcaaaaggctttttttttaaaaaaaatccgtgtgtgcactattgtcttcagtacatgttccgatattcgaattgtgagtgcatgcccattgaacttaagactcaggatcacaattggccattgtactgttccacccttaatctagttgactcagacaaaatgatggtattatgttctaatcttagggggtgtttaggactgctctgctccatattttctagttcaatgatttcagctcaacgcacttcgagcaaaatagatgagttgtgagaacatctaaagagttactccataaattttagtttttttcgagctgctccacaagttttgtggagccgagttgcccggcagatgctctccagcgtctccatgtgcgcgcaacaaaaaattaaagcgccgtccagataagccctgggccaactagctgtattgaaatgtaaaaacaatgacgaggaccaagattatacagatctactaaataaagctatgtctattattctttacttgctcctttctcaacgcatcatcatctcattacctgccggatcgacctcaaattcgatcccaactcaaaccgatgcaaactccaagcagtacagcctccttcctacatctgaagcaagaacgccgcctcatcaaccgcgtggcgacggcgacggcgaggcaaccatgtgtggctgctgcggcgagtgctgggacaatgtcaaggactggctcatctgtctcgccgtcgtcatcggcctcatcgtcatcgccggcgtcgtcatcgtcatcgtcatcttcggcgggcctctccgccacgtcaggatccgcgtggaggacgcgtcgctcacccggttcgcgctggtgaccacgcccacgacggcgctcgcctacaacctcacgctggcgctgaccgtgcgcaacccgaactgggccatcggcatcaagcacgacaagccgctggaggccgcgtacagcttcgacgggcagccgttcgagcgcgtgcacgtcgccgacaagggcgacaagcagggtccccggaagacggtggtgtaccacctggcgtcgagctcggaggcccgcggcgtggcgctcggcaacgccggcgaggccgagttcaggaaggagaacgccacgggggtgttcgaggtggaggtggcggtgacggggaagttcaagtacacgctgcgcaagaccaagtgcaagatcgaggccacctgcccactcaagctgcagctcgccgcgccgggggcaacgtccgtcgtgttccagaaagtcgactgcgagctcgccaagtccgacgacaagtactgctagagatgatgattatattggtttgcaaatgcattgattttgatttggagctcatgtgctgtgttttactcatcctgtccccctcttattggtccttgttgcaattgagttgaactgtgtgttgaactctctctctctctctctctctctctctctctctctctctctctgtgtgtgtgtgtgtgtgtgtgtgtgtttcgcctttcacattattcattgttttcgatggcaaatgtttgaacaagagttcttcacatgagatttaaacaatgcagcaatgtattcctgtttcacaaactttcttgctgtgaacaaacctagttattgcaatgcgattccgcatgttgacaatggacaaatctctgcctgttatcttttattttttacctcttttggtctaggcggcgggtacgcattgtttaagtagtagaagtcatatccttaccagttaagttcatagaacgaatggaacgtggtacgggaatagggtacgtgatacgatatacacttcaaaatggtggaacatggagggtatacagcctcgactcctcccttcaagtactaaaacatgtaccaattaaatagtaatgtgtaggggacaagttggttggtc

SEQ ID NO: 4071 - DNA, 2843 bp, Sorghum bicolor
  misc_feature (859)..(958): n is a, c, g, or t
ctttcccttcctcctctaatttatcctacatgtttgtattgatcacccaatgttacctctcataccctatgtataatattcaatttaactaactaaaatcttgtgaatagactctcaccttggttattacacccttggttgatccattttgtgccaacaatggtggtaactcatcatccactaggcatagctcctcataaatttatactccatgccagtatcaccaatcaataccttttttcttttgattcgaaactttgttagtatattatcacaaaactcacaatcaaaacaaaaaaatggactaatgcaagctattactttgtttcatccattttgtatattttcctcaattttgtccttcccaaatgccctcattgtttcctccgtatcactttgtctatagtactaatgactgataaggaagtaacagtgacataatgtgtacttgaaacctttcactccatttaaaagcactctataatggatttttccactcgtgccacttctatggacgcatgcagcggcaaagaaacgtgtccacatgctaagtcttgtgcatgccatatcttaatatcgtgcatagaaccaagcgacttgttccccctcagccgcttctgcaggcgtatagagcgcataggaccatgttcgctcattcacatgcatggcttatttccactcatgctggtcctataggtgcatgcaacggctcaggacaagaattgtgtctgctcattcacacgcatggcttgttcccactcgtgccgcttgtacaggcgcatgcactcatgctcattctcatgcatgccaaatcttgatatcatacatctacatagaaccgccgtattggggcactgcnnnnnnnnnnnnnnnnnnnnnnnnnnnnnnnnnnnnnnnnnnnnnnnnnnnnnnnnnnnnnnnnnnnnnnnnnnnnnnnnnnnnnnnnnnnnnnnnnnnngacttcaacttccagttggagctagttgataagatacctgacaacccaaaaaggtttttattttagagcactggacgacggttagtacatgtattattcatgatactaataatttgaatacaaattcatctacctttgtaacatgtgaatgttctgggccgtctcactatgcttttgttctatgccgatgcatgatatcaagatttggtatgcatgagaatgagcacgcgtgcatgcgcctgtacaagtggcacgagtgggaacaagtcgtgcatgtgaatgagcagacacatttctcgtcctgagacattgcatgcacctataggagcggcacgagtgggaataagtcatgcatgtgaatgagcggacatggtcctatgccgctctatacgcctacacaagcgattgagtgggaacaagtcgcttggtcctatgcatgatattaagatatggcgtgcacaagacttaccatgcagacatgtttctataccgctgcatgcatccatttaagtggcacgtgtgaaaaaacaagccattacagagtgcttttaaatgaagggaatggtaagtacacattacatcaatattacttccttgtcggtcattagtattacagacaaagtgatatggagggaagaaggaagtcatttgggaaggacaaaattcaggacaatatgaaaaatggagggaacaaggtaatagattgaattactctattttttgttttgattgtgagttttgtgatgatatactaatgaagttttgagtcaaacgaaaaagaggttttgactggtgatagtagcattgagtacaaattcatgaggagttatgtccagtggatggcgagttatcaccgttgttggcacaaaatggatcaaccaaaggtgtaataaccaaggtgagagtcgattcacaagattttagttagttaaattgattattatacaaaggttatgagaggtaacattaggtggtcaatacaaacatgtagaatgacgtagaggaggggtttgaggatcatcctggcttgccaaccacggccatggagcgaatccttgactgtgccaaacccatcagggcaaccatcagggtttcctcttatcatgtgcttcaagacaatcatgtctttgatctcctagagcacaatgatagtgaggtgcctgtgcaagatgatgccaatggaaagactcatcttaagggcctctccgaggtaccgtatttgcttactttttctaaattcatgttcttgactttatattatctcagacacaagtttctttaaaattaatcacttaatgcaggttggaatcaattccattcaagagtttcaaattttgtgttatgggagtgacaagctccaaaatccaagcattgcttccagctaaactcacactgtggttgtgagcattaatgtaatcctaagtttagttcagttttaattttttagtttgttagagtttagcttggcttggttgttgtgaacctctcgagcgcgtccttgtattcagggccacgatgtgcactttgttcatgtcatggcattccctgccgctcaatgttgtggcctcctgtgtgggatggcacgcacaccgcgggtcatggcgagcatggcgttcatggcgagtgaccaaggctagcttgaacactcttttcctttatatagttagaagcttattgtgtataaaaaggtgcacttaatacagaaaacactcacatggttgtgtacagcctcaaaaacatcatgtgttcattcttattcgtgagatcgtcaattcaaatttgatcgctagagagaaagtccggctaacatttggtaccaaagccaaggtacactgttgccatgtctgagtcgccgtctaagaaagaggcagaaaagggtgatggc

SEQ ID NO: 4072 - DNA, 5082 bp, Sorghum bicolor
tatatgtgtaccaaactattttaaaactttttagcacatatttacgttcctttttaaaagctccatttttggaagattttgaaaactagtttttgagaaattgattcaaaattattttgaagcttttttaaaaaaaataaaaatatttttgaagcctttttaaatatagtttgaaatactttttaaaaacaaagactttgaagagtcaaatttgaactcatttttaaaaatagttctaaaacaaacttttgataatttatttttggtaaataacgaaaaacctattctagacttaaacgaaatttttaaatttattttgcacacaaaattaagagtaaggttcatcaccggtctctaaacttgttcgggtgtgtcatcctcgtccctaaactcacaaaatggtcatttaggtacctaaacttattcaattgtgtcattttggtctctaaatttggaaatctcccatataggtcctcaaacttgttcagttgtgtcatccccgtccctaaacttgtttttatatctcatcggggtcgaaatagggtgaatttaaaaactctatattgaaaaataactcataactttttcatatgaactcaaatgaagataaactttacattagaattgtattcggcaaggcgatctacaactttgtagttgaaaagtttttaaattaaaatcatttagggtcccaaaatattttttgtaagtttataaattttgaaatttaaaatttaaatttaattttatgacactaaatgactttagataaaaaaagattccaactacaaagttgtatatcgcattgagggctgcaactttgatataaagtttgtctttctttaggttcatataaaaggttatgaattatttttttatataaagctcttggatcgctttgttaatgagacaaaaaatcaagtttaggaaccgagatcatacaactaaataaatttgaggatctaaacgagtgatttctaagtttagggaccgagatgatacaattggacaagtttaggccgtccccaacgctccaccgtgtattgtagcctcgagtgacacgtctgcatttgttgtccatctcacgtcgagtgatagcctcgcagtgtgtcagtgtatcctgcagaaacgcctacagcttcagctgacaaagtgctaaagaaccagtagaatgagcgtttggcctcagactgagcggagaaaagcaacaaagtaaagggacaaaagctgcaagctacatgtatacacggtggactaccgttgtgaaataatatgcctcaactactcctcatctacatggactactacttttacttgaggctaacatatgtgttcgcttgcgttggtggtgctcttagggaccaatgtgacacaaacgaataagttcaaaaacctaaacagttgatttacgagtttaggaactaggatgatacgatgatacaagtttaggcagggtatccaacaaagaaatagcttcctctgattcacttcaagtaaagagtcactttccacgtaaagtactccgtatcatagagcaatattttcaataaccatttcttagaaaattaggccttgtttagttcccaaaaaatttcaagattccctgtcacatcgaatcttgcgacacatgcatagagtattaaatttagacgaaaacatttgcctgtaaatcatgagatgaatcttttgattctaattagtctataattggacaatatttgccacaaacaaacgaaagtgctacaatacctaaaatccaaaatttttgccaactaaacaaggctttagctaccaaataggccctaaacctaaaccgttagcctggctcagaaagcccatggtaatctcagtgggcttcaagccggaccaccattcggcccaacaaatccctcacaattttcgcagggcccagccttaagaatggcggaattcccaaatttgaaattctcgcctcctcgcttttcttgcttttcactcccacctcttccttccacccagcaatgccagcgacggcgacgactcatcgctgcggcggaggacgaatggccgctatgggcggcactccgagcccggctaagcggccccgccactctgacgactccgcctctggcggcggctccgattctgactctgatggggacctcgtcaggtacggccggcctctccgcagcgcctcccctcgctcacgggctcgctctagaatattccgctttcgatttatagctcgttggattgcgaacgttccttttttcctccttcgtctcctggcatgatttgagatgttcaattccgtggttgcggcggcagtgacctcagggagatcgtgtgcctgcttcggcttatcaagggcggggccaacaaggacgggcagaagatctgtgagcagatcgttgtcaggtgagtttcaaaccttgaggactccgaatctcctcgcgattgtgcaaacaattgggctaatcgcgtaaatatttgttagtgtcaatgttttgttgcatgattgctgatgacttgcgattgcactgactactgcccgtgtgattacattcggcagtttttgttacgatttcacatattactggtgaaatattgcccatctgcagtccatgcaattgtgctaccttttaggcttcaatgcagttttggcaaaataagtaaagaacttgaaatttgaaaaaaaaaaaaactcgcgattttgtaatttgtagtgaatggaagggaaataatgcagtatttttgacagttgtgtagtcctgtgtatggagctttctgtttcttggattaatctttggttgttttgttgatgttgctgtgctcatagcttgtggtctgaatttcttcctaaagtaatattactcttgcaatgcagcaagagcctgttggatttctctgttatgaaattttctgttaattgtaggaaatcaagatacttttccttttatatcaaggcacatagtattatctttccacttcctatttgaaaaggcagcactccaaaattgtagataactgtttgagtgtttcacatgatatatagttgtagtgtcataattgtaagagtgagtttatccatgtgattggtcgaattttctctcctgagcaggctaaatgcatggtctgacgaaatctgaaagtcttgttccttcatctgtatcagtagagtagtagagtttgttgctaattgtcttaacctgtagtgtggcagcagatattcagactatgctagaagaaacccagctgaaatttgaggaggaaaggtattcggtattccacttccatgtgatttgtttcccattaacttactgagagcatctgaagccagttataacttacaataagccaaacaaaaatattcatcttcagtgagaacacactaatctgtgttcctatttgtgcatgcagacagaatttgctaaaagtactgtctaacgcttccaaagaggtattcataacaactcgtattccagggttttattttgttctaaaatgacacaagattttacttcagcagtgtgagagttcactgaacgaagagtacggcaagtttcaggaaacatatgacacgttctgtaaagaaaaggatgctcacatgcagactttcagaggtaggtcaaagaagagcacctgtgatggatgcctctctcaccaatttcttcacttacatatgaagcgtggctctttttttctttctaaaacatgctactagccaagatacttgatttgttaattcatgattgaatttagagtacaccttcgaataaacctgtgtgctttgtttactaaagtttgcttttcgttgacttgttgctagttatacgaatgaatttgaattatgtggctttaaaaagaatggcttgaccaaaatattagcctatcaactgaaatttttgtatatgttatctgcagacctgttctccaaagttgaagttgagaagaagaaattgcttgagaagtacgaacattatagtaagtagtaggatgacttttcaatttttgttggatggactgttgtttacctgactatcatcattctttcaaccagggaaggcggagaccaacacattatcggaacttgacaaaacattctcagagaaggtaacacgtgcggaacaatctgtcagaagggtgaagcaggtacatcttgaacatatatggccttgtttagttcgcgaaaatttttgggttcggctactatagtattttcgtttgtatttgacaactgttatccaactatggactaactaggctcaaaagattcgcctcacaacttacagacaaactgtacaattaattattttttatctatatttaatgctccatgcatgcgcccaaaaattcgatgttatagggaattttgaaaatttttgggaactaaacaaggccatagttacatctgcttgctcccttgtcgctgtattttcctctgataatccaaatttctgagtccgagattccagtactgatttcacatttcaatttcattgcttcatttatgcaggatgacaagtcatttatcatctttcgcaagtctattggctcgtctcttgagtgtggctctgatgatgattttgaccttgatgagtgacacagctaatgataatccatatactagatagacggaagctcttcattctttcttggcctttcctttcctttttttttacctggtggactttgtagtataccattttttttattatactttactagctcattgtattagccttttccaagatgagtttgctcgcaatcctgaatttggtatcgagctggctggatatgtgcagatatatcgtgttattgtttccactttgaaagcagaattcagaaatattatcactctggaaattattatttcttattgttcaatgacatcattataagaaacaaaattgatgttgatgtctgatcaacccattctaagggcatgtttggtatatgaattttataggaaacagttcaatttcataagaaaacacaggaacagggaaaaattcctaagttccaaaaggggccttacatatagcaatattcagtaatttcagcacccaaagttctcctttgctaaatgtgtggtacagtgat

SEQ ID NO: 4073 - DNA, 8732 bp, Sorghum bicolor
tatttagaacaatatcatgccagcgtccacaattgtttcagattaacggatcatgtgtgataagctttgaggttaacgagacttactgtaccagggttcaggatacaccagacacatcaaagttgttggattctgctcgaacaccaaactcagggtcggcctgtttgtttggctaaaaagccataattaatataatatacactgatttagtgtaaaaaaaacaatactgaatgcctaacaaattagctcaaacgaacagggcaacacaaagagttaaagacacatgagtaactcaagtattggtaacaagttgcagaatccaacaactcaaggtcttgtttactttcaccaaaaaactcaaaatttttcaagatttcccgtcacatcgaatctttagacgcatacatgaaatattaaatatagacgaaaataaaaactaattgcacagtttagtcgaaatttatgagataaatcttttgagcctagttagtccgtagttaaacaataattatcaaaaacaaacgaaattgctacagtgtcgcgaaatgttttcaagcctgaactaaacacggcccaaatctctcttcactaaactcagctcgagaaggcggactgcagttagtccaatggtgtactaatcacccgacatgatccgccatccgaggcaagtttgcgtttcccgatgcatctcaatctcaggcattctcgtgcagtactactagttcttgtgcgattgagtctacagaggacgaaccaagcaattcagaaggattcttcaccactcttatatatgatgacccctcgatcgctcgtttgccaggcaacaagaggcacatccctggaactggaacatgttttcactgcagcactgcactgtgctcagagttaatattaatacaccaggatatcttcattgagagcgcggataccgaaacccgatgaaggccttgtttagatccaaaaactttttggattttgacactgtagcactttcgtttttatttgacaaacattgttcaattatagaataactaggcttaaaagattcgtctcgtgatttacagataatctgtgcaattagttatctttttttatctatatttagtgtttcatgcatacgacgcaagattcgatatgatagtgaatcttgtaaagttttgggaaacaaggccgcatccgaggttcgatttattccaatcgacgatcccaataaacattttggccagggttagcccgctagagcatataatagggaacgatgtgaaggcttcatcttacgaacctggtttcacatagtgattttctctagtgttagttgtggcaaacattttccccaagcaagtgaggcagtacaatgacctcacagcaagagacttagcttaaccaagaagcatttcattattattaattagagggtccgaataaccaagaaacatctcattattatcaatacatatattatatcatgttcttacatgaccaacaccatacatatagattcctccttcatacccacggcaacacgcaaaaaatcctcttagaatatatgatatgcaagtacaacattcgaactgtcacacacctatcaggcccccacgacatactccatcggttcttttctacatgtcgtgttagttttattctaaattaaagattttaatttttgactatcaattttgtgaaatccatatagtttcacaacatgtacattatatattacaaaattaaatgtcatatagtggatttaaaaacataaatattacgttattaacatgtatacttcttttaaagttgatggtcatcaaaattaaaaatatttaaattagatctaatactcctacttaatgtaaaaaaaaccaagaatgggcctgtcagtgcaccgagcctaggcccacggcgatctgcgaggtaaccgaaaacctggcccagctcaagaaactcaagaaacctcactagcaccacccgcatcaccagttgccgcctcctctccctccctctcaatggcgcagctcccagaccccgccgccgccaatgtagcggccgggaaagaagagacggcaggctgggaggacgcgctggacctggacgactccgacatccgcttcgatcccctcccccactctttcggcgccaccgcctcccagtcccagccccagcaggacaagcccccgcacccctcccaccaccaccccagccaccgcatccctggacctgccgccgccgccgtccaggacacggtcgtcccccgctccgtcacccgcccgcctctcacactgggacgcggggacgcgcgcgccacggacgccgacttcctgcggcccccgtggctcagcgccctccagttccttggtgaggggtagttcagtgaaggcattccttcgcgtttcgtggcgaggtttgtctccgtgtgatgttgttgtccgtctttgttggcttggatgcagggaaggaccgcgcgtgggagcggccggggatcagggccattaagggcgacgaggacttgcttcgagcacctttggtgcgtgttcttccacctgccaagcttttagtttttcattcaatggccatttcgtcccatcctagcggggatattttgggggttctctgttcacatgagtgtgttctgtgttgtcatcaggtggctggggtggtgacatcgtgcaagccaaacgggctcggagatctcttcttgattctaaaggttagcactcagcatgtcatttagttctctgtgctgtcttgttttcgttttagcatgtcatttcgttttagcgaaaacaatcaggggagctgtatgtcatttcattaagcgatccacttaatgaacaaaacaagaagcaacctaaaaactgagacagcagtccttagaaaatggtttgttagtgaggtctttagccccagctgtacaccgtaaggcactctcgtccactgccctcataaccaagtttgtacttggaaaagctccatcgatgtttccacaactctcatactgccaggataatcaaagtattcaagccttccttctctatgctgcttgttcacacccttttgattgcacagaaccaccatgtaaaaagactagccaagcctttgtcaggaactacagcttgtaaacccagcttctgtgatatgatgaaccgaccacaattcctttgcaactacacaggaaaccaaaatgtcactgttgttctcagctgcttgattgcacaaacggcaagattcagggcgatgctagcgcttaacaacctgtcagctgtccaacagcattacagtcatttaggacagctagccacaagaatttatttccaagatgtaaaccctgtggattccacaaacaaagagttgtaagctgatttgcttgaatataatcccggccctgtcaatttacaaaggtacttgccttgaaatccatcgtggagggtgacattttgtagcaagtcacatacttggagatattccattagtgcctttaaagtgagaccatgttttcagatcgtattatcgaatctagttgtttgaccaccgatcagacgactaatcgcgattagtcgtcgatcagggttgattagtcggtctgatcggtctggtcgggctgatcggacatttagtcgtccttatgcctagataacctgatcgaccatgtatatactatatatatatatgatgtaaatatatgaattcatggcataatgaatcattatcatggtgatttggccacttacatgtaattccagcttgctgatgcctgatttggccacaaacatgagctcctgcctcctggacactcactcactcttgttcttttcttaccctaattcgctggcttaaggtgggcctaattcttcctacaggcctaaatacaatattcctgtactggcccaacttatcgtcctgctacacttatcggacgactaatcgtgactaatcgcatctaatcggacgataaggtttctgatcgacctgatcgaatcgatgaaacttatcgagcacgcagttacgataaggacgactaatcacgattaatcgcgattagtcgtccgatatgaaaacatggagtgagagcacctctgatatcttttaccgatcctctatttaccattattccattattaacaaaatattccattttgtagcaagtcacatacttggagatattccattattcttcgatcctgctaacgcctctggcactgactgaaatctctgggatttctcccttctctcgtgagcaatgctgcacccctcaagggtcacttgcaactctggcgctcgcttttcctgtacttgattgttttcagaaccctagaacacagacggtagtcagtccaatggtgtgtactgattactggtgacaatcaccccatgcaagtttgggtttcccgatgcatcgcaatctcatgcatgctcttatagtagtactagtcttttaacttagcatctagttttgtgcaggaacgtaatgtgcatgtgcgaattgcaattgagtctacgtacagaggatcaagcaagcgatttagaaggattattcaccacttttatatatgaccccctcgctcgtttgccagccaggttactgagaggcatgtgcatccctggaactggaactggtttttactgcattacggtactcctattattaccacaaacctgcacggaccagagaaaatattatgacaatgagttaatactaataacactggaatatcttcattgagggtttagagctaccagttttactccaactgtatacatatattaatatacggagaactgaggatcccaataaacttttggccagggttcaccctagctagctcactatataatacgaaacgatgtgaagcaccatgcacactttgtcatatcttgaaggcttcaacttacgaaccttgtttcacatagtgatttttcttgtgttagttgcagcaaacgttttcctcaaccaagtgagacagtaaaatagcatcacagcgatagacttagcttaaccaagaactatgcatctcataattactaattagatagtccacataatcagtgttagcctagacaaagacattctagaccaagattatactagtgtctgcagtaaaaaacataaatctttgattcaagacatattttaagagctgtattcagaaaaagtcgcatatatatacaacatgcaagtacaacattcaaaccatcatgcaaccaccagtccaccacaacatactccatctgttcttttacaagtcatattaactttgttgtaagttaaacattttaatctttgaccatcaattattatatagtactattaaacgtgttagtgcattgcgacggaatccaatacgtacaggaatcagactttgtatcatcgctagacacgagttgttctaactcacaggtgtcggcaatcagtgtcagtgagaggtttggttcggtttcatcgatgcaagaaatctttggtatcgttctaactaaaaaacgattggtgcaagctatcatagaaaccgaccatttcagtgttggtttctttggtgcggtttccagttctccatagaagtttatcttgtttgttccaaatctttcaatagtagagatggacagacggaaagacaaagaatcaaggaagcaaatcattagctattttatgttcgattccagcagtagagccgattagttgtttgcataatgtgctattttttattgttttggatgccaaccaatgttggagagatgaccatatcattttttttttggaggaaacatggataaatacatcattgcattgtgtgtggaacctaacatgtgaaaactgaaatttaacataggaattgctggttcatcaaactgcagagaaaataaatgagcagaatagtattcaagccttccttctctatgctgcttgttcacacaactctcccaccaggataatcaaagtattcaagtcttccttctctatgctgcttgttcacacccttttgattgcactgcaccaccatgtagaaagactaggcagcctttgtcaggaactagagcttgtaaacccaccttttgtgatacgatgaaccacacttcctttgcaactacacaggaaaccaaaatgtccttgatgttctcagctgcttgatttgcacaaaatgcaagaagcagggtgaggctaccctcgcttaacaacctgacagctgtccaacagctcatttacgacagcttgccacaagaactaacccctcaatggaactcaagacttccaaatttatttccaaggtgtaaatctgttggattccacgaacaatgagttgtaagctgatttgcttgaatataatcctgaccctgtcaatttctgaaggtacttgctttgaaatccatcctggagggtgacaatttgtagcaagtcacatctactacagcctccttcaccattttccgtttgatttcttgcctttaaagtgacagcacctctgatatcttttacccatcacctattaaccacagcctccttcacaattctccatttaattgcttgctagggacaaggataataaggttggtagtaacttctgatatggtctttccttgcagccatagattagtttagaatttagcagcggacccatcctctacattggttatcttatcatagccatatcaaaaatatctctcacggttggatgcacctggatttatgaccctgtccatggttgaccagagtctgttttctcaaagtcatagccatcttaattatggcacccaaccaagaaaggtcagatcatgaaagccacaaaattgaagttgccgttgaactcgctgctaataaacaagacaattaccaccattgtcctcttggcctttctaaagaaagtcttatctttttatcaattgccttcatcatcaatttttgaaggctcataatggtcataagatatgtcagaaatgcttgtaccaaacttaatctaccagcttctgttcatcaaaggggccctccagcttggcaaataatcagccaccttatcaacaaatggctgcaattcagttttggtgagcttcatggacaaaggaagccctatataggtacctggaaagttcctgatttcacatgtgagatgatcatgtaaatttccagctctttgcacttgattagtgtggcagaagtcttgcgatttatgaatcgctttgaggcctgaagcttctccaaaatgtgcaatgcttgcttgatcagtttccatatccttcacaactggttgtatccataaaacagcatcatcagcatataatgatggctggtgctgatgccatagaccatggaacaagagtagctttaacaatccttgttgtgatgctctaaagaccaaagagttcagaacctccattaacaaaacaaatagcatgggtgatagtggatcgccttgtcagagaccatgttaatgaatctctcccagttcactgttcaccaagacataggaggagaaaaggtgggcaggaaagcacataacaccattgcatcatcaatgaccaaaatgtcttttgtatgtttaacttaactaggatatagggatccttttgtctatataagattcttgttatctgttggaataggaagaaatgatcatggatgcatcttccctgagtaaaagcactttgattagttgataccatggaactactttgttgcaagtttgaataaaaacactttgaatagccaagagttttgtaatcaatttttggaaacattgtgtgccaaatttattgatctgaagtctttcacttgaatagtatcaactttgtttttttaatcaaagtaatagaagtagtgtttggcagtccaagctttgtcatctgacctagcagctgccttcgtctaatcttgcttaatgatcaataaacaagacctatatcaaatggcccataaagaatacaggacatagctttgcgattgtgtgcttcaaagaggctaagccaaaacaaagcattagcgcttttgtgtaaccaatcctccattatatattgagctgaatatcaactgcttactcttgataggatccaaccgactcaatcggtgcttcagttcacaagaaagttcttttggaggagaataatggccatgatatctcgattgggtgtgccgttgtttttagtaaggtgagtacataagttgtgacttattttgttgtcaaactagtctactgtggtggctggtggtaagtgattggttcaactgttgaatatgctgttttcaagtccaggtagctattttccgcccgtctcataccaagttgtgctacctcaatgttaccaaaggaaaagtggtcaaggtattattcatagtttcatactgatttagattgctactaattactgtaatctgttctgatatacatgatgatgctttcccagtttaattgttgttgaaatcaaaattgttgaatataatttactactttagtaaaaagaaataaatcaaagtaaactactctggtatttgtacaaaaaatattcttgttctgcttagccatttttggagtctgattatacagtgtcaactgcaacgtttttgcattgaatctgcattaatgaggtacaaactattatctgaaggcaacatatcaagtgcaatcacattgtcaggtacaattttgcagtcaactattggtttgggattgattcaatgtatcacgtataaaatcctgaaattttaatgattcagtgattctatgataacactgaaaaaatatggaacttggtatctc

SEQ ID NO: 4074 - DNA, 3541 bp, Sorghum bicolor
tgtcgcccattggatttgccataggggcatgcatgcaccctggatccgctgtgggaggaggcccgtgagcgtagctgaccctagatccgcttgagacttggaaccgttgggagacgactgggtgaaaggagccctagatctgccaggagggggctgcaagcatcaccaggggaggtgcttgagcgcagtggaaggcccaaccatcgtcgcccccaacacaccattgggagacgccctagatccgccacccttgcatccactccatgagctctggatccactggaaagtggccaccgagagaggcccatgagcacaatcgccactcccacgcacgtcaccgtgagacggcccgcactcgccacccccgtgcaccatctgaagtgttggatcaaagccacaatgccatggtggaggaagaaagggagggagcaccaggagaaagggagggagggagcactgaagagagccacacggagcctatctacaccgtgtgcgcacgctgtggtgtctctatggcgactaagatgggggagaagcggagagaaagagagagagagagagagagagagagagagagagagagagagagagagagagagagagagagagagagaggtgaagaagtggggagggagggttgccttttatagttagggtttagagtgggctactgatggacctcggatctaggccaggactttcgaaggcaggccttagagtgcgcacacctccaagatggatttaaggaggtcactttaagacgactccataaaactaaggtcggcacttctcaaccatgtcgataaataaaatgactgtctttgtaaataattttaatgaggcggtcattttttttgcctcggtaaataaaatgattgccttgattaatgattggtattttccgagtcagatgtactttgtgcccactttagttaatgtttggacatcgcctataaaatcatttttgtagtaatggaaattagggatctatgggtgctcggcgatctaggatggtggcgaggtgcagccatccattaggaagagaaggatggagcatcaaggtagaggcctggggagcgatcgtgtgtgccgtgggagggcacgcggtgagacaaatgtggcagggagcttgagtatatagcatagaaaaaatagcctatttttgccgctatagcctgacatagcttgaaaaaaaatgtgccgctatttgcgttcatgcacaattttaccgctattttgccgctaaagtacgccaattatggtttataaaacgctaaacaccttggccttagctcgctatttaaaacatgtgtatatagttaaaaaatgatgacatgaacaagttaggtcagaatgattttagcgtcaagccatggcggtggagggtgatgatggatcaggtggtggggtgagcagacataggagccacaattaatcaagctagtgcatattttgataaagaaggaaggataatacaaggtgtagattcagtgatttaatctgagccgttgattttggatgtatataaccggataaataaagaaaatcatgtgttgattagccactatgcaacttttttttttatttgcagacatatggaagttcaaacaaaatcgtgatctttcgccaatctctggaagtgcaagccgcaaatctttcttaaaaaaaaaaaaacaaatctagtgcgctccatagtgagaatccgggctttcctgccctccgccgaccgagcgcccgactcgtctcggactctcggagtcgatcggaggcgtctgcgactgcgcgtcgtcggcgcgcgtggcgtacgcggaacgccggcgtctcccgtcttcgactccgagtaggacttggcaaccgatgcatatatgtaaaccctacacgccttggtcgaattcattctatattgccccgctccctccttcgatccatcgccaccgcgcccgccgtgcaactccgagccgacgacgtcgacgatgtcccgtgcaactcgaattccaaccatgtcgacggcgacggctgcggcgttgtacgcgcagccaacagacgtgactctcgtgaaggacttcctgcggccgtgggtgacatcgggcgacaccaaggcgggcggcgccggcgccggcgccgccgcgtacgtgcacgcggctgatctctactccgcggaccccgaagagttggcgcgcgcgttccagcctgccgtctctcgggacggcgacgccgtctggtacttccttagtccgctgcgcaccaagagcccccgtgatcggcgcaaggtgcgcgccgtcgccgatggcacggggtgctggcatagcgaggccgggcctaagaacgtcattgaccacctcgacggcggacgtcacgtcggctaccgccagagcttttcgttcatgcggaggcgcgaaactggtcctgacgttcgagctggctgggtaatggcggagttccaccttcaccacgaaaacttggggaggaaggttgagggcctcgtgctgtgtaagatgtaccgcagcccgcgtatccatggtcctgcggtggtgcctgacagtgacgacatcgtgcactccgacgtgtcactgtacgcggaaacaatgttttgttgtgggaagagcaaggcggtcgacgatgacgacgactcctacagtgtgccgccaagatggcaacgacgacatgccatgaactcggaccgcacggccacggccacagcaatgacagcgtctcttctcaagaagaaggtggacggcgatgacgcggtctccggcacgaccatggctgcggtgccgtgccccaataacaaggtggtggtggcggatgacgaggacttgttggtgttaccgcccgcacgaaagaagatgaaggtggcggtggcggatgccgatagctccggcacagcgttggcgctcaaggcgaccgccgctggcgccccgtctatggcggcccagctgcactgcccccagtgtgggttccacctcgccgctctgcaggcgctcgtgacccttaccaaatccaagtcgatcatgccctggtcatgccctgaggagatgtaggagattcagagatcccaaagaaacaaagaagaacaccaagccgtgatatactagaacagagaacgtgcacgaggttcagttgaaaaactaggatagcatggatctgttttgcaattcatcaataaccagagataccaaatgcaaaacacaggaacttttgaactgtttcacagtcaagtttctttggttctgatgtgaaagcataaaaggttgagaagaatgttctgagttaaattacacacatttgcattcttagttcagaggtttaattagttctttctaaactacagggtttgttgtgttctcattggctagatgctctggctatcttttttttaccgtttttactctacttattagagcatctccaatattttgccaaatgacttttccatccgtaatttttttagcaaaatgaggaaaaatcctctccaacagtttggcattctaattccccatcttttttaacttggcatatctccctgtctagcgcacaaata

SEQ ID NO: 4075 - DNA, 5000 bp, Sorghum bicolor
acacccaagctagcgcattgaatcaaacttttttttttctgaatgaagattaaatcaaagtgccaaagaagaatggcgagaagcaaccataacaaaggcatgacattcacaagaaacgggatcaacaaaaatcagccaaagatggcatcaaatgccttggccttattatagtataaacaacaaactctgaagcatgaattgcttctaaatgtagcttctcaacgctcttaaattatgtaggtctagacacataaatgtttcaacaattttatgaccttcacagctatagcttcttcttatgacagtcgcccatctaatcattcaagtttgcagtggagaaatactaaatttacaatattacaaatgaagagcactaattaacactaattagaatgtacttgaaccaaactataccaacttgatgggtgactcacccccagcaacgaccttccaagttcctagatattttgctaatcctgttggataaagaggtgttgggaccgggtgccaggggcgctgggatggcagggtgttgtgccgaccgggcagagcagggaggggctatgtatggtgtgagagtgggcatgacggcagggcggtgctttggcatggcagaccgtgcacaacggcagggtagggcagcaatgcggaggagctctgggtggcgctattttcttttcttttttgttttagatggagggctgctgagcaatagaaacatggtgggggcagtagtggagtggagcaaaatgcataggagagagcgccaaatgcctcctactttttaagcaggagagaattgcactagactatgatcaatgttcattgtatgtgcactcaacaaggatttgagcctggtggtgctgcggcgtggaaaagtgggatggtggttaggtgggatggggagggccagttgacagtgataggggctgcagaggctactaccgcggcgtgaaaaaatttcggatttcgctactgtaatactttcgtttttatttgacaaatattgtcaaatcataaactaactaggatcaaaagattcatctcgcgatttacagacaaactgtgtaattagtttttgttttcgtctatatttaatgcttcatgcatgtgccgcaagattcgatgtgacggggaatcttgaaaactttttgaatttcaggatgaactaaacaaggccttacatggagggctggcgagtgttataataatgtcgtggggctggtagcagagggggtggggggtgggggtggtaaaatgcagagagaaggaagcgagaaacacctcctacttcataagttggagagaagagaatttctctagaccacgataacagatattgtgtatttgcagtttcaacaaggacataagtagaattttctgccaattctattttatatatatatatatatatataagtaatggttcagccttttttttattttacatctgtgattgtatcaagcaaccacctgtgattcacaccttattgttcaatagactgtgtatgctataagtccacagaacatctcaactctatactgctccttgtagaaaactctatattatgttgacattgtgtcaaacccttagagttttttttacctttaagacatgatctcaaagttgaagttcagcggttcatggggaaatgagataatatggatttttgctaaagatagcattgtcaagttttttttgttgcatgttgggttagaaatacgtcttatttcaactggtctttatttaaagttgtgttcagaaattgcagccatgattttttctcaatgacatgtttgaccttttgttcaaacatgtatgttgtttctttgtgtttctattgtttacagtcatccattaaacattcatttcgtaacagtaatacatcttctgttttgcagacaccatgtgggcacaatttttgcctgaagtgcttcaacggatggacacgtaagggaaaaagggcatgtgcaaaatgtcgtcaaccgatcccgtccaaaatggtgcaacaacctagaattaactctaaaatggatgaagtcatccgtaaggccaggatgccaaagacaactaattcaactggcttagtagattcacatcgccattatatacagaatgttgataagcccgacagggcatatacaactaaaagggccaagcgacctggaaaagcaaatgcttcaagtggcaagatttttgtgacaactgaacccgatcattttggaccgatccttcccaaacatgaccccatgagggaaattggcgtcaaagttggagaaacatgggcagatagattggaatgcagacaatggggtgctcatttccctcatatagctggaattgctgggcagagcggaaagggtgctcagtcagtcgccctatctggaggctatgaagatgacgaagatcatggggattggtttctttatactggaaggtttgataattttactacaaaccctcttctactgttttgttttgtctagtcacatatatatttcactatattaaaatgtgcataaaataacaatttatactaatccagtggcgggagggatctaagtggaaacaagagaacaaataaagagcaaggattcgatcaaacatttaggaacatgaacgaggctcttcgacaaagctgcttgtcgggtcaccctgttcgggttgtgcggtacgtatgtttattttctttgggcatgcatatgcatatgcttgaaactacaataatgttcaagtaggtgatactgcgtggtctatgatgcacgtgattatagggccatttctaggtgttatgaactgtttaatattgagatactttgctatctgttgctatctttgaacttttgtctcattattacattctcttgataggtcgcataaagtgaaacactctttgtacgctcctaaattgggcgtgaggtatgatggaatttacagaattgagaaatgttggaggaagattggtattcaggtaacttgattctcacgtgtaatgtggatccatgctttcgtaaggctgtatgcattgaatggttctaatggacataacagtgtcactttttgaaaagaaaagaaactccatgtttctggtaccttccagctgcttattaccagctaacaaatgaaataggcttatgaaaaagttttaattgtgcttctgcctttcccataggggaagttcaaagtctgcaggtatctctttgtacgctgtgacaatgaaccagcaccttggaccaggtttgacaaaagactcaccttttttctttgactattagacttaccataacttttagagagagaaaaaactatacacagtcctggctgacacaataggctttggttgctagtgatgatcatggtgatcgtccaaggccattgcccgacattccggagttagaaaatgcaactgatatatatgagagagatgagcaaccttcatggggctacgatgtatgtgacagatcatttgttcctagctttttgcagtatgactaaactgttatttgactagtttatattcactgctacaggagagagaacgctgctggaaatggatgcgtgatgaaccgcagccaacaaggataaagaatgctggcaaacaagtccagagaagagcaaggtctaacactaaaagacttctgaaaggttatcttctcttctcttcgattcattttttttgcagcacaaattttgctagattgtgtttgtagcttgattgaattcaaagtacttcatgctgagtgttgtacaataataaattttttttgttgtcttctcctgcagaatttagttgttctatctgctgcaaagtgatgacagaaccactctctgctccctgtggtgacaacttctgcaagacttgtttgctgggggcatatgataagcagtcctccgtgagagaaagaagcggtggcggtcgtacccttagggctcagaagatcgtgaagagatgcccatcctgtagaattgacatcagtgacttcctagtggatccacaggtgcaatctattgaaagatatgtcagtcaaattaagtgtgatagatcaagcttgtagagtccctaacatatatacgcttggtgatatttatttttactttcagatcaaccgagacataatgaatgtgattgagtctctgcaactgaaactcgaagaaggtaacaccaccaaggacataccatatggtggtggtgacatggctgaggaattccatgatgatgaacaagaggaaaatgatggcggcggtatggagatggatgaggctggttgtagctttgatgtcgaagagggagacaatgctgaggatcatgaggataacccagctgatatggatgatgatgcttgtggcgaaattgtggttggaatcaaagaagaagggcagcagcctgaccagaaacgcaagggtgacactgacattggcactgatggtcctaataaaaggacgacaaccagagttggcgtgggacaacagaacagcaagggcgatgaggcaggcatgtaaaactcatggcggtcatgttgcgagcagcggtcgcaggggaatgtactcaggacagtgtgaacaatgctggtggttgctgaagatagtttgtagagagaggcggtggaggtgcagggatgctgatggcttggaaacacaaacagcatgttgttttaggctctgcgtttgtagacattgtatgcatgtcgactgagaggtttggactgttttcgttgatttgcgtactcttgttgggaactggattgcgtaaacatggtttgcgaaaaacttgttggaatacctgtactgtggtttattctatcgaagatgtttaaactattttaagttactagtagtcatgtacttgcgtgacacatgtttatggttgtgatcggtaacatcctctgtttagatatgtgctagggctgtacctaaaaaatgcaatactcttagcttacttatgacaaattgagataacacaatgaataagaactgtgaaaggaaattataattagcaattt

SEQ ID NO: 4076 - DNA, 8861 bp, Sorghum bicolor
aaatagcggtatcctctttttatgttcgatggtttggcgcgtttatcatttttaagataattgttctcatggattctcatcgttttcgatatattttccgttcaactactatcatttttttaatttaccagaatatcaatgtgtatttatttcggacaataccgtaccgattttgttctcgacaaaaaaaatatatataaaaacaaaagtaatttggcctcttatcgatcactagcaaaaatgcccgtgcgttgcaacgggagaaaaaactatcaaatctatatctatatctctctctctatatatctatacatatatatctatatatatatatatatatatatactaataataataaagagacaaaattttaagctcttttttttgtctctctccctctaactaccgaatgatggggagctttttttatctgaatttatatatataatacgtgctcatacgaattagaataacttgcgtctaaaccaatatagagtatgagtccaaatataggtgagacccacacccacttcatgtgcgtacctccacttcgtgcaagcgcggcacggtgtcgtcgagccaacagcgagcctggcagccaccgccggtggcgcgagcaaagacttcaacgagtcagacatctgggggcgttcgagcctcccgagccggcgggcgggccagtttctggccccacggaaggcgtcgccgaacgacagggccgcgcacgtgtcgccaccggtgaaaaacccggactggtccaagatcctgggcagcgagtaccgacctggctaccactatggcagaggaggcggggggtgactggtcagagctcgacgacgacgaggactccgtggagctggcggtagggcgccgccgcgccacgtcgctatcgctgaatggggtcgtcaacgggacgctcaaggtctgagacgcggtgtggaagcagaccaccaggtaaacaaaaaaataaacaaaaaaggacatataacaacactatatggagacagtaaaaaaaagatctatctagatgacattcagttgttttagcctctcttatcaactgaatttttttcatacacttaaactatcttttaactatatttacactgacttattattgtatttataatgacttttttggtgtaatttattggacatagtggtgtaatttgaggataatacaaatatataccaaatctttctttacaaattatttctatggatttcagataccatagaaatatatgtcaaaatatttacaaattatgcacaaattttagaaaaaaaatcagacatcagaggaagaggagaactgagggcagagctccatcgttggtgtgtggcagcacgaggcctctggtcaccgttggagctgggcattactcagataccatagaaatatatgtcaaaatatttacaaattatgcacaaattttagaaaaaaaatcagacatcagaggaagaggagaactgagggcagagctccatcgttggtgtgtggcagcacgaggcctctggtcaccgttggagctgggcattacatgctcatatgcaccacgtcgggcagccgcacttgcctgcgaacgtctttttttttgacaaggagaacgagttgtgccatcgtcacattcgcatccgcgtgcaagtgtacccaccctcgaggaggagcagggcgcccagtgccagactgctagctatctcgttgtccgcacatggttgtgccgcggcagagtcccgtcgacagccggtcgggcacgcgtacgtgcgtgttgtcaatcacctgggcgtcgaaccgtgtccaaatcagacggccgacaatcagctcagcgcccaatcaagcccaaaatcgaaagggcccaaaaaatcggatgacccgaaacaaccggacgatagattacgcgtacgcgtgtgtgccgcgcgacccagtcgtgcggtttgcgatttttcttgcgctaccgtgacacacacggcgacggacggacgacgaatagccgcccgccgcgccctcccacttgactcctctcctctctcccgtctgcagcgctggtgcctcccatcgatccaccaaaccgttggagatccacactttcctccctccctccctccggcaccgcccggccgcccgcccccgccatggacgtggagtacgacgtgatcgtgctgggcacggggctcaaggagtgcatcctcagcggcctcctctccgtcgaccgcctcaaggtacgtaccctacatcgatctcctcctcctctcccctttaataattctctctctccgtcgacctcgatcaccttcacggtgggagagtatatatgcatgtctattcatccaagaccgcgccatggaggcccggctagccttattctgaatttctgatgcattttcagtgcgtttattttaaaattggccgggaggatcgcacttctctgaaatgcagattctcttataaataaacacaagcgggtcaggtgacaccggcgaatcatttccggacatccactcgtcactaatttaatttaccgtgaaaagagggtcggtcaatagcaccaccaccaaactttctttctttcttattactcataaacaacagtttggccatcttattgattgatctgatatatgcacaagcacaacggtagtaaaaacatatatacatgtgactcagatgctagacgtgtgcgtgtggccgccggctatatatatttgcaggcattatcatatatctgtttaatctggacttgcacgcggcatcctgacgaacgtaatattaattttgcaattctgcatgtcattcattgttcatcaggtgttgcacatggacaggaatgactactacggtggagactccacatcgctcaatctcaatcaggtgacgattagtattgcaagcctgagatctctgtttgaacatgttttggaataataccccgcccgcccagcccccacattaggccttgtttggatataatcggattcacatcaatccacatgtattggtgtgggttgaagtggaactcgaactaaattccaccctaatccactccaacacatgtggattgaggtgaatccaacaacattcaaacaaggccttaataatttctcgagtttgtgggtgatagcgatccatgagactcgcctgtatatgtagcaaaatcctgatactaaaccatgcatatggattactttgcctatattgattatgatgatctacctgctgcttataatgatctaatcgaagtatcgaactgtccaaaacattgctaattaaactgctatttgcagctctggaaacggttcaagggtgaacaaacaccacctgcacacataggagctagcagagactacaatgtcgatatggttccaaaggtctggtctgctcttttccaaattcctacttttttttgtttttctagattagattagattccttttgaaattctattccaaatacaaattataagtcgctctagctattttaaatgcatagctttactatgtatctagacgtcataatgatttataatttggaatggagggagtcgtagtatattattggactgagatatcgaggacacagttgcaatgatggccacgtaatgcctgttgaggttgtctgtgaacctacaacttataccattgttacatgcatactttcatatatgtatttaatgaaaacatgatatacacttggatttgttttaatgtggctttgcatgatcattgtttattaatcacttaaaaccataacacaagagaagtgtcattgtaagtttattaattcaggacgtgaaaggtcaaacaataatacattgctttaggaaaatgagcagtggtcggcacctgcactctcttttctttcttaattgaatgatagggctccttcctgttttgtccaaaaacatgagcagtggcggttgggttgaatgccttaccagattgctttatgaaaccacattctgacatataataccattgccattttgactagtttatgatggcaaatggtgcattggttcgtgtgctcattcatactggcgtcaccaagtacatgtccttcaaagctgtggatggaagctatgttttcaacaagggaaaggttcaatccccttcaccatgaataagcactctatttttatcaacagatttaccgattagggcatgtgtttatctattttcttgggctccagatccacaaggttccttctaatgatatggaagctctcaaatctccactgatggggttatttgagaagcgaagagctgggaaattcttcctttatgtccaagattacaaggaagatgaccgaagtactcataagggttatgaccttactaaactaacgacaaaagaactcatatcgtgggtacccatttcacttctatacctttttaatatttttacatgattataatgtaatggagtatttgtttatactatttgtatcttgagttccatacgatcttggtcctttttgtactgtggctccatgttacatttctggtgtcctggttaccaactttctcaagtagaaataatttacatgcaaccgtgatttttggaaagtaacttcttttgtccaagtttagtttggaagcctttgctaatactattatggatcatctgttgcacaaatgaaatttcattttggagtaatcgagcaagcatgaaaagattccataattttaccaaatgcagatactaatgctacaattgttatccatcaaggctacaacatgatattccattttaagagttgggactataggcaggcaaaccaacatctatgatttatcatttagattcagaaaattgtatctgataccgatgaacatcaataattactcagatcaatcaagataggcaaaggaggccacttatatctggctatgtatatatcttttatcatcactaacgccttccttcgatcacattagtaaagactaaagaggcattagttaaggcggctcaattactggctatgtaactatgaataattctttatttaggagcattcttgttttctatccctatgtttcaagtaaattttctgttctagtgctcaattaggattccatttactgaatctcttatgttctattttttttcagaaaatatggtttggatgataacacgatagacttcattggacatgcagtggctcttcatagagatgatagctatttgacagaacctgcaattgacactgtaaagcggatgaaggcaagtctttataatgatataacaaaaatttcccttcacaattaaggattcttgttgaaatttttatattgaaagaaagagcttcaaatgcagtttttttcttaattaatagctgctcctctagtagtgggctgtgccagctcaccgagtcgagctgttgtttggtcttctaataatatatgcagaatggtcttgccgccctttcagataaaaaaagaaatactcaaatagctttgaccagaatttctaggaccttttctttcaagtgatcttgattgattgtggcctgatcaaaaaatactatcttgaaccttatactcaacttagctaaaagtttgaccagaaaattgtgaagaaagtcatattgttgtgaagaaaattactactattatagttatcagttatggcaggtagacctgccagtatgtgacatgggaggagttacgaggtaccaaataggtacttgaaagaattgaataaaacagagttatcctttgataggcacacacagacattgcagtcgaagtgcctaaaccattatattatatcggcagctgccaactggacccttttattgttactaataataataactttgcgagtgttcggctgcactgactgctgctgatgctgtttatagttgcaggctttggctacagtgatttcattgtagcaaaagcaactgagcggagcctttaaaacttttgtgcccttttattgattgctttaatttgctcatttcactctagcctaccccaactctttgtactaaaagaccttgttgctgttttattgttaatgttacttacatgtatgtggagttaagttatcccttcacttccattttgtgtcattacttacctaacaccattttagaatattttcagctttatgcagaatcagtggctcgctttcaaggaggatcaccatatatttatcccttgtatggtttaggagagctgccacaggtcaatacttagaactttgttcaactgcttctagcatttatagatatcataagtagatgatttataatttctcctatttgacacagggttttgcaagacttagtgctgtctatggtgggacctatatgttgagtaagccagagtgcaaggtacaaacaattaatttgggttatagtcagtaattttccttattgtttcttcacttcttcagtgactttggcacagcatttactaagtgaaagaagacccaatgctttcatgtttggtataaggatagtatattgaaactaaaaaaattacaaatgtttcttgcatcattggaaaaaagtgtattattttcttgaatacaaatgtgtatattttctgacctgatatgttgatgaaatggaacctttagaagaaaccatccatttcacaaaatgttttgatactaacactataaattatgaaagtttccatgaacaatttcttttggtagtctagcttaacttttctgcctagttgcttcatgggtgtgatgccacctggtaacaagttgttcgtagagatagccaacgtaacatggtcttaggtaggttgtataagtatttatgaggaagttatttgatataacacttatgttctacgatgtccctgtgttaagcaacattcacatgagagaatagaaatttagctgcaggaagccaggaactaatataatttaagcaaagtgccaagattggttttctgtaccacaccattctctgtgttttagtgtttttatggtttgcaatctgacataagccactacattcaggtagaatttgatagtgaaggcaaagtttgtggtgttacatcagagggggagactgcaaaatgcaaaaaggttgtctgtgatccttcctacctacctaacaaggtaaatcccttccattttcgcattataaatggtaatattttatgtatatatttttcacgtcctcgacttaagtttcattattccattactatcttcgaaactcaatacaagcaaatcaaatccttttgacgtatgatgtatgagcaaaagaaattcatttagtccttccctttaaagagtgtttatgagaaaacaccattaaacttataaaatgtgttagaaacaaatgcagttactgagtattttacatgatgctaatggtaaacaattaccaggttaaaaaagttggaaaagtttttcgggcaattgctatcatgagccatcccatcccaaatactgctgaatctcactcagtacagatcatattaccacagaagcaacttggtcgcagatcagacatgcaagtatttcttatatcatgtcccaaatttatccattatttggttgtgtttcaccttctttggttctaatgtgcgaagcaatgttcatgtgtgcataccaggtatgttttctgttgctcctattctcataatgtcgcatcaaaaggcaaatacatcgcattcgtgtcagcacaagcagagactgataatccagagaaggagctaaagcctgggatcgatcttcttgggacagtagatgagttatttatcgacacatatgacagatatgaacctagcaatgactcatcagcagacaattgtttcatctcaacagtaagcattttctgacatgcacctttggtagaattttcaaatatccttaattccatttcaatttactactttttcagagttatgatgccacaacacactttgagtccactgttatggatgtactttccctttacacaaagatcaccggaaaggtacatatatatacttgtattggctaattgtttcttgagaactttttggcatttaacctctaggacaaaacaacttcctaaaccagcctatgtctattttaattacactaaattaatgttatttgactgatcctatttctctggttgcctgctatatattcctcatgctttttttttttgcagactgttgatctcagcgtggatctaagcgctgcaagtgctgctgatgatgatctctgatactttggtgctatgtggtgtagtgtcaaaaagatttaatgaagctttgattttgcaactcttattaggttcacctttattttttcaattgttgttattagctgagttatgatgatgattaaatattgcatgctgtaaatttgaaggtactttttttatcgaaagttgatataacacaccggtctggccatgtttagattttgaagaaagagtaaatatgccagcggtacctaagctatccaaactaacagttgcgtatctagacactaaactatttaagtaccctagtcaaaaaccgtgacatcacagtatgtgacaactcaattgcataggcagtggcactctaatgtggaaccactcatagttacatgggcatccagaaggccgccgctatttcggcgactcacgttcatcatctctagagggttacataatccttagctggtgatacatcaagatatacatctacatcaaatctccagcgacacagatggcatcattggactctggttggtttagcactaatccccttaattttctataataaataactagtggttatgtaatgatctaagaataaaatcttgtgcatgagttgtttatgattttttatgtgtttagatctaaagaaccaattaggcctcgttcgtttctggcggattggctcat

SEQ ID NO: 4077 - DNA, 3010 bp, Sorghum bicolor
gctgcgctagagctagatgctggtgccaaaatgaaggtcgaggcctactagctgctactagctgggatcagaccaataggccgaaagcaagagaaagggttccgagagaatttgttgcctttttttttttcgtgaattcagtttttcttaaatccatttaaaacacttttagaatctcttgagttttgagtcaaccactgattataataaatcaaatgcaaaggcatgcatgctcaaacacattactaactcctatgataatttttaatttgataaaaaaaatattattttccgatattttcatgagcacaaaaataacaaattaaatcattttacatctatttcgaaacgagcaaattttagggtgttataagaaaaatgccatattatataggggatacaaactcaaagccgtaagtagtaagatatagttctcaaagaactaaccaaaccgtgagagacacattcatttgcacgaacactgaggaaacagggttattaattgctttagttctacaaagtctagaaatttcataacgttcttcataagttctagaaatcactggttagcccacttctagaagttgtccttcttgtccttcctgaacaataattcatagcttacctctttgatgctgtttgtctttttccgcgaccgtgttggggttctttgctagccttatttagctcaactgttagctaatattttagaggccatttgctaaatgcccttaaaacattgatttgttgggcagtattccagcaatatttaaagggtaccaaaatagattgagaaaggtaccaaaatttcacatggagttaagattacctaatgacgttagcagaaaaaatttggaggctcaaaataaaagaaacaaaaaaaatatgccgagtgtccatgcaaaacactaggcaaaatagtaactttgcctagtgccagtataaaacattaggcaaactattaactttgcctagtgtcagcaccaaacactaggcaaaatataattttgccgagtatctaaggagacactcggcaaagccttacagcgggttgagtggcatgtgccgtcacgaaaactttatcaagtgctacacactaggcaaacagctgatttgccgagtgtcaaggtttgccgagtgtttggcactagacaaactatggagcgtatatctggtagtgtctgtttttaaacacttactcagacaaaggttttaatttctaggtgtataaaaatctggtacattccagcggttttgttgtgcacaagaaaatacatgtggaatacaattacaggcacaaacacttgtgctcctcaagatggctactagagaagccaagtcctgttatatagaaggacaaaatatggcagctctgaatcttaccaaggatggtgaagtgggtgaagatcgagtgaaagagaagtttcttagcataaatcaggtgattatttgcactgttttgttctcattttgtttttggacggctgagagggggccagaagctgcttaatcttgcttcaaccacatgcaaaagcacttgatgtggttggtcaaacaaaatcctaatgtgaatcaagtatcttattcaatgtatctaagctttttgggctatacgccatggacatgcacacacagacgtctgacctgctcaggtgaagcaaaccgtatttactctaaccaagctgccccttttgcaagtgttactccacatttacggacatacaggtcctctaaccaagcttatccatatttcaaaactagttcatctgtacaagttcatggaattctccaggccaatgacttatattagacaaaatgaccaatgcaaatccatcgccatttcctttttcagctaaaccttctcgacgtttcatccagctagtatatataaattccccaggcttgtcgattgttcttaccaatgcagactaggtaaccattacacacagacaagtgcgtacagtgaaatactagattgcccaagttttgacaacaacaatatggaggcatcgaagaaattaacgtggttcgcgctcgcgttcaccgtggtggtcgccgctgccggcggtgtcgtctcggcccagaacacggcgcaggattttgtgaacctgcacaactccccgcgcgccgacgtgggcgtcgggagcgtgacctggaacaccacggtggcggcgtacgcgcagagctacgcgaaccagcgcgccggcgactgccggctggtgcactccggcggcccctacggggagaacctcttctggggctcggcgggctacgcctgggcggcgtcggacgccgtgggatcctgggtggcggagaagcagtactacgaccacgccaccaacacctgctccgcgccgtccggccagtcgtgcggccactacacgcaggtggtgtggcgcgcctccacggccatcggctgcgcccgcgtcgtctgcagcaacaacgccggcgtcttcatcgtctgcaattattacccgcccggcaacgtcattggacagagcccttactagtaccaaagcgatatatataatgtgcgtacgtacatgcaatccggtataactcacatgcgttatgcgccccgcatatatgcatttcaagattcatgtagctgtgaaatttattatatatcaataaatctcgtggacatgtgagacatattatacattgctagcatttatattatttgttcttcgccttactttttattactagaaaatagaatatccttgggtgttagcaattttctcgaagggcgaaatccaattcccaaggatagggttgtatgaaacctctaagaaaaatgcatattcttgactgctaaccaaaactaccaagctgagtctaaatttttttgagtgctagtcagaaccgtcaaagtaatcactaccggagagccggcctttgccgtgtgtccgcccgtttgccgtgagcaacacacggcaaaggtcgagtttgccgtgtgtctaatccaagcacacggcaaacgctaggcacacggtatatctgtcct

SEQ ID NO: 4078 - DNA, 3428 bp, Sorghum bicolor
  misc_feature (212)..(311): n is a, c, g, or t
tcactggtcacagtgatcccagctagccattcaagcagtgtactacatactcggcaaccacactaccaacgtagcaaatgaaggcaggtaccttcgtgatatttaccacagattgaatgtccaaatttatgacagtgagtatatggcaggccaggttgaaataacggcatcccttacaacacggcgagccagccaagcttctctggaaaggnnnnnnnnnnnnnnnnnnnnnnnnnnnnnnnnnnnnnnnnnnnnnnnnnnnnnnnnnnnnnnnnnnnnnnnnnnnnnnnnnnnnnnnnnnnnnnnnnnnntaatacgggcaaggaagcagaaaggttacaggcaggcagcagggcaggaaacccacgccagttccttccaaccgcggaaggccgcgcgctggcggggtccttggatatcccgcggcggccggcctggtttccccgcggttcctcccttgctcttctccagccggcgcggcgatcccctcttcttcctccacaattcaacctcagattattgtatctgcaccaccagtgcgacgtcaatcggtgctgaacgcctgtgggctgcgaaatcgtttggtttgatcgagcaagagaactggttccagatcaatcaagcagcttccaggtgcgttcatcgaccggcggcattgcttctttccgccattttttctgtattttcttctgaatgctaaatgttaaatgcatggcaattggcattgccatcattaaccgtcgatcgtccgtgtttttgccttgcagcatgctcaaagctagaacggcttcaaaattttgcatgagaatcgcgtgacaaaatatatatatctctatctatcttgtgacttgggttgaactctaaaagcaattttgggtgagagatcgacacctggttttgttgcaagaacagagctcaattgtctagtacgaacgagcggcggccggcctagcatttgcattggtcggcattaccatgcacgatggccgttctcacgtcagcgctgagctccatggaggtgatgctggacgcgctcatgcagcgagggataggcaagtcggaagaacccaagcccaaagaagaagaggaaccaccggcgctgcccacgcgcccgacgggacgaggcagactcccggcgctgcaaaggcccggcgccgtcggcacagctgcagctccctggatgcacccgccgtccccgccatccccgctaccgccgccaacacaggtgtgcatatatatatatatatatatatatatatatgctattctacaccataggtgtagaatactattctacaccgaactgttatactgagcagaattcaatatcattcagtattactcagtatttcgtggtcctaggtgtagtcatgaatgatactgaacattgttcagtactgctcagtattttttcagctcaatttggcttcggcagcgctattctataccctaggtgtagaatattattctacaccgcaagtcaaaactgagcagaaaaaatactgaacaacgttcagtatcatccagtcgtacactcaggaccatgaaatactgaacaatactgaaacgcgagtactgaacaatactgaattctgtccagtataacactttggtgtagaataacacttatatatatatatgtgtgtgtgctattctacaccctaggtgtagaatactattctacaccaaactattgtactgaacaaaatccagtattgtttagtacttgtgtttcagtatttttcagtatttcagggtcctatgtgtagtcattaatgatactgaatgttgttcagtactgctcagtattttttctgcttaattttgacctgaggtgtagaataatattttatgctttgtgtgtatatttgtgtttctgtgtatatatatatatatatatatatatatatatatatatataatgtaatcgattaacatacataatgcatgtggatatatatgtatgtcaggaagaggatgaggagaaatgcttggtgaatatggagctggaaagaagggcggccaaggcagaggacgaggtgaaacagaaagaggaggaggtgaggcagaaagaggagcttatctccactctgcaacgacaggttgtgcactacgaatcccggctctcggaatgcgaggtcaggatgaagtctgtggaggaggagctgcagaggcagatcacttcgttacaggtactgactgacgactgcaaaacccctgacgatgcccttcttcatcaattgcttcactgaatcttcatgctttcaaatttcaatttgtctccatgtccatgcatgtttaactaatctgtataaaattcaccgaattaattacaagaatgtgtcctggtgtgcaccaccgtgctgcatgcagatggctcagaccgctgggggaaggagagatggatcgacgaggcacggccaggaagaatcatctcgcggaagccttccgccgtcgtctcagccgtcatcggcgaggcaccagcagcgcggttccgagcctgccgccgtcgccgtcgtcgagttcgacgctgccgaggagacgacgacactggaggagccggtaaaccagcaactggccagggagatccagacggagacggaggcgtctgagcacaccgcgcgcgcggtggtcgaggtggttgggccgccgtctcctagcagcgccaagtcggtggaggagctcaagacgctgaagcggcagttcgccgcgtggaagaaggagtacgaggcgcggctgaagaaggccaaggccgagctcaagaggctcgcccaagccgagaagaagggcggcggcggcgacggacacgcgcaccagcggcggtgcgggtggtggaggttcaaagcgcccaagtgctgccgggcgcccaagtgctgtagcttcaagctgccgagccccaaatcgtgctgctgctgcttccgccgttgatgcatcacgcatatgcatggtttactgccacagttggttctttgcatgttctgggtttgacaaaaaaaaaacaatcattggaatatgggaacatagtgacaaacaagagaagtgcttactgttcgctgatttgttgtgagataaaaacactgctaaatagctggtagattcggcagatatgctcaaacgaactagcactgacgcactgtgaaactagcatatgaaaatgaagcatttgtcactgcttgagcttgaagccacccatggacttctggacctgtcgctcatgtggaaaacaggacaattatgcatgaccactctcgattcaatctgtaaattgtgcggaagaatatcacaagttgtttctctttatttgactgtgtccttctactacatcagaacatacaatcattgctagatcagaactctccgttatcatcgaaattgtttcgtggagagcataatcggcaatgaccaaggtggcctattactgccggttt

SEQ ID NO: 4079 - DNA, 35447 bp, Sorghum bicolor
ccatgggtggggacagggaagaagacctatagcttcttgggtgccatggccagggaccacgaaggaggagaaatatcgaagaaggagatatgaaggcaaggaatagcgatggaggaataggagcggcggcgacggtacaggacgttgcgctcaaagtcagagtcggaggttgtgggcaaagaacaggtgggggagagaagaaatagaagaaagtgtatgaatgacaaattgaccacgcatgatagatgagatattggggatgagattttctcattttgttggaaacgaggcctttcaaagccctcaaaagagacttgtagctctcctaataactagttttggggttaagattttctcctactgctggagacactacgtacaggagaagccacctttgccgagggctcgatcttttgtcgagagccaaaccacggggtctcggcaaagaagaccctttgccgagagcagttgacagagctcttggcaaaggtgaaccctcggtgtacatcacctttgtcgagagtagagcatggagacgctcggcaaaacatgagctcttgtctaacatgttctgcatcttcttgtttctgcagagttagtcaacgacgtcgaactcccctcaccttctccccggcaactccctaggatcgcacgcaaggccttcttcttagcccagactgtcattgtgagcagtttggcgcctctgttgtcgcttgtttatgttggtgatgcacatggacacttgtttatgttggcatatgtgaattatgtgatgtggatgtggttatagtgatgtggatgtggttatgatgatgtggttaatatgttagcattgctatatatctgtttattttgtgactggaaattgaaaaacaaaaaaagaataaaattctatgtggctttgtcgagggctatggtcatgctctcggcaaagctaggaattctggaacacgcagaacaccagctttgccgagagctgtagaggagctctcgacaaagcatatttttttaaaaaaaaataaaaattctttgccgagaactctaaagctccggcaagaatttttgatgatgtcacggcgatgcactttgttgagagctctatggccttcggcaactcctttgtcgagcgccagacagtgagcgcaccaccgttacaggcgggacaaggaagcgcatcataaatatgtactggtagagagggtcaagcggaaggaagcccatgacgactctgacgggagcaggatcaagtagcgcatagatgattgccgcaaccacttactgccatgcgcaccttcatcttgtgcatgcctgcatcttaatgtcttagaatgtactcacttagttccaaattataagttatcttaacttctgaagagttcatacttaaatagattcaaattataattgactttccttagctatcgtaaaagtctgatttatcttcttcgcgactgacgtaacattacgccaactaaaacccttttcaaaactcctcgagttggtaaattgaatggtttcaattgagggagtctaaaaagctggttttgtagttgaaggtggcaaatcggacttacatacacaatagtcgaggagggaggtggtgagtcaagatcttttagttaaattcattcattcgtgaatctcgtgatgtgtcgactcagttctttagagacgctcatagagatagaatttgcatacatatatctacagatgtgagtgtgcgtgcgttgtgagtttctgcgatatactatgtaatttttttaaaaaattcattcttctacacaagacccgtagcgcaagaaggtagggaagaattacacgggctgagcccaactagctcaccgaagcgctcaaatcgattccagcccaacgattgcgcgtagcgggcctatgtcacgagcaagctcgaggccgtgttcgtggccagcccaactggtatgatactaacaacatcccgttccttcctcttcttgattctgaagtttcgaacgccttatcccgttcgtcccttgtgtacatctcactcacaccgccgcgtccgttcacctggcttcacccctctgccacgactgggtgtggcggtgggctaccgccgccgccgcccaacgccaagtgacgaggccttcgtcggtctattcgccggcgatgagcacccaccaggtatcccgatcccttctcttcccttcctgctgtgggaagcgaaaccgagcaccaaaccttagagctatttgctatttgatgcctattaacttccaacttttggcaaaattatcgactgtagatgtgtacacccatgtcacttcactgggtacgctcctgaatggaggggcagaaattttgttgcagctcttgattacagtattttgcatacaatttgaaatgaaaacagtgactaatatctttgggctttttgatttttgggactagtattttattcagaggatacgttcatcatggaagagaatttgactatgttgtagggatggttgctacaatctgggcatagcgttgttgatatcagtggttcaaagatggttctccatataacccacagggcgttcagttttcgatgctttgctgccaatgggcgtggctttggtgcagattctactaataagagaaaagtaggtagcctcaatgctatatttccctccctgcttcctcccttctgcagcgtactacatgtttctcaagcactagtgttagcaaagaaggaaatgaattcatcttcaaaagatactacatattcctaactatggtaaattctgcgatgaagttgtgcatcttgttcagtgattaggaaagccagtttgcactatgtctgaagaaattggaatcactgatggccaattatgtctttgcttttctcccagattaaaagcaagaagaggccaaaagatgttgcgctggagccgaggtactcaccttgagcattgtattgttataggttttatcctcttcgcactagaaacaaagtataatcttttcaggaatttttatgattggcatgttgttttctttttttttaaatggtctcttatattttttataacagttatagttgatttcaaaatacaaacttgtcacggaagctacccagatcctagaatcacatcctaacagtaaactttgatgcaaaatccaaccttgtttgtcattacttggtgatccagtgtaagaacatttgaatagagctgctcctgctgaattgttttctcctttttttggttattaattactacatggattcaaattgggaaaaaagagaaggaattatactaaagggaaatttagctatgcagtcccaacattttgatgactatgtttctaaacatttatgtttactataaaagttgattattagtactaaaatcaatgtatataaactctgtgcatactattagggagaaaagaatagttgacttgtttttacattggtaactccaatgtgaaagtgagtaactcagaaacattaagggcaaactagccttttagagcaattgtttcataggatgtgcacaaacagcatagaattgtttcaagatagaagaaaatatgtgattatatgtgctataatatgaattaggggtaatattttgtgtttgttataaatagatataagacaaaattttaattgtagggctacccccaatatttggtagtgacttgttttcagattagtgattgagatttatataaatttagtttgacatctcaatttgtttctcccatttatagtcatctcataccatgatactagtcgaatttactggcagtccttttggtggtgtttgtccagtgatgatcttcataacatcatcatcctggacttcggattttcagagtgacaccctttaatttaattcctgatattaaatgattgcattcccttctgttcgttttgttaatccaataattatttaactaaactctctggattgagaaaataatccgaaaatgctaagtccaataacccataggtaagtagatcaaagaagccatatgtagaagagcgttgcagatggtaatgctggcttctctgtttgttcttgttagcaatataagttcctcccatttcctcattctctctgcacgcaatcttttttggcccgtgttctaaaccttaaactctatttcttcttaatgaaaagatacacagatgtcctgcatgttcttgaaaggaaagtaagcaataaatgagacgggtaaaatcagttgataatgtgattcataagtgaatcctgcatctaaatctgaattttgtaagttgttcatttgtttaatgtgattcataatggtgttacttatttccttttttatggctagaatctgttgctcaaagcttccaactaaggattttagcagcttttgatcaaatctgtttgttcaaagcgtcgaaccaagggtgtgacctgctgtaaatagctcatacttattttaggactttaaagtagtactacgttgtttcatacatatctttgtttctttagtcatcagttttatttttcttttgatgtagtgaggtaatatctggaaatccaaagaacagggagcaatgtaagtcagcttcaatgtttagttaactgcaattactgttacacctatctcttgcaaaaaaaaaaaaaaaaaaaccgttgcactcctgcatattctgtgtgcattatcctcgtgttgactaaagtattttgtgttccctgaaattgcaaaatacttgatcaatggcaaaaattcatttagactctagcctatccatgaaaaacttatctgtctgatttagaaatagtacagttgttgattgactcacttaaatggttgccctactattttatgtttttttgttcattgtgttaacctgtaagtcaaaccgctgagatgtaaaaaccaattatctggattgataacccattcttttgtttgtcttacatgaatagtgactagaatcgttgctactgttctgatatagttgtatctcattgacttaggtttggtattcttgaagttccgcttttagctttgatatttggtatatatgtcattattttgttaccttgcctatttttctcttctctttacgtaaaaatcaaccttaattttaccagctgcatatgtcaatacttgttcattcattgttttcaggggtgccagaattaagaagtggaagtgaaaacaaatctggtaaacaagtcatggataagaaatttttggaaaaagtggaagcagttcgaaggtactatggtttccacaattatcctgctacatttagttaaaaataagttctatttttgtaggattaaatttacagatattgttcttgctgttgttggatatataagtagaaatttgctgattcttgacaatttatagatggtacatacaatgctttgttaatgtaagtggaaatgtttctgcctattgaccatttataaatgggactcagaatgcatggctaatttgttacaaaatatgaaatacttgtatgaggcatttggctgagcattccattttagccagacttggcatgctgtgtttttgaatttctgacctttgttttgtcaaggactagcctacacctgatccagttctgcatagacatccatatggccaatgtcactttgtatctttgagattattgttagaatttcttcagctttgctgacttattcagaaacattccttacatgaaggcatgtctcaatcagtgcaatctggataatatttcataatttgcaccattattgctaactcttgataatagatacactcttatttggctctgaaaaatatattatttggcatattccttgtgaatacttctacttaagcatttcttgttgctctcaactcggacgcttctgttctgtttaggtctgctcttgagaaaaagaaagctgaagagaacaaagattatcaagctattgattatgatgctccaattgagtcagataaaagtacaattggctttggtactaaggtcagttttactttatggactttcccatgatttgcatggtaaattagtaattaatcttcaggtcatgcttatcagattctctcagtaggttggaattggcgttgctgttgttgtctttggactagtcttcgcttttggggatttccttccttacggaaggtgaatctacatctaccacacaatgggccaccaatagtccatttttcattacattctatcagtgtttgcattctgtattatttatttttataaatgtttttcacttgctaagatagtgcaatgcattatataactgttgcaaccaagaagttttctgcccttgtcaaatgtcctggtagcatgcagaatctatatctatctatatctcttataaagataaaccccactagcaatttatcttgccgtgcaaagtgtccacatcagcatccactagaacatcccactagcacattcaactatctcgccatacaaagtgcccacatcagcatccactaacacatccgaccaacagatgccattatgtctttattcaagctattcacattagcaaaccacatcatttactaacatatatttagtcgtccacatcagaatgctaaaaatcatccactaacatgtattatgatatttatttaatcatattagtaaatataagtagtacaatttcattagcaattcacgcagcaacgtgcgggacattcttctagtaatgaaagagtaggaaacacatgaatatatttttttttcaaaattgtaattggtgtcaaatcttctaatttgaaaattggaatcatttataaaaaattccaggcttagttagaatgttttatgttctctgttcaaactacacttttcttgaaagaaaagggcaggggctctgccattccatttggaagggaagcaaagagagctgtgtgctgcgtcgcagggagcaccacagccacccgcaggatgccctcaacagagcactggaacataaaaaatacagagttgtaggcacacaaaaacagccccacaaggaaataaaaaaacaccaaaatagtgggaactcaagtgggaaataaagcttcttatttagttctttagggaatcagactatatattttttttcaataaaaacatcaaaactggaaaactcgcatgaggactgaaaaggggaagagcattctctcctacggcaaccatcagatgactgtagaaatagaatagatacacttatgaatatttttcttgtgcttgttgtgaccacattgtacatcctacactttttcagtgttagccctagcaaagaaagtgcagtagttaaacaaaagctttctcaagaggaagaagaaaaatttaaggtaaccatttcttccaattttgtatgttttgtttgtttacttgcatgtgaaaaaataaatgaattaattaaaagataatatccattgatagataatatttcaatgacaatggaatatacatttttctatcagctattcacctgcactgtaaaattattcaggcaagaatttgcagcgaagaaaatatttaaactctaactggcatatagcagagtatcaaagaataatagcttggctctagggttattatttaaaagtcagcatggccacaccgtaattactcaggtattgcacaagttctgaatgtgtaatactgctgtgttgtacttctaatggtatgattgttttagaattgaagggccaaagaattgtattcatttgcattcatttttgctaatttgttatcatactaagatattatcagttcatttttattagaatgcactgcaaggctttcaagcaacactgagtaagtcgcctaatgatcctaccgctcttgaggtgaagtgctattccacatatcaaattcgtattgaagtttcttatgtgctggtgcatgtttcacaaaagtttttttaactgtgtctatggatgctcaattttagatttgtggtgtaaatggggaaaaagtgtttggaagattgtttgtggtataccttggaacagccttttgatctaaaccttttgtttggaagtttttttttcgtcgtacatgcaggacagctgcatacctttaatattaagaagagaaaaagagagagagggagggggaggggggtaaagaaacccttacaaacacctacaccgcacaagattggaagtctctctattttctaatcttgcctgaaaatgaaggtttttttatagtatccttcaagtatatttgtagcctctaattgacacacagtttatagccctcagaatgtgaaccgagcacaattcctctgttattcaatcgtgttcagggtggattctcttttcaaagaactgttaatttggagtcagtggaagacaccaggttaaagtacagcatgaccacaagtagcagctgggaattcggatccaggagtgttcttatcaatcaggactgcagatttcaccaccttcataacaagaatctacatttcacaattcacaacttcatatcaatgtccagagaaaaccttagaaaacagcctctacctccataatttttgacataaacataagcaatatgggtgtgtgattggttggttgtattcgttccatccagggccatcggatgcaagcaccgcatgattggtttggtgcaccagcatcaggctgaccccgtgcaaaaggaggtgctgggcctggctctccccatgcgagatttttcttcgttcccatggagcctggccggggtggtgccagcgcacgcgggaggctgaaatcactctcgcgcttgtgcatcctgggaaccaaacaacagccttgctggaccaagctgacagaacacaagaaaccaaacagaccctcctcccatgcacccaacatggctgctaggggcctggctggctcatgcatcctggttgcattcggaagacaacccgtcgcccccctatatccatggaaaaaataacgctgatgcttttgaaggggcaaggctgaggggaatgccaagagcactgtgaggaaaagcattgggatgaacagttgaaaatcacttgttgctcggaaacagtttatatagttccaacctttcagagaccataattggtactctgctaagggcctagttcccaatgtcaaaagtaggtttcagaccatctaacatctagatgcgggtttcccaataagatcaacgttggcgcataggtggcttgggtggtatttagatcactgttatacacgtttgtttctctggtcgcggtcggtattagtatgtaggaaatgaaattttttggaagacagcatacatttgaatagattttgatcacatccatttagatactccaatttttgtgaaatgctttttatttaatttctactctttttgtttcatactatgcatattcagttttcatatcgccacacagggtgcagcagtatcgctggttgaactaggtgagtatgagaaggcatcaacgttccttgagaagctaattaaggtgtgctaattgttcgctccttgttatcatttagatggtctatcaattgtatggaattattatcctgtacaaatacatattctacttgatgcaggtaatccctgataaagcagaagcataccgtttgcttggtgaagtaaaatttgagctcaaggattacgaagggagttcatcgtcatacagaagcgctttatctgtaagtaaatctgtatgcgcttctacgttttccgctttatgttgtgtagcaactgcactacttcctgttcaacaacactttgagttattctcagactaacaattgaaacagtcatcagataatattgattttgaagttctccgtgggctgacaaattcattacttgctgctaagaagccagatcaggtgtgtaaggctctattcaacatcgtaatagcattttcattttcggcttctgggatagtaattagtgttactaaccttgggtattattcaagctggtaattaatcattagttctgatgacaatatacatagattccatcactctattggaaatgtggtgtgggcctataatgtatactgtccttgatacagtcataattgtagattgattaatgctattaacaaactttggttagccacgacttggcttttgtagcattaataccatctgccttatctatggggggatcatctgatcatcagctatgtgggaagctagcctaaaacccctgaaagtcgtatttatggaaactatccgctcctgataattctgaccgtcaagtgattgcattgggcttgtgacatattgaagagaaacagggagagataacagcaaataccagtaactggagagcaccagcgaccttccagcaatgaccttgtgcctccagcagcactgaccttcactcctccattctccttcaccattcaccaagcatgaacagaagcaggatgaagggctgcaagggtatgtcatggtacatgacggccatgcgagccaattccatggacagagatgattccattatgggtggataagtgtctgaggttgaacttagctgcatggtgggatacagcagaagttgaagacaatcctggggcgtgacaacagactgggcaataggtggataggcgggaggagccaatctgatgaggtgttagtggtgctcggagtcacgtactatgataacgcactacgtgaggataaagccattgcacccgctgcaaatgcatctgctgatgcactaagaacttacaacacagcttgagaagtgggaaaagggcaacataattgccagcatgattattaaggaatcgatctctcttggcataagggagcaatttccgagtgtggagctgattgctacagaggtcttcagagctcatcaaagacttatgccagcaccctaatcatgaagatgtgcgcctcatgctatgatgggcaaggtagaattagggctcacattatgagcatgcgtgacatggatgctatgcttaaggcacttgatatgtccatttgagagtgctttcttgtgcacttcattatgacttcattgccacctcactacaccccttttacgataagctacaacactcaaaagggaaagtggtgcatttttgaactcataagctactgtgtagaagaggaacaaaggtagaaatctaagaagaaagacatggcttaccttgttagtcttggcaagggaaagcatcaagctgacagcaagttcataacaacttagtttgcagtttttgtagcttgcctaagtagaagcaatgccttggttttaagcaaagttcagctaggcgctaggcgctctctaggcgatgacccctagcctagcgcctaggctagcctaggccagcctaggcgttcctaggcgttttgctagacgttttgccaatttactaaataatatatatacatatatatattatatacagcagaaaatgctgaataaataagaagcatatactagctgaatctatataaaatagagggtagtagacataccttagtggcttaggctcaataatcaatagacatgttgttcttagtcctacagcaaggattgacagcttgcaaaactcaatacttcaatacacagcaagtagttcatcaaataaatagaaaatagcaagttgatacttatctgtttaccagtcatctcccatccattcaatgaacacagcatagcagatcagcaacagctagtaatcagagacaagtggacaggacagcagtacaagtgcacaacacaattcataaaaggtcttgttcagacaacacatagttctcagaaaagaagaaaaacagtcacaggtgcaggtgcagaatttgcatcaccttgttacagaatttgcacttcaccttgtccttgttcttaggatcaacaagaaccccgtattcccatcccacatcatctgaattccttttcaagagatttactccttcattctcaggtgcaggtgcagcagctgcagtatctgtttctgttgttgacatcctaaactcaaggctcaagggttcagtgagcaactaacaagtcattgacaagaaacctaaactcaagtagctgcagctaagctatactgctaactgctatacactagcttcagatttagtcatttaaagttcacataatccattcagattcagtcaaacacaaggacaagctatacactgccttaaccagaaagtatcaattcaggcaatgacaatagcacatcactcaatagcaaagcaatgcattcagaatcagtcaaaatccatccacatacaaaagcaggggaggggatcagaagcagccaatgggggggaggggattcaccttgccacctggggctgccgctaagggaggagtcgaggagatgaagaagtcgtcgggggaggggagcaggactgcaggagcaagcagacgtcgggggaggggtgcgcctgctggaggacgacgtcgggggaggggtgcgcccgctggtggacgacgccggcgggagggatgcttccaggcgggcacgagcacggccggcggcgaggacgagcttctaggtagggtcgcaggcgcagcagggaggtgagcagccgtccgagcccgtggcttcctttttgcccgcgcgcggcttcctttcccgcgctcgaagaaaacagcgcgcgcgcgcgcgaccgcgggagcggaatttttcgcgcgaccggctgctgcgtccgcctccgcgccgaatcgccgcctccgcgccgcctggaatcgcctaggcgccaccgtcgcctagagctccgcctaccccctaatctaggcggacaggcctcgactagcgcctagtcgcgcctaggcgcgcctaaggcgacgcctagcggaactttggttttaaggagtgacttaagaagggtaatgatcttgtctcatttgttgatgaatctttcttagctaattattcttttaatacttggtgcattgactacaagtattcaattcgatgagaactatataagaagggggagcgaagtcttagagtcgctgatgaacatgaagttgaagtcaaaggcattgggaacttctcattagaattagcaagactaggaacaagctgaagactgaagccactagctaattctaatgagaagctctcaaggcctttggcttcaacatcatgtccattagcaactcttaagacttcgctccccccttcttatagttctcatcaaattgaatatctgtaataaattggaaatatgcacattagcacctgagtcaatccaccaagtattaggggaataattagctaagaaatattcatcaacaaatgagacaaaatcattacccttcttcttaagccactccataaaaccaaggcattgcttctgcaagtgcttagatgagctgcaaaccatagttcctgctaatgttcttgccaaattattattattcttagttggcttgaacttctttttaggctgcttgcttccactagactcagcttgatgctttcccttgccaagactaacaaggtgagccatgtctttcttctcagatttctacctttgtttctcttctacacggtagcttatgagttcagaaatgctccacttcttgttttgggtgttgtagcttatcttaaaaggggtgtagtgagctggtagtgaagtcataatgaggtgcacaagaaagctctttgaaatggacatatcaagtgcaaagtttagcaaccatgtcgcacatgctcataatgtgctccctaattgcatcttgcccatcatagtgtgaggcatacatgagaaaggtgttggcataagtgttaaatgagctcttgaaattttcctcaacagacgcaatgaactctccttagcagtaaactccacaacatcttgattctttttcgcaaatgctccccttatgcaggagagatcgatcccttaatgatcatgctgacaattctgttgcttagtgttgtaagttcttagtgcatcaacatatgcatttgcagcgtgtgcaacaggcttatccttatgtagtatgtgattgtagtccgttacttcgagcaccactaacacctctttccatgtaggatagtttgtgccattgagggggttgatgatgctaacaaggcccgctagacggtaggccacgcgccattgggggcctgtccggtagcgccctcgggaatagtagagccaatgcctccgccattgccaccggagccttaggtgcatggctgccacgcttgccacgttactggtaggagccatcgctgaacccaccaccggaattgcccccaaaggtcacctattgagggcgttggggcggctggggccgatgagtggctggcggagtgtttgatggcgggtggggtctggcggcttggtggcgcttgtcctagcaagggtcgtggcgggttaggccttgtccatggtaagctgctccaagcgtagatcgtcgtgaatgggttgctacggtggaggtggtggctcatggcggtgaagcgcttgttgaggacgacggtgtggtcggtgatgtgttcgccgagatcgcaaagatcgttagccatccgcttgtagcggtgacaatacttggtgacggaagtcaaacataggagcatgctatgtcctcgggagttaggctcccgattgacagataccccggacgatcctcctaggatcgctcaggagctatacccatcaggtatgctcacgcataccctctggtcgaagactaggtggggctcgagctcacccaccgctttgctcagagctcagaggctcagcgaagcctcgaggttcaagtcgacgaaggcccgagcttggcccctgcccgagccagcagtcaggccaacaaccagcaccctaagcatcaaccagcccgctgagcatccaaggtcgagggctccatggcgttgccctgaccaatgagtgcatggcgccgtcgcccactcctccgacaaagccatgcaggcggcatgacacaagaggacaagcccctctatcagctctaggggcgcggaggctcatggacccacccattagcctcccgagccgggtgcctccaccaccaaggaagcctcgagaaggctcacccggtggaggccggtccaaggagacagccatggcggtcagatgccacaacatcgtagacgtcaaccggggcctacagcttccctgactccacgacaagccaaggtccatccatgctgctgcagcaccctcctggaccctggtgcacgaaggttatagactatagcttccatatctccttgtgccgaccttcctcggaatataaggggaaggtcggccctcgtagatggggaatccttccttccactttcattcgctaggacgctgtgtaattgagagctcaaccaagaatagagcaaccgagaggagcagccgagtgttcctccccccagcaacccagcaagagcgaggagcatttcctttacttgctagagaacttgaggtcactagcatgcttgccatgccaccaatccctctggctattgagtttttagcatgattgtgtcaaaaccacttagagcatctcaagagctccttaaaagaattccctaatttgtttttcggcgaaaagaaaaaaagaaactgcactcaacagttttgtatatgaactctctaaagataaccacttgttaatcttcccctcaactccaaatatgtgcatgcattgcacagttattatcgacacttggtgctagtttctttcctcacatggttttctttgctgatgctgggtttcttcacctagccgctccgcaccatagccgcacctggccgtggctggctgaccctggctgtggctggccgggagttgccagccaccagctaaggagctgcagtagcctaggctgggggcctgcgacaggcttggtgcagtgtgctaggaaatccttgtggtggccctagtttagcaaccaaatatggcaactattggagaaaggcaatcaagctacctacttattttgttcacttattacaatcattggtttaacaagtgatttttacaaaactattggatacactcttagtgtaaaaactgggttcaattgggcgcacagtgcttggtcctaatatttgagggttgtaaaatgaatgttgtatgtgctctatgtgatctacacttataagatatctttctaacatgccactaatatttccaagttgccattttcttcatattttactctattaagaaaaattccattattgaatgattataattctgcaacttggattctagttttgaacttctgattactcagacaaaaaaaaaccatgccgattttgatgaattaatgcatgctcaattttttgaaggcagttgatataattctgttatgccgtcaaaagttgaatgaaaagagtcaaacaggactagtggatttggaggctgcaaatgacaatgatcgccagaagcctcaagatattgacccgatccaagtaagtaccttgtggtattatgggatctgctcttattaccattttcttttgtaaaaacacccaatctttgtgtattggaatagataactgaattcatgcatgacaacatagtttatgactctgtaatggggattttattgtaagacataatctgctgcccccttcctttcttcttgctgaccaggacagagacatggtagtggatcagatcatctcatggctggtcaagtccttggtcctgtagagtataaggcaataggccatacttgtactagtagaagtacaccagctgtatggctggtactagtgtagttgttggctgatttcagccttgtaccctaggtgtatgtagttggtagaactgtaccttagaaggtacatgtattggtgtatataaaccagcccaatgcaatggaagcagcagcaagttcattgccactcattcagttccagtttcagttcaagtctgaaactgtgtgtgtgctgtgtgcgtgtgcagtagtagctcagggcttttcttctaccttggagcaggggagagggagaggggaggagagcaggtgctgctcacctcggtgcagggttgctgtgccaacaaatggtatcagtgccgtacaagccgtagctaggtccactgaccagcaatggcggagagtgcgggccagaacggtggcggggagggtggtgagcgacagctccagccggcaccaccgcaggttgaggtgcgcgtggtgaaggagttcggtggcagcggctcctggcccatgctcacccgcaccaactacggtgagtgggcgacgcagatgaagtggaatcttcgcgcgcgcaagtggtggcgggcgatcgaggaggatgcccgcaccgaggacgcccaggtgggagtcatggaggcgctcatggcctcgacgccggcggagtaccatgaggcgctgggcgccaaggacaccgcgaagtaggcctgggagatgctggagtccctgcgcattggctcggatctcgagccaagagggtgaggattcagcagctgcgcagggagctgaacgacatcaagttcaagcccggggagtcggtggaggacttcactcttcgcctccagtccctggccacacaattggccacctacggcaagaaggtggacgacgaggacctcgtcaccaagttgctgtgcaccgtgccggcaaggtactcgcagctcgccatgtccatcgagaccatgttggacatctccacgctgtctctggaggacgtggccgggcggctgcgggaagcagagagccgcaccacaccggcgccggagaaggagaagcccaagctcctgctgaccgaggagtggtcagcacgcatgaaggagaagaggcggtccgaggaaggctctagctatggtggcggcgatcgcggcggcggtaagcagcagagcaaggggtcggcggacaagaagaaggggaagattcgtgggcgcgacacggtgctgttccggtgtaaggacggcgaacaccgcgcgctcacggacgtgtacttcatctcggagcttcgttcgagcatcatcagccttgggcagatggacgagcacggagcggaggtcctcatccgcaacggcgtgctcaggatcaaggaccaggatggccgactcctggcgaaggtacagagaacgcgtaatcgtctctatctccttgatctgaaggttgagcagccggtgtgtctggtggcggcgtgcgcggaggagccctggttgtggcacggccggctcggccacctcaacttcgacgcactggggcggctcgggaagatggtgaccggcatgccaagcatcaagcacgccagggagctatgcgatagctgcctcgccgggaagcagaggaggatggcgttccccaaggcggctaagtatcgcgcggcggaacggctcgagctggtccacggggacctttgcgggcccattacgccggcgacgcacggaggccggcgttacttcctgctgctcgtggacgacagcagcaggtacatgtggctccggttgctgtcaagcaaggacgaggcagcggacgccatcaaggccgtcacggaaagcgcagaggcggagtccgggaaaaagcttcgggtgctgcgtaccgatcgcggcggcgagttcacggcggtgcagttcgccgagtattgcgtaggcgagggagttgagcgccatctcactgcgccatactcgccacaacagaacggtgtggtggagcggcggaatcagacgattgtgggcatggcccgatcgatgatgaaggccaagagcatgccgccggagttctggggggaggcagtcaccacggccgtgttcatcctgaaccgatcaccaacgaaggcactgaagggagtgacaccgtacgaggcatggcatgggcgcaagcctaatgtctcgtacctgaagacgttcggctgcatcgggcacgtcaagaaggtgaagcctggataggctaaactcgacgacaggagcgtcaaggcggtgtttctcggctatgagtcgggaacgaaggcttaccggctctatgacccggttcggggtaaggtgctggcatccagggacgtcgtcttcgacgaagctgcagcctggagatgggaggaggccgaggccggaggaggacgaggcgacggagggatccgggactccttcaccgtggagcacctggtgatccatggccacggcgagacagcaaggcagccggtgaccagggaagtgcccgacggggcggcaagcactgagccgccagctgcggtcgaagtagaggagcctcctagcccgggcggggttgggagcatgggcgtgccaggatcgatgggggatggatcccctgcctcgcctgcgcagaggacgccgacgacggccacggttgagtatgcctcgccgccgtccaatgtctctgagttcgtggatgctttccatgaaggggaggaggtgcggttccgggggtggacaacgttgtcggggaggcagccgtgccaggactggccgaacggttgctcgacgaccgtgcccacactttgctcttgatgagcgcagaggagccgggcacgtttgcagctgcggagcgcgatggagcatggcggcgtgcgatgctcgaggagatgaagtccattgaggacaaccgcacctgggaacttgtcgatccgccggcgggatgccgaccgatcgggctcaaatgggtgtacaaggtcaagcgcgacgagcggggcgccatcgtgaagcacaaggcacggctcgtcgcccgcagattcgtgcagagggaaggggttgatttcgaggaggtcttcgcaccagtggcgcgcatggagtcggtgcggctcctgcttgcgctcgcggcggccaaggactggtaggtccaccacctcgacgtcaagtctgccttcctcaatggcgacttggcgggggtggtcttcgtcaagcaaccgccaggattcgtgcaggcggggcaggagcggaaagtgctgcggcttcggaaggcgttgtatggactgcgtcaagctccgcgcgcctggaatgccaagctcgacgccaccatgacggagcttggattcacacggtgcgccagcgagcattctctgtacacccgacgacgggggaaggagcacctcatcgtcggggtgtacgtcgatgatttgatcatcaccggcgcgcgggcgagcgacatcgctcggttcaaggaggagatggccagccagttcaagatgagtgatctcggatcgctatcttactacctcgggatcgaggtgaggcagggggcggactccatcaagcttggctagcgggcgtacgcgctcaagctactggaaagggcaggcatggtgggctgcaagccagtggctacaccaatggaggagcgcgtgaagctctccaaatagagcacagcggagaaggtggatgccaccttgtaccggagcatcgtcggtggtttgaggtggctcacgcatacccggccggacattgcgtttgccgtcggctatgtgagccgcttcatggaggatccgcgggacgatcactgggcggcagtgaagcgcttgctgcgttacgtccaggggtcagcggagatggggctcatcttccccaagcgtggcggtgatagatatgtctattaggaaagtgtatattaggcaaggctatatttagtatgattagcacctgccatgtattgcatgtaacctgccattgtattggctatatatatcaatgtcacccccccaacgttgggtgagaggtgttctcctaatctttccatcattctacatggtatcagccgcgatcaattgatccctgatccgaccttctgcttccgctcctcctcccctccacctctcccagcagccatgcctggcaacaacgacgcagccgctgctgctaccgtagccgccgccgctgctgccaaagctccaccccaggctgtcatcgtccacccctacacagccgtcaatgtgaaaactcacatcccggtgaccctagagatgaagaaccccaacttcaccaagtgggcttcgttcttccaggctctgtgcgggaaattcagcctccgtccccacatcgacgggcctcctcctgccgctgcggatccatcgtgggacatcgcagagtgcactgtccgtggctggatcctcaacaccgtcgacgactcggttctcgacctcgccatcaccgacgagaaccagactgcccgcgagttgtgggtcgccatcgagggactcttccgctccaattgtgcgccccgggcagtcttcctgctggaggaattccattccctgaagcagggtgattcgtcgatcgacgagtactgccagaggctcaagatcaagactgctgccctccgggacgtcggtcacacaatcgaggactcccagctcgtcctcagcctcctccgtggcctcaacccgtgctacaccgccactgctgacgacatcgccaactccaccgtgctgccttccttctccagggcgcgcgaaatgctctccctcaaagagctgcgcctcgccaacgacgagaagaccacggctgcatctgccatggtggccgcctctggctccacctgcaattctccagggtgccgcccctcctcctctctggccactggtgctgctcccaagagcttcgggggtggcaagaagggcaagggcggcaagaaacagggcagctggcgtggccaagcgaacggcgctggctggcagcagggcagcggcagtggacagcaatggggcaatcgccccatggggccctggttctgctacaacccatgggctttccagggcggcgttcctcctccaggcagcgggtggtagcagggcaacatcaccggcggctggccccctcacggtgaccagggcgggcgcggccagggcatcatgggcgccagtccgcaggcccacaccgtcttcgctccccctccaacagctccatccgctccagtgtgggatcagtccggcctcatcgccgccttgaaccagatggcgctccagaactccggctgggtcatggactccggcgccacctctcacatgcacaattcggatggtatactcctctcccgtcaaccctcttctattccatccatcactgttggcaatggtcatcatcttcctgtctcttgctccggcagctccacattaccaggccacgcgtctcccttttcgcttcgcaatgttttagttgtcccctctctagtgcgcaacttactttcagtcgccaattcactcgtgacaaccattgcactatcgaatttgatgcatttggtttttctgttaagggcctgcagaccagacgcgtgattcttcgctccaatagctccgacggcctctacaccgtccctgcgacgccacaggccaacctcgccatctccaccgacctatggcatcatcgtcttggtcatccaggagctgctgccctccattttcttagacaaaataattcgatttcttgtaataaatcagcccaaactctatgtcactcatgtcaacttggcaagcatgtgcggctgccatttggaaattccagttcagtttcctctttaccgtttgagcttatacattgtgatgtttggacatccccggtcgctagcatttctggtgcacagtactaccttgtcatcctcgatgacttcacccatttttgctggaccttccccctagtccacaagtccgaggtagctactcacattactcagttctgcgccttcgtccacacacagtttagccttcctgtcaaggctgttcaggctgacaatggcactgaattcgtcaacaatgccctcgccaccttctttgcctctagcggcattcacctacgtctctcctgcccttacacctcctctcaaaacggcaaggctgaacgcatcatccgttccctgaacgacatatgccgtacgctgctcatccacgctcacatgccacctaaatactgggcagaagcactagctacagccacatatctcatcaataggcgcccctgttcagccattcagcatcatgttccttatgagcaactcttccggcaacccccaaactacaccattctccgtgtcttcggttgcctctgctatcctaacctcaccgccacttccaaacacaaattgtcccctcgttccacagcaactaaacggatcatcatctcccgtcatgttgtcttcgatgagacgcaatttccgttcagtactaaccctcccagtgtgctgccaagctctctggactttcttcttacaggtcctcctgcaccggtgcctcgtactactgccacgccgccaccagctgatgctgcgcagccacaaaatagtggtcatttggaggagcttgctgaggacccgactattctacagattggcccggtccttgcccctgccccggctggtgctgctccagccggccctccacctctacgggtctacactcggcggcgtgctggcacttctgcaccagcccctgcgacagccgctgcaccaccttctccaccggctgtggagcaggcgcctgttgtccctgtacagccggcctctactccagttgtggtgccttccccgccaccaccgcctcctccgccgcctcctacatcgagccggcctgtgacgcgcttccagaccggctcgctgaagcctgttgctcgttatggcttcccaccagctgctcacgtctctgcctcctccactgcctcgcccattccccgtgactatagaggggctcttgctgaccctcagtggcgcgcggctatggctgaggagtacaaggctctcgtcgacaacaacacgtggcgcctcgtctcccggcctcccggcgccaatgtcgtcaccggcaagtggatcttcaggcacaagttccactccgacggcacgctggctcgccataaggctcgctgggttgtccgcggcttcacccagcgacacggcatcgactacgacgagacgtttagcccggtcgtcaagcctgccacgattcgggtcgtcctcagcatcgctgcttctcgtcagtggcctatccaccagctggacgtgaagaatgcatttcttcatggtcacctgcacaagaccgtctactgtcagcagccccccggcttcgttgacccggcgcgccccgacgccgtctgtcttcttcagcgctccctctacggcctcaagcaggccccgcgggcgtggcaccagcgcttcgccacgtacgttcgacagcttggcttcgtcgcttatgccaccgacacctccctctttgtctacactgagggcggcgccagtgcctacttgctgctctacgtcgacgacatcgtcctcacggcttcctcggatgctctgctccgccgcatcatcgattgccttcactctgagttcgccatgacggaccttggggagctccatcacttcctagggatctctgtcactcgctcctccgacgggctcttccttagccaaaggcagtacgcggtggatcttcttcagaaggcgggcatggccgagtgtcactcgacatcgacacctgtcgactctcgtgccaagctctctgccacggagggcgctcccgtcgccgacccagcgcgtaccggagtctcgccggctcacttcagtacttgacgctcactcgccccgacctggcgtacgctgtgcagcaggtgtgcctcttcatgcatgatccgcgcgaagctcaccttgcgctgatcaagcgcataccccggtatgtgaagggcacactgtcggctggcctccacatcggcactgggcttgtcgacaagctgattgcctactccgacgctgactgggcagggtgccccgactcccgccgttccacttcaggcttctgcgtcttcctcggcgacagcttggtgtcttggtcatccaaacggcaaaccacagtgtcccggtccagtgcagaggctgagtaccgggctgttgctcatgtggtcgcagagtgctgttggcttcgacagcttcttcaggaacttcatgttcccttgaaggtcgccacagttgtctactatgacaacgtcagcgctgtctatatgacagcaaacccagtccaccatctccgtaccaagcacattgagatcgacatccatttcgtccgtgaaaaggtggctctcggcgaggttcgcgttctccatgtgccctccaagtatcagttcgccgatatcatgaccaaagggctgccgattcagctctttgaggattttcggtccagtctgtgcatccggcatcctgacgcttcgactgaggggggctgatagatatgtctattaggaaagtgtatattaggcaaggctatatttagtatgattagcacctgccatgtattgcattaggaaagtgtatattaggcaaggctatatttagtcaaatgaggaagatgattggcatggtggaagtcaaatgagggcagcaaagattaggggaagattgtaagacataatctgctgcccccttcctttcttcttgctgaccaggacagagacatggtagtggatcagatcatctcatggctggtcaagtccttggtcctgtagagtataaggcaataggccatacttgtactagtagaagtacaccagctgtatggctggtactagtgtagttgttggctgatttcagccttgtaccctaggtgtatgtagttggtagaactgtaccttagaaggtacatgtattggtgtatataaaccagcccaatgcaatggaagcagcagcaagttcattgccactcatgcagttccagtttcagttcaagtctgaaactgtgtgtgtgctgtgtgcgtgtgcagtagtagctcagggcttttcttctaccttggagcaggggagagggagaggggaggagagcaggtgctgctcacctcggtgcagggttgctgtgccaacatttatgtatgtgctctgttgtgggtagcctgcgtgcggctgtagttctccttgtacactgaactaactatccttccttaattgaatgccaaaactcctgcccttttattttaaaattttaatgggaagtttaggcaaattgatttgttgcttaactttttcacaatgttgtttagatattaagaaaggacacatggtcagttgcttatttacttataattcttgtgacttcagtttggtctgtgtaattggtgctgaaaaggagaacttaacttgttttaacttctttctcatattccatcacaggttgacctgcttttagggaaggcttattctgattggggccatatcagtgatgctatctccgtctacgatacactaataactgaacatcctgaagacttccgtggttacttagcaaaggtactatgaattgaatttctcttctttttggagttatacatagagtcggttaatctttttagcacagagtaaaggttgaagtcagaagtggtcttaattgttccaacagatctgagatgccaatcagatataaccagttttagcgtactgaacagtgaatattacctctgattctagtctttaaggacagcgacacagctccaatgcgacacagacttgtttgttttttgtgtaaaaatatacggtttcaaatagtgtaagttatatatcaagaaagtatttgccatcatgaatctacaatctagtaacatcaaccgtctgttgtcaatctatgtaacgttccacatatttatgggccaagttaaagaagttcaataagctataatcctataacggcctacatttggagttgtaggtaatatatatatctaatgcaaaccatgagtcacctcttggcttccattactttagtttctgcagtactattgtcttaatggattatgttgtttctattacgaagtaatgccaaacaaagaccatacttatagcaattaatttcttctaccaaatgatcataacttattgttatccaattttagggaatcatattaaaggaaaatggtaaagcaggtgatgcagaaagaatgtttattcaggtagtattttctctttttgctaatgacattgaaaattcttgacaaatactagtatagttatttcatatcttgctagtagagaaaaaatgatatagatatcaggaataggtttcagcatgtttagttgtggtcctactgctggatggccatgtgccaactatgcccttcctatgccatcaaaggatgtttggatgtgatctagatccaaacagtaggaaataggaaggcaccacatcctctagtgttgggtgactgaccctgtacactgggagaatcccggacgcaaagactagacctagagtcactaaataactatacaggtatgcccctagtcatgctgcaaactagtgtgacgatgggacatgaagcacccgaacctgtcccatctcgcgaacaaagtgaatatcgatctcgatatgcttcgtgctatgatgatgaatgggattgctagtcatatatatagtgctgaaatgctgaagcaatcggttagaacgtgaagctagcttgttgaaatccaaggatgttatcggagaacttgcagaagaaaaattatatggcgaaaacaatgttgccaagaaatgtatgtatgacgagaagcatggtctagacactgataccttttggggtggacaattagcctaagaagacacatgcagtagagcagggagccaccttttggggaggatggttagccaataagaagacaaacggtagaattggcagctagcttgttgaaatcgaaggtggttgaacttgatcttggttattatgaataagggagactgaattggatgattgtattgagacccgatgcgtactatatatatagaatgcatgagagacataagaggaaaaccctagactaggagattacactaatacccttgactattataccttaacaccccttctcaaatgcaacatgaatgcaatgttgttgcatttagagaactatgtgaagtagacgtgaaaaagaaaacaatgtcgatgtagaaaatgaccacaagagggctgccttcacaacccatacttcagcaaatacctcaggtcttcacaaacttcaactctttaaacatgaacctttctttggagacttttaaactcgatgagaatagagagatgtgtcaaatcaagccaaagaaagaatgtagagatcagtgctacaagatggcaagcatcaagacgaatggtgatgatgacaaactaccattaatcatgatatgtagcaaaacaactacaaaagagttcaagagggcatagctgcatcattgatgatgatgatgattatctaaattgacgagacttggctaaccataaaacaagaaaattagttcatctaacaataaatttgtggacatgcacgacgtggatgaactttagtgtgtagaactagacttggatggacgaactgtgtgaagaatccatgacagaatctaagtccatgatcgaaaggaatcaatcttgacaaaggacggagcacacgaaactaggaaacaaacaattatggtcactatagacctagcgtggacgggcgccacaaagaattccaccatggagggagccatgcgcacaggaggcgagttgtgaggataccgtgtagatggagtgatgagcttgcttgtggtatggactccctagatggacggcgcgcgtactccgcgatgacaggagcacaaactatctagacggtcggtgcgcacatacgatgcgtggactccctcaatgggcagcgcacacagatggagcgtggacatgcaacgtgcacgtatggtgtatggactcccttgacggcagtgcgcggacgaggaatcccgaatgtgttgctgcaaaagagggtgaagaacgatggcttgatgcatgacaaagactaataaaatagcatgtagatctataaaggataaggagtggggacggaatggatcgtaaacttgagctttttggtaccatgttatgaatatggagattgaattggaggaaaccctagactaggagattacactagtacccctaactattatactttaacattggtaacatgtagatgctcaaaagggatggtctatggtggaggaaggcagatggttgagaaggtatgtagttatagatgaggcttcaatccaatatgaagttggcatgtgagcatgaaggagaagtgtacggacaagattgttgagagtatggtgaatacatttttgccttgttttggggacgtgtagggataggagaggcacaagtaggtgcctcaagaggctagaaagcattgtgcggcatgattgacaaactctgtgccgttatcaacatgaacaagcttgataggcaaacataattgagtacctacgtacttaaaatcaacacggtgttgatgcacttcggtcgttatagaggaaaggtccaacagtaatgagtatagctatcaagaattttttagtaatactaaaaacataaatactagcaatgggagacgtcaccacatcacaatggattatatcgaaaggagcaaaagtacatgaatgtagagctactgataggaagatgcacatgcttgcgagttggcaagagtgacaaaagcatgctatctagtttattacacgaacgagaaataagactacatattgtcgaaatcaatgtcactaggatgccctgggcattggtgacaaagagaagacactgtaaggctgacatgaatttagtggaaggagcatccagtgaaaggctgtagagatcctcgcctttattgcaacgaagaatctcacatagggtgttgatgttactaaccttgaagaatatagaagataagtcctccattagtggagatggccatatagagagcgcctcatgggctatatgggcattgatatacaattaacactcttcttcaaactcaaggtggaaacagaggatctgaacattgagtttgatcaaatgaagctgatattgctctcaaatttgggctttagtgaaaagatcgaccagttgcagctcaaagggtacatacagaaaatcaattgtctgttgacgatagtgagaatagatgaaggcgacagacatcaacaccaatatgcttagtaaacttatgtttaataggatcattgccaatctctatggctctagtgttatcacacaaagcaagtgctcgaatttgtgcttttttattatagtgagatttaacatattgtttcttggacttccatgaacatgcaatagcctgtgataagagtggtgttctgttgggttactcgcccaagtggaatccgagtaagcatgaagctaaagtggactatcgcaagcataaaacaagcattgagatgatgtccccctttagcatcatagcacacgagcaaatgaccaaaatgaatagaagtaggagcacttacaaactaacttacaatgtgaacaacatgagcaatgtcaggtcgagtaacattagataaacaaggttgcccacaatatgttgacaatgagaaggatcctcgagaggcgttccatcagtagcagtgtagcacaaagttgcaagtgcatatcggttggtgttgtcttatcagtaatgcctgaacgaacaataaggttttgtatgtatttggatttagagataatagccattgacagaatgcgaaacctcaatgcctagagaataattgagaggaacctaattattagacatttgaaattgcacgccaagttgctttgttacatgggaaatatgttcctcctcatctcctgtaattaaaacgtcatcaacatatagaaggagcacgaataaatagagcaggatcataggcactatgtgaaaaactagcagctcgtatcgtagaaacaaatctcccaaaccaagcatgaagagcctgtttaagaccatgtatcacagaaacaaatctcccaaaccaagcatgaagagcctgtttaagaccatatatgtcacgatgaagatgacaaacatatcctaggagcatcaacacctaggggtgactgcatgtaaacttattcattcgtcaccatgaagaaaagcattgttaacaaccatttgagagataccccaatttgaagtggcagccattgcaatcagagtagaaacgatagacatatgagcaatgggtgcaaatgtcccatcatcatgtccttgagactactaaaaacctatagcaaacaagtctagctttatatctctctatagaaccatcatatttttctcttaatcttgaacacacagttagatgttattggcattgcatgtgatggtaacggaacaagatcccaagtccatatatgatcgagggtagcaagctcctcagacatagcaagctactattcaggaatgttggaagcttcctgatatgtggagggtttagcaacaacaacattgggaacatcaacaatgggagcgtcaggactagccaaggtggtagaggctatatgaaggatcaatgggacctatgggacgacgagtgtagacctatgtaataagcagtttagatggaggtggaggactcttatttgtagatattcacatgaggtgtaatggaggaggatggtgcaggaacatcacctctagatgaattagtaggaaaacaaagaaaggaggtggacccagtaggggaatatgagggtttagtagatgggttataaaagaaggacagtcctcaacaaagcttagaccgatacgtatacaacgagaggtaggaacaccatgataacccttatgctcaggactacaccctagaaagacacactcagattgggtggtcaacttggtctactcacgaggtgcaagcaaaacataacatgtaatgtacatgtaaagactcaaagatgatcgtagttaggagtaccaaaaagtacttcatcagaaaatcttccaaatagtttggatgaaggttgtctattgatgagacagacaatagtagaaacaacttctcgccaaaaatgagaagaaataaatgaggaaattagaagtgttctaggcggtgtttgtgttcggcaacatcgttctaggcatgtgcgctgggacaagagagtggagcaagactaccctcaaaggtaaaaaactgatgaaatatatcagataaatactttttttctcgaacgcgtaggagaggtgcgcatcaatatattaacaagataaaaagggtaaagagccccaaaatgttacagagtaaagggccattaacccgcccatatatacaaaacaaaagatctaactagctaaaaaagatttgctaagacttgaccaagaaacaacagaccctcaattaagaggctgctggtgcttgggcaaggagaaaagaaaccccttgagccccagcaagcaaccactgtagtaactcctccctaaaggctgagatggaggttggtaagcttgggttagctccatcaaaaacacagcgattacaatgattccacaaggtccaagcgcctaagatgacgatggagttcaaacccttcttcccttgacctgacactcttctgcatatcttttcccaccagtcttcaaagctcgtctcttgtgcttgtggtgcaaggtcgtgtaagccgagaccgtccaagatggcaaaccagaattgtcgagagaaaacacaagaaaccaacaaatggtcaagtgtctcatctaattggtcacacagtggacaaacttctggatgtgggagaccttttcttgctagccgatcagctgtccaacatttcttgtatgccactgtccacatgaagaatttgcatttgtttggcgcccagcttttccaaatgcgtttccactggctgagttgtgtggatcctgtgaagagggcttcatacgcggactttgccgagtacagtccagtggaagagaactgccatacatgtgtgtcctctacctccggctgcaactccacattttcaagcaaaacccaaagctgaaggtactccagcagaacattaacagtctgaggtccatctcctattgtttaaggcatcaaaaactgttcttccttttgctcttgttgccactgcagcgaaaaggtgcggatatgagtgttcaaaacttttctcaggtaaccatctgtcagtccagaaacaagtattcttgccattgcccactgaagacctcacagctacagaaaagaaagccttgacctgtggtggaactttgattggcaagaaagcccatggtttgtctggttcagtcttttgctgccacaaccatctcaatctcagggcccaacacaagtactggaggttagatatgcccaatccacctaactcaggtggtctagtgacttttggccaagcaatcaaacagtgggcaagtaaataacataatatttgtgaccactgaccacgctttgtaacaaaaggtgcaagacctcatacatctgaacaaataatatcaaaaggtctagcagaatgagaaacactagaggaatatagaagttgtatttgcttttcaagcttgcaacctttacaatggaagctagactcgacggatgtatgacctagacaacctttatttattactgttgacaaacgggatccacataagtcaccaagatggtgatgccacttggcgaaggacgaggtggatgaagatacagcggaggacacacgtgatgtggatgtggcagaagaaggaagacacaaggtatcaaaacgtagaggctaggagcacctttatgacaatggccagtcccaatcatagtctcgcttcaatgatcctaaatgaaataagatgagtcatcaaatctgacaaaacaattgtaatcaataacttggcctactgagagaagattcatgttctgatgagaattgcaaagcgaaccctgatgagtgatgtgacaagatgtaccatcatcaatctgaatagaagcaccatccgtgactggtttgcaagcaaccaagtgggagtgatcagatgtcacatggaaggaagctcctgaatcaagaacccaagacgtcgagggagtgctgacgggtgagattgcagcaatagaaactgaacctcttggagtggggctagtactacgaccacaagcagcacaatgtgcacgatacttagccaatttcactggatgttggaggatgaccagaacttccacaatgcttgcaagggtctaaggaggtgcctttttggtgcactggttcgctgcgagactgcctaaacactaagcacagatacagaagaagcagacatagactggagacgtgttccttctgcaagtaaatcagccaaggcatgtgcaataatgatattggaggaattgtggagcaaccaagtgcaatggaatcatattttgcctgaatggaggcggcaccccatagtgcccacctcggttaaatctgagggcaatgtcttgcaaaatgatttgtgtagtagtgatgggtgtgaatgccccagtgtgggagtctgtgccatggcactgatgtacggtgagaggcctagcatgggcagcacaagagaagtgtgttagataaaaacccagacttggataccatgtagaaaaatcaggaaacccactcattatgagggttcgctgagcttgtgtgtatatggccgaaaacagcttggagtacaacataggtacaattacaagtcatgtatagaactctatctttactacaaacttataggtcttgatttcaatttgaactaaatcctattttttttaaagaattccacctcatccaaagaggctatacaatgtagaagtaaactgaggtgaacataaaatagagtgatcaatgtcttccatcagaatttgtaatgtatgccttaaccttccatgcaggcaaaattctttgccccagaggcagcaaaggcactagttgatcgctatgcacaaagatagtttgtgagacgatgacagattgaatggtgctgttttggaccaatgaaattgtgcggtccattcctaggtgcaaatgtatccgcaagttagaaggaaattctaagtaatttcaccgaccatgtgcaaacattacattcatagacaaaatgagatatatttgtcagtaaataggtcacggttgtgttttacagagatgaccatcaggatgctaggaacgtcttgtatcatagcaatattatggaatctgaggccttgtttagttcaaaaaagttttaagattccctgtcacatcgaatatttggacacatgcatggagtattaaatataaacgaaaacaaaaattaattacacagttgtctgtaatttgcgagacgaatcttttgaacctagttagtccatgattggaataattaccaaatacaaacaaaagtgttacagtacccaaaataaaaaaaattgccaattaaacaaggcctgagatatatgttatgctttgccttggaataaggctcagataaacattttgatatagtgtttattccattatctaaaaaacattaagatatgttaggaacaaattatgttcacatggcaggacctatggcttccccatatatatccataatcacgtggaacctgatcgtctttgaggtgtttacatcatgttgccttgaaggtcatatcttttaatttgttgctctggttaaaaggtactctctccattccaaattataagtcgtttgacttttttttatcccaagtttgaccactcgtcttattcaaaaaatttgtgcaaatatagtcaaatttaagtcattcttgaagaacttttattaataaaccaa

SEQ ID NO: 4080 - DNA, 3396 bp, Sorghum bicolor
tgagataagtttatatgtgaactttgaaaagttgtagaatctcaaatccaaatagcttaatctagtaagtatattccaaatcctccaaaatagaaaagatccaaaacgtccgtaactgtctgggtatcatggtatgaatggactaatagaatacagggtgtgttgtgctcaactaacgtgacgtagaccttgtgtcaaccactgttggcaattaaccagtgaagcaagcacttagaaaagtgaagtcctcgctgacacaagtgtgttactaagggtctgtcgtggtaggacgctcgcggaaacatttcaaattcagatggtgaatcagaatcaacttataaaattgcttggctagcaatctagctagattccaattaaaaaatcatttaaataaaatatggtcaaaaaattctgaacttttatggatggagaacaacttaaataaaaataattttaacttattgcaccaaaaaataattaaccgaaaaaataaactaaaaaggtaagaacaaatgggatgagaatttgtgcaaaactagcctctccagtagtttcgcgtgtgtatgtaaaaatggtaaaatgtttcggtttcgaatcacttgctgaaagaccgtttaaaagtgattctcatcagaaactgaaacgtttctcctatctggtctaattactccgtaattaacatgtagtcacacagttggtcatgccgtcctcacctgtgactgtgttctatgtagtcacttccatgcttctgtacttcttcgaaatcaaatatcttaggccttgtttagttccaaaatattttacaaaatcgacactgtagctttttcgtttgtatttgacaaatattgtccaattatggactaactaggctcaaaagattcgtctcgtcaacttcgaccaaactgtgtaattagtttttatttttgtctatatttaatacttcatgcatgtgtctaaagattcgatgttacgaggaatatgaaaaattttgcaaaattttttggaactaaacaaggccttatttaaaaatcaggacaatgcaatgcaaacgactagtatctgaaatccgcaatccaacggctggtgaaagtccaatcatatgagtggttgtttcattgtttggctagtggccatcatatatcaaaactagggccttgtttagttcattctgaaaactagaaacttttaaaaattctccgtcatataaaatcttgaagcatatgcataaaatattaaatatagacgaaaataaaaactaattgcatagtttgtctgtaaatcacgaaatgaatcttttgagcctagttagtctatgattagataatatttgtcaaataaaaacgaaaatgttacagtgccgaaattcgaaattttttcagaactaaacaagacctagaatgcagctagctatgtctcatatgccacatcagcagatcctgggaactctctcggccacaagctccccgtgggaccaccgcactcactcacaggtcacaggtcacaggctcttcttcctcccgtgaacctgatcgcgagaggcgtgctgacatgaccaggctacaaaccgacaccggaccttcacgggctgcaccgctagctgctgcctgttctcatgcagctgactctgcatgcatgcgcagaccccctgccttcgctccatattacagatggccacacacctctaagactctcggggtcctatttagttcattccaaaattttaaaaaaaattcaagatttttcgttacattaaatcttacgactatatatatatatatataattaaataatgttttttataatttacaaaacaaatcttttaaacctaattagtctataattagacaataattatcaaataaaaacgaaaatgctagtataagtaaaaaattttcaggtcctccactaaacaagacctcactgtgttggccgcaacggcaacagtagtaccccgcccgctctataaatacccccgacgacagggaacggagctagcaacaatcactgcagtacacagcacatttgcaaagttgtagttcatcaaacgtagcggctaggtgtagcgctatatatagctccatctgctgcgacgacatggcgggcaccaccaggaggagcaggaagtcctcgtcgtcgagctcatcggcgcagcagcagctggctgccggcgcgctgcttgtggccgttgtcgtgttggtggcggcgtcgtcgtcgggcgtgctggtggcggtggaggcggtgtgcgacatgagcaacgagcagttcatgtcgtgccagccggcggcggcgaagacgacggacccgccggcggcgccgtcgcaggcgtgctgcgaggcgctggcgggcgcggacctcaagtgcctgtgcggctacaaggactcgccgtggatgagcgtgtacaacatcgaccccaagcgcgccatggagctccccgccaagtgcggcctcgccacgccacccaactgctagccatgctaataataagctaagcaagggcgctggcctggctagcattgccctacgttgtactacgtgtgttgttgcattatatatatttattattactgtgtgtacatctgcagcaggagggggcccggccgtacgtacgtgccacatcgatcttgtcacgtactaacatgcatatgttcttgtcgtgtgtgctccgtgctggcgtgtgtgtgtgtgtgtgtgtgtcgtcgttggtacatcttgtcacgtactaacatgcccgtggttggtttgttggactgtttgtgcgtacgcgcgcatgtgtgtgatgtgtacttcggtagtgtgggtgactgcctggcaaaagttgcatcttgtgccctctcgctcgctcgatctctctgtatgtatctatatatatatatatataaggagtgtttttgatgctaaacatgactgcttcgttgtctttgacgtcaggtcaatttgtgtgtgcaataaagccaagaactgcttgatctctgcatgtacaaggcaatactatattgttgaacttctttggattattaacatgtgacctctagatgaagtgattacggatgattgttctagttaacttttctctgcggaaagtgtgtttggactgaggacaaggttggacagtaaatacgtacaaaccacaacgggtggacgccctctccctatctcacggcgtccatttgataacgggtgcgtgctcaccccattgtggaaattgcaagttgaaggttggatgatcatatccatgcatgtttacaaaaagatatagttatccaagttgagtgcttggtgggatggatggaatgagccagttttctaattatagctagttatattttttaaataaaaataataacaactaacaatacataaataaatatgtactaacactatagttactattaggta

SEQ ID NO: 4081 - DNA, 3394 bp, Sorghum bicolor
gagcatggtgaagaagtggtttgcccggccaccaccgccgccccaaggggcacagatccgaccacccccaggctcctcgctggccgatcatgcacaggcactgtagcttcacccgcagtcctagccacctggccaccgcctgacctagtcgacaagcacacaagggggtatggccgtggtacaggactaatcaagttatcggtggatctacatcctatgccattgaaccgcttcgccaagaagatggagggctcgcccgtcgtggaggtggtacatcgccttctggctgcagccacccagccgccgcttagcctagctcgcgtacgtgtgtgggggcctcaccgtaattacctcagatctgctagatccatcttccggtcatggccctagccacatggccaccgcttggcctagccaacgttcgtccgtgggggcgcaaggtcctgaccaagtcatcactggatccactagatctgttgatgtccaatccgtgccatccaacccgaaggcaaggaggagcaacaacaagacgaccaacacatagtggaggaaggcttacccgtagggaaacggatagggctaagccctagtggatcaccactgccccgatgcgcgagcgcactaccccgcctagctgccacgaccacctgaagcatggcaagtgcgggccaccaccgcggccccaacgtgtaggcacgcgcttggtatccaattctttattagtaccaaagttttaaatagcaggctaagcctcttagcggcagcctctccaaaatgctaagaaagtctatagcgggctaaatagcgtgctaagacatttagtggttgagcaaaaattatgtcaaatatcaggtaattttgcacatagtaaacatagaagatgaaaacattacaaataacaactaccaagtagggacagataattcaaagtcttactaacacattagattacaacttcatagtttatacgtgatacatcatacatcacatagtgacagatggagttcttttgaccaaccactttagggcgggccgacacccaactgagcttgcccaggtgcccacaccagagctctcctgggcggtgacacccatagctcacatgaagaggagacaccaatgacgccattcaagtgggacaagcgcatccactttttttcttaggggcgaagtgagccctcatcttgccggaatactaattcttgcacatgggacatccccgccccagagacctccaaaccaacaatgctagagttgggccattctctcctgtttatggttgtcctcgctcctcggaaccaaacagacaccgagtacaccaaactccgaaccagagcccatcagtaagcgaagaaccgagctgcggaccatcgagtgaagccaggtaaattcattttgtgccggtaacaacaattggcaatcgcctacaaatcctagggtgggtaatcattgatgtcagaacatgattgactctgtgaaattactatactggtctttgcctctttggtacccacgtttggctttgttcgcttaagcttatctgccgaatctgtcagtcgttcaacaatgtttttctctcacaacaaatcagcaaataatattttcagtcatgactttttagacaagtcatttatcttcaactgttctgatccatgaaggcaatgcaaattcatccaatcaagaatttggtgcactacagaattatgatttcacagctgccacatttcaactcagccaaatcagaataacgtttacgttcgtctgagctctgaagttgccaactgaatccattcagatgtgttcactaatctgcatcaaaagaaattgcagttcaattgcccgaaaagtcacgcaggatcataaacaataatggcagtaaccagtttcacacttccaatccgtgcactatatagagcatcccttgcagcccaatctcacaacacacagcaaaacaaatcaccactccaggcacaacaacgggaagcaacactgctccccaaatggcaaccagatcatcgctggtgccactgctgctcattgcagtagctgttgcacagattgttgggtcacaagctggcagcatttccatatactgggggcagaatggtggcgagggcacactggctgacacctgcgccagcggcaactacaagattgtcaacttggcattccttgtaacatttggcaatggccagactccagagctcaacctagcaggccactgtgatcccacaagtggtggctgcgcaagccaaagcgacgacatcaagtcatgccagagcaatggcgttaaggtcatgctctcgattggtggagcttccggtagctactaccttacctcagccgcggatgccaagactgttgccacatacttgtggaacaatttcttaggggggcactcatcttctcgccccttgggcgatgcggtcctcgatggcatagactttgacatcgagggcggcaccacccaacactgggatgatcttgcaagatacttgaaagggtacagcaactctggcaggagggtgtacctgactgctgcacctcagtgccagtttcctgatgcctatgtcggtgatgcgctcaacactggtttgtttgactacgtctgggtgcagttctacaacaaccctctttgccagtacagctcaggcagcaccactgatcttgctgatgcatggaagcagtggctgtcaattccggcgaagcaggtctttcttggcctcccagcttcgcctgaggcagctgggagtggttttataccagctgatgacctcaagtctcaggtgcttccattgatcaagagctcagggaaatatggagggatcatgctgtggtccaagtactatgatgaccaggatgactacagctcttcagtcaagagcgatgtttagaaaattgtatgcgtgctatatttttgtttttgattgtgatgtgtgattgtgatggcgtgaacgttcattctcttgctcttgcaagtagttcctggtagtaaagaggtttgtgcagttgtatatatttgttaattccagatggattggacgcgagcaacagattactgtgtttgtgtattgtcatttgtttcatatttagcgacataaaatatatttttttactactagctaggttttaataatatatgctaaatgaataaaagaaagaaacaatagagaaaaaactttgaccggtacatacgtcataacatctttttaagttcaacaaaatgacagatacataggagaactagcaaacttcacaccacaacccattggtaaacctcaaacttcaaaccttgactgaagttgggtaaattcgtttcctgcgggttactacaactggcaatcaccttaaaatcctaggatgtgtaatatttctgtagaaacttggttgactc

SEQ ID NO: 4082 - DNA, 3532 bp, Sorghum bicolor
ttaaattgcattgtattgtagtgtgacttgagcccccatcataaaatataatggactttcagttgacttaagtcaaaccgtcctaagtttgatgtagaaaagactaacaatatgtacaacatcaaatgagctcttttgatacatgatgaaatgtgattcataatttagctatttgatgttgtacatatgatcagacttagcatggattgacttatagaataactaaaaccgccttatattagaggacagaggaagtataaacgacggcagtatactggaatagagttatacaggcgaaaaacacccaatgaaagcccacactagaaacaacctaagttgcatttaaaatttagggcgtgtttgtttgatgcctgtcagatagctttccatctagtcaagaatctgaacctaggccatcaaaatcctacgtctgagaatcattgcgcaggttttcagtctttgaagcaaacaaccccttgctgtttttgtctaaattagggtaattttagacgatgcaggtacttctacgtatcagcatgcatttatgcaaaaagcgggcaataattttttaataaatgggagactaataatagtgtcctgtacctactccctccagcattgcttcttacacaacaaaaaggaaaatgacaacgaaatattgtgctcatgcaagatcttcggatgggaatgtgtgggtgacagtatcccagttaaaccaaccattccatatttgcatgtagcttcctttcacacattccattttgtggatctgatcttctcttgttccaaacttttgcttctgcgttgcatcttctgtgtcactgaaaatttcaaaacaaagagaaggcttgaaaactgagccgatcgagtattgtgggggctcaagaggtaattaaacatgatgttgtaatccttggtagtttacgctatcagtattcttgtttctttttatttgatttcttagaaaatgtcgttctaattttcctagcttaaacttgctgtgtagattgattgatctgggggaaaggaaaaaagataaagaaatacttggctatcgctggccatgtaaattgaatgcttcttccaaaatgtggtaagccattttctctgtttctgcgatcaaattaaaaagttgaatcttctttctaatatatgcaatattcactggtgtttgtatcttttttcttcgtttcactttttcttctggaatctgttggtatgtgaaactatattattttttccccagaaataagaagaaatctgaaaccatgaaaagtgtggccttcttgattctcacttttccaagtgatgcagtatgaagtctcatagaactagtgattctttgaatatgtctacaacagtttttccacaagtttttggttcccaacaggaaacaaaaatacatgaaaatattttggtaaatttttaatagctgagatgtttgtgttttgttgtaaaaatttactgttttcttctaatagaattatttgagcctacttattgaactgcataggagtaaacaacagaacagactgacatcagttaaaagagatgatgcagttacagttacaagctcacatcacagtatgttaagatttataatcaataatcatattagcaggagatttgagtttatgtttgtttcatttcccaggaacagtcagcgaagatagatcacaaaaaaattctcttgacaccaaacaatggcccatcagcaagaagaccaaaatcatggacaagtgagcaccagtccttctgttacccctgccgccgataacggaacaccagcagataagcttgagaagaagaaatcgagctcctcgtcttccaagtcatcagaaaacttagacgaggatgatttctttcagatagagggtccaatactaggcagcacattatcatttgctgataatgcagcaatctcagatattagaaaacagagcagttcgtcttcgcatcatgcccccactgacccaaagcagtcaccaccagtccaggccatgtctagggcaccggatgagtgtccagaccccaaaaggatcccgtcatctgttttccggaggtcaaaatcgaaatcaccaacagactggagtgtgacatcaaatgaatctctctttagcatcaatgttgggaatgcgagcttctcgaaggatcatttcttcttgtatggcaaatcaggtgaactaggcaaccctaatgacccattggcgccactgccgccgttgccaaggctgagcactagctctagcccaatgaaaagtgaggtggcaactgtacaggacggtgctaaagtgaagcctgctaccagggttgggggcgatggtgatgacaataatgagtataacaacagcttgtcacaccggtctgatgctagcacaacaagcttcgcgttcccaatgtatggcttctctgcatgacagcattccatccctcaatatttactgtatagaagttagtttcagctatttcatcatggcatcataaatggagtgtttttacacatgagatagttagtaactgaacattgacaagtactaagtgtcttctaggatatatcttttatattcagtctttcctaatagagccaaaaaaaacacactctaatactaaatagagcatctgcatataaagttcagttagcatcgctaaagagcagattatagtaataattagactgtcaatatgtgtttgcattggtgaaagattcaaccaatgttttctgaatccaaggtgttacgtattcattcctaattatctgcaatttcttcagattggcaggtgaagtgaggtctagtgaatccctgaaaggcgatgctcctgagcttgcccggcaaagcacatcgcagctatcacagcaggcagagcctcttgttgagcaggaagcaccgaaagttgaagacaaggcactggaagctgagcaagccccggccctggccacagcaccagaacaaacaccggcaccagcaccagaatcaacaccacaaccaccagccgcgacaaaatggtttccttgctgttcttgttgttgctgaggatgcagttccctctccatgggatttgttgagtttctgaagtggcagaaggctggatgcagcaacaggctaaagtcaaccatctatgggagactttctagtaactgggttggttctgatcagcaaactatgttaatggaaacaacggtcaaccaaattacttgctctgagttgtgtagattacaacaatagtatatgtatacactagtaatcttattttgtaaaaatgtgacagtagctactagcaagacagaatatggtgctttacactttatttctcctcagtttgcacacagctttttaaccaatactatacaaacaatttccaaggacagtcaaaatatatttttttcgtacgtggatggttttccgaaatcgaccttaggccaccaattcaagaaaacaaccatttatgtaggttaggctagttttgagatccgttgagatgatcgttgaaaaacttcagtggtgcaccaaagcactccagtgagtactcacac

SEQ ID NO: 4083 - DNA, 7754 bp, Sorghum bicolor
actaacttcatatgaacaagcatattttttctttttagtttctctctaaaacttgtaactagtttttcttcttcatactaacttcaaatttaatgatactttttcctacaattttctaaaatcattctctattaatttattgtgttctaatagctattattttggtcaaattttgaatttcataaaatgacaacttcaaacaatattttaaaacactaaatgatttaagtgaaaaagtcatgaacataaaagatgttgaacttatcaagatctacaacttttgttttgttcattatttcatccgataaagtggtaataatattgttcataaatagacatatctctcatatagtttcataaactatgagaaatttatattttgtcaacattgatactactattttgtcccatgaagaaataatcaaaataaaaattgtagacctatatgagttgtacaactttgttggtgatgagttttttagccagaataatttgctatttcaaaatcttgtttgaagttgttactttttgaaattcaaaatttaaatcgttcaaacaaagtccgatggagaaatgaccaaaataaaatttataggtgttgatgatttttacaatttttttgcttatgactttttcatttggaattattttctatacaaaaaattctatacatagttccaattagaagtagaataaaaaattatgagttccctcaacaaattatatgattcatgggcctggtctctcgttgcatcgttgggctcaaattccttcaagcccatataattcatgtggcgatctgaaccgttcattttaattgaacggcgcatggtggtcctattgcaaacaaaatagtcacagttggatgctctctccaaccctatgtgtatgtgaatcaaaataatgtacttgttcgatacatgaatcaatgtatggataatgtgatcactttttaatgtcattacttatgtgtatgtgaatatggctaatatttgatcattagctatacctttagatcagcttttatttttttaacttatttgattaaggtcgatggattatccgttgctaaaagttcttattgcgaggggctgtctgttgctaaaagctctaacaggctatctgttgctaaaagttggaccgtcgaattgtccgttgctaaatatgatgtccgtcgttatatacatataacgacggcttcaatagcaacgacatcggtccgtcgctatagcctttagcaacggactatctattggtgtacactccttttagcaacggattgtctatcgttgtttaaaggttgtggtgtagtggtggatgagtgaaaagttgaaaatcatgctaattagatggaatgaactttatccactgatgcaatggtcctgtatatacgaagctatttggttgtccggccacctagtagtcaatgcaaaaacatagcaatgcattcaccgagctatatattgctcgtttgtggttgcggccgcatctaagtaaaattaaaaagatagtaaaagaaggtaaattttcaccatatttatatccacatattatagatccttacgtctataaaataaggcgcatcctttcaaatttgctttagctccatccgtaagtctgcacgagtggatcggagaaactcaatttgtgtgcatcaactttggccaagattttttgcgcacacatccatacgtaccacactagctagcccgctagctatctagacagcaagcgttttgtacgtgggcaaaggcgtcgccgtcgcgcccgttgggatggggccggagacggagatggagacccaagtggacggcagccaaaggctttgtgtcgatcgatggttggtcgttgcatgcacttcgagtccgactgacggcggcgaaggctttaatttccgttaccaagtgtcgtcgacggtggaccacgcatctccgattcgctccgccgctgcctttatcccttcgcatgcatttcggaccctccgcgccacacacacacaactagaacctactatctcccgcgcgcgggcgccaccgccaccgccaccctcctcctcctcctcctcccggctctcgccctccgtctcgcccggcggaccccgccgagcgcatccgccgccatggcctccgacgcgaggctctccttaccgtgccgcctgccctcgctcctccctccgccggtgctgctgcgccggttgccccgcgccgccgccgccgcggcggcgtcaacctccccgcggtgccgcgtcgccagtacggcggcggcggcgcctgcccgcgcccgcggccggttccggcctcgcgcctccgaggttgaagggcagggcccggtgcagcagcagcagcaggtggaagatgaggtggtggacagcaacgtgctccagtactgcagcatcgaccgcaagaagaagaagaccatcggggagatggagcaggagtttctccaggcgctgcaggcacgtgcccgatttatttttttattattattttaccctgttgattgatacctgctggtgaaaaatcgaattaattgatccaacatcttggttgctgttcatgcatggtgggtattggtgtatataggccttctattacgaccagaaggcgatcatgtccaacgaggagttcgataacctcaaggaggagctcatgtgggaaggaagcagcgttgtgatgttaagtaagttccattaagccccttctggctgcaagttgcttactgttgtcgatggcataaacgtatttcaaagcctgccacacatagtattttccttaacacaaccaagatacacgaactatgtgatgttggtgggataacagtgagacagacgctggggcattcagcaatttttgtttgtctcgagcgcagagaaattatttgctaataccaattcctaatcaatattcatttgcttttgcctgggtttaggcgcagatgagcaaaagcttttggaagcctccatggcatatgtctctggcaaccccatcatgacggatcaagaattcgatgaactaaagctgagacttaaggtttgttctttttatcctgtgaatcttttgctagcgcgatgatggtgtcatatgctgtccgaaaagctgaagcgattctgtgcaattcttagtccctacgatcgaccaaccaattttcctccttaatttacttaccaaggatggttgatgttaatctctctctatttctcaagtcaagtactccgtatatgactagagcaactagaaagcaagctgagaaaaatatcttatgtggaaaagtcatttggagctgtgaaaactccaccaaagaccatctttagatgtttggaaaaactacagaaaaaaaaagagcatgcatatagaggcaggggtaatgcacagtaagcatgtagttctaagatcaaacttggttcgatctctttctgagttatgaaaagggaaaacattttttttgtttactcgtcaatttgatagcccacaagcgaagtcagggtttgtgcatcaccagcttctttgcatccacgactcgagttcttttcaggatgatgagagagaatagcgtggtatagaaaatgaggtgctaacaatatagcaagtcattacaaacttaaagtaaaataagtagcagtagcctattactaaaaatcccccgtgattgcaccataagcacataaaacattgttcttaatctgcaattattttccttgataatttctcctctctagaaagaaggaagtgacattgtaacggaaggtccaagatgcagtctacggagtcgaaaggtatgtactgcctccatgatttttttacctctacttgttcacttataagtctttatttgtaaaaatgatcgttaaatttactatccctgccatttacttttcttcatgacaacacatattggaaagaaaggcatagtttatttccttactatcagaagattaggccagtcctttcattagcttgccaccaaacttttcaccacatgttgtttatgcttccttcagtgatcaaaagcctgacagtgttcagcctctataccatgtgaactgtaactgaacattattagtgggttaaatcttgaattatgctttatttatacaattttttctatttagttttctagtgtaatgggtgaaatcttctgtgatattaagtctccaccttgaaatcaaagatgagaaacattatcttgtaggtctctggtaccaactaccaaaactgaccaggaaatttaataaaacagtatcacacagccaagtcagatgagtttatactatagttaggattagacgtgactttcccattttcactgattttgctaagtaacgtgagttggtccattcgaagaatcctgaccttctatggaattttgtgcaggtctacagtgacttgactgttgactacttcaagatgttgctgctatatgttccagcagctgtggtagctctgacactgtgagtattacatggaaattctggcatgaaaggaataaaaagaggattacttaagttctcctgatttcaaatggtcatgttacaccgcagcccaatatagctactgttttaggagggatactatcttcattaacaactctaagatgtctaatgcacgttttcttcttgacagattcttcttcttggatgatttgacgggatttgaaatcacacttcttcttgaggtaagtattggcaaattgaagtcttagtatatgttattgtttttgtttagggctttaggcttctggataagaagtaagaaattctacaatagtacttcactatcgttgataatttcttgtagtatactgaaagttgtttctcatgagttggaagcctggaagttgaaaattggggttccactgtggatgattctagtggtgctgtagtgggtgtgggctgctgctaaagttgagcatgcagcccgcgggctaaaggcacggcccaaagcacggtgatttggcctggcccgagcacggcacggcccgatcccaaccgtgcccgtgccggtccgaagcacgttgcgggccgtgcttgggccgacccctcggcccgctgggcggcacggcctggcctgcttttaacagtaggcacggtgtcggcccggtattaaggaacttgtgaaacttgaagtatcaagttccatgacttgtgaaacttgtgattttttgcaagtgaaatatgatctgagtatagtgttatgtgaaatttgaagtatcaatgtctgcgacttaaatgtgatttacttctgctttgttgaattttgtattaaatttagtgtttttcatatagcaggccatgagccggcccgaaaatcgacccacatgtcgtgcctgggctgtcaggcaggcacggtggcctgtggaggcacgagccggtggcacatgggccatacgggcctgtgccctatggggccgtgcctagcacgggcccagcctggcccgttgctcatctttagctgctgcagtgctgctaaatttaccacgcctgactattaagtgaacccttttagaaatgtaataacatgttacctcaggatagtggaaattcattttcttatattaaaaagttccctcctatgacatcatatttttcccgcataaagtgagcggcttggccttagctctttttttcgagaacatgcgtgttatttcattaagcagcttggccttagctctgaataatattttttttcccaaaccagtccaaactgttgaaacattcatgctaggcaatcagatcggccgatgaagcaatgtgcacgcaaccaatttattccacttgtttttaccactgattattttttctttgcatcaagaaaataataggttttctttgcatcaagaaaatgataggttgaagttaagaaggaatagaaataattcaacaaagataataatgcagttgtttcctggttagttgtttctgagaccagcttattattacagattagacttttttgacgcaatactacagatcagacttgtatttgagagttctgataaaaattagcggcggtcgtcttttcattctagaccatggcaagcatgtaacttacagtgtgtgcgtgcgcaagcggatgtgttttacttctaaaaatttcttctctctaatgcaatgatgagcgacatccttcttgtcatgcatgccacatttgaaataactttttcgtactgtaggttctttagttggtgtttgtgccaactaagaaatttaattatttgtaactgcatttttcttatttatgcagttgccagagcctttcagtttcatcttcacatggtttgctgcactgcctttaatattttgggtagcacaggcattcaccaatgtcatagtgaaagactttctgattttgaaggtatttttcctttttgttgttcatgcattattgcgtggttaactggagcacgcatatatagatgattattctttttttcagggcccatgtccaaactgtgggactgaaaatctttccttcttcgggaccattttatcagtgtctagcggtggttcaacaaacagtgtgaaatgtgcaaggtatgccttccattattaatatcaaattctgtaggcattcggacttatatgctgagcagcgtctgttgatatgcttgtgcatcagttgtggcactgtcttggagtatgactctgcatcccgattgattacactcccagaaccggctgaggcataagtaattaatggtggtttaggtgagtcattatcctactagcctgcaaccatcaatggtagacaaaagtctatgctattgatttcatagttgtggttacttatttatgaatcaaacacagtgggctaaacaactaaacagtttaggaaagtatgtaagatatagataggacatagtacattttatgttacagagttctaactgcatggatatattcctagatttcgctagcaggaaagacggcccacagattcctgatcgacagtacaaagcaagaccgtccttgaatcgggtgacaatcatgtcgtgatgtatgtttgctatgcgagtctatgtatatctttaaacaagtttagacatctatattatatagatttaacgaaatcgatatatgtatatatatgtgcatagagtgtacaaagaaaagtctttagctatgttccattttgtatgaactatcttggcatatgtatagctgtctgaagaacttgacgttctgtgcgatgttcagtaaagtaaaccaggttccatcgtaaaaatataacttgaataaagtcgcccagtatgagtttgtagtcaagttaatttcgaggacataaatactgatgcctcttcttgacgtcacgtacgctgatagagagtatgcagtggtctttcttagtactacattcttttcttcatctacgcgtcatggtattgactattgaggtggccagggcaggtcgaatgtttgggcccactacaccacaacacttaggcctggtttagttcctaaaaaattcaagattttccatcgtatcgaatctttaaacgcatgcatgaagtattaaatatagacgaaactaattgcacaatttgcatgtaatttgcgagacgaatcttttgagcctagttagtcggacaataattatcaaatacaaatgaaagtgctacagtagctaaagccaaaaaaaatcgtgaactaagcaaggccttatattggcgttgaatgatccgttgctaaaagcagctatagcgatagatgatcagacttgttgtgtagttagtgtaagtgttgtggctaaaagtcttta

SEQ ID NO: 4084 - DNA, 5142 bp, Sorghum bicolor
agaaactttagagtaggaatggcaacgggtacgtaccgatgggtactggccacccgtacccgtacccgccagatcaaaacctattccatcgggttacccgcgaaagcagacgggtaagaaattcattccgtacccgcacccgatgggtaatttttacccgacgggtattccgtacccgaaaatatacccgagttcaacagaaatataataacttccagcaagttaaatatcacaacttctagaaaattaaacataacaacttccagcaaattaatagcagcactagtagcacaccagccgctcaacacttcacacgttcagccaatcagttcatgggctatatgggctaaattgcttaggttgcttactcattttgcgggtatttcttacccacgggtacgcgggtatgggtactactattccacacccgtacccgctatacccgatgggtaaaggatttcgcccaataacgtacccgcgggtacaaaatccattccatacccgcgtccttatcgggtaaaacccgtcgggtactcgggtttcgggtacccattgccatcttgactttggagcaacgccttctagcacagctgcacaggcatcaaagttgcacacctagtagtggagctctgcgtgtgtgattggttagggccttgtttatttctaaaattttttgggaaacagccacgtaacactttcgtttgtatgcgacaaaaattttccaattatatactaactaggcttaaaagattcatctcgtaaattacagataaactatgtaattagtttttatttttatctatatttaatgcttcatgtatacgtccaaagatttgatgtgacagagaattttgaaaaattttaggtttttggaaggaactaaataaggcctagatggaactggtaccgatactatgctctgctcggcgtcgcgcttcaggaatagaatgtcgagctcctgctagaacatcgtaaccaggaacagccacgacaatgtgtacatgcatgttggtcctcattaccagccattgcaaattcgacaacagttgttggtcatcagtgcataagaacatcttgtcctcgtagtcgtggtcgaggtggaggtaggcactgaacatcttgttctcgaacatgttgtcatagctctcgacagtgtcgatgctgaagttggtgtaacttgccagaggaagtcccacaggagcagtggcggagtgtggagataaaataagcagaggctaatttttttttcaatcgtaataatcataataggtagcagtcatatgatggagtactactactaggctcttctatcattttgtgtttattctctgtaggctgcagccaatgcatgctttctagtttctatatgtttcatagcttcacagaacaacttttcacacaacaatataaggaaaatagtagtatatacagtaataaaacatgcaagcaagggggagcaggtgcccaggttcgcttctacaaggctccgcccgtgcacaggagcagcgccggggaatggatcacagaagagctcgtccatctcaatggttgggtccacgaggacgcaaccggtgaacaccacgtagaggaacgccgatgtggccgcctgaatgcagttgctcaagctatgatacgagatggatcggagtctcattcctgtgcatataggtctgttagtttatcttataatcgtatttttttttctcataataaattagcaaaaaaaaaaaaaattagatcagcaaacaggctcctagatcccaacgtgacattgtactagaatgacattctttccataacagagcgagtattcatatattgttaattttgtaagaaacgcgggaacttgaaatttcagtgaggattaattttcgagtagggatgaagaaatggcccccaaaggcggatggggctgaaataaagaaccttttcagaaaaagaatatatatatatatatatatatatatatatatatatatatatatatatatatatatatatatatatataaagaaaacgttccacacgagtgcgtgtccgctccagaccagacccccattcaaacccaaactccaactcgagtctcaagatcccaatcccatcccatttcccggatcaatcgccgcgcaagcccaagcagatccgccggcgagcgagcgcgcggcgcgcgggggcaagggcaatgggcgtcgtctcggcagcggcggacgcgcttgtcgcggttttctccctgaccatcgccgtcgcggcgccgctgatcgacgcgcagtccgtcctcccgcacaccctctacccggcgccgctcctggaactcaagcgctggtacgccgccgagttcggcgactacctcgtcgcccagccccccgccttcttccgcggcctcgtctgcctcgagctctccttccagtggccgctcgccgtcgccacgctctacggcatcctcacccgccgccgctgggccgccacaacctccctcatggccggcgtcgctaccctcacatccatggtaaagtcgtctttcccctctcccctgtagagctgtagtgatggaggcacaagtgtaatggatgcatgtctggaatttcgtgagactagtatctcaccgctgcagctctgcctcagatccaaaacactaccatggttgatgcacaattgtacacttaaagtcagttcagttgatgtggaatccaaatatagtttctcgtgtgctgattgaatatgattggctggtgtcaaatgaaatggtgctggaaaaaggttttgcagaccaatgggattcagaattacttccatatattgttttagcatatcaattacatttcttgttgttggtaattccccagaatgtcaaggtactgccaacattttaaaattgtaatgttctctgaaccatggttccttttgagtcaaatgtgctatagatatgtgacatttatatccaggttgaatctcaactgcagtgtctcagattaaaagataggagggaaaaaaaattaatgtcacgatatcagataccaaatcattgcataaattaagtattgactccctgtaggaatgactacctgttatgctagatgtgagcacattttttttttggttcttccaagtaataatgtgatcttgtcattctctatttaaatttaaaatctactttaatcgttgcagtctgcagttcttggtgagattttgggttcaggcaaagcaacaccaaagttacttcagatgtatgctccttttgccgtttttgctgtcattgccattctacgtggactttgctcatgctctgggcgcactactgctggttcatcccttgggccttctgcccggaagaagagggtctagatcaggtttgtcctccccacatatcacaattatttagtattctattcccgcatatgtttggaaaagctagatgatattagtacaagattggtgcaggaagcattgtttgcttatctattgctagcccttattttgcttcttttgcccttttgaccctgtcctgcacaatatgatatagtttttatctatttgacagattaattcaactatttatttagggattgagagttctggcatataagtttgacacagtgtttcattgtcagtttgtttctgaaaacctatcctaaccaattctggaccaagtggctaggttgatccctcctataactccactctgtactgttggcctatccacattttccatactgacaattagtaagtagcatgtttgttcggggttttatgaggccatataacattatgttgcaggatgcaaatctacaaaacctggccacctgggttatatacggcacaagccataaaatctggcattttttcagcagcaaccataagctgtagatttctctcaaatgtaatcttattattcatatttcatactacgtcaaagcactctaattgcccctgggctactttacagtgcagtttcatagatgtcgtgtctataaatttacagctacacagcagaaagactatacctgaacctagagaggaagacagagggttgtagttctatgtcttgttgactaccttgtaaaatagatccacaagagttactaaaatgaaatgtttggttatatataccactagtactctgcaaaactgcagatactaaatatgctcaaaatatgtgagttatgtccagtttaaacctcaacagcagtgtcatagccaaaagaacacatagccttctctctacactacataatcaaatactgcaatatgcagtatccattacttttgatgccatcatgttcttgtattgtttttccttgatctgttcttttaaaagtttgccctcatcattgcagggacacttggagaattttttggtttcagacagagtgtcgccaagattttgtgaggatcaggttcccatccccggtattttagcatatatgttgaaaagccagataatattagtggcaatttctctaggatgtgtttgattccctgaaatgtgatatttatgttgcttttattttcttccccccttagattatgttttgctaactaagacattgttttgtttacttgatgagctgattcaactctggcattgtttcataaatccttgttctttgtggtcctaattacagaaaattctatgttttatggcattgacacattttttttaagataaaggcagctttatttcgagacgaaatataatcgcgtgtttgctgccattttgttcagaaaacccatccttaccaacccaatccttgatgcgctctatagccgtgcttcatttttcatgtcatatttcaatgatttacttttaggcatacttgtcgagataagcactactacagaggaaggtgtggatccataacttcattgatgttgtgcatatcatgagtggaccctgagtccgtgactgctgaattctatagtgatttcttccgcgacctgctgaaactgaaccagataggcaggcatcctgtaataagtggaggatattggtcgtcgaaagagatttggatgcattaattgtctattctagaggttctagttatattgcttgtttgactaaccaaatactagtggtcgatgatttatggttttgcgtgataatttaaggaacagtgactgggatatgaatataagatttcgtac

SEQ ID NO: 4085 - DNA, 5926 bp, Sorghum bicolor
ttatgtaaattttcatcaagataatacatgtattagctctttgttgcatctgccagcacatcaatgcaaaaaaaactgaatgtctcattgattgtgttttcattatatattttgttctacatacatcagtgcatttcttatgattgtgttttcattgtatggccagtctgcattcaacaagaagccgtcagcatccactccaccacctgccttctatcacggtcactgtctactgcacggtatgctcctccattccccatccttgtagctattgcttttctctctgcacatttttgtagttctggattttttgacacaccttctaaattgaaatgccacaaaaaaaatctggaattcatgtgtgttttttgttgatcatactgagagaagcggcgatctatatggtttgatgtcttcttttcgggcaactgtgcagcccttactcccttagtggaactaggctcatgtagatctgttctgaaatcttgctgaatttcgaagtgctttaaggttgtcgtacagtggacaaagttaaggcaattaagttctgctggattcttaggagttcggatgatcttatgaccggttctttatcggttgtagttctggcaaggaaaaaaccactgttgtgttatgatatgcccaattggtaaatgctggttgacaaagaatgcagagtaactgtagaagtctgcttctgtacactcaagaccgaaaatttgctgatttgatgttacctttatattaaaacactactttatacatattctgtttgcagcacaatatctgtttgtactacttgttgtttctgctgtctttcccatttacataatctgaagtaatggagcatctattaaagagatgttatttggcaaacaagaatggatatgatatttcatttccctaatattttggggtttcccttgtaaatttcatcatagtcaagaatacgtatcacttgtcagtttgtatgtctcagtgcatcagtgcaaatgtgcaataaaggtcacattagtccaactatctacatttgttgaattcattctttcatatatctgcatcttttgttattaaatcttcaaattgattgcttgagttggtgttccaaatttccatctgcaattgctgagatgttaagagggcaaaagcatattgttaccagtgattctgcaaagcattcaagatctgttcttaacatactttaggtgttctgttataggattatgtatgaagatagaacgttagaatactggaactacatgatttcagatgaaatgtaacaaggcagggaaatatgaatatgcatacgcttatgttctgttttcataaaagaggcttggcaaagcagtaggttcaagaggggacttaaatctcatggctagttgttattttcaggaaacaagtaagaagggatgtgcaacgagagtttatattccacaattatctcatgtgttattgtgttgagagctgttaaaatatgaaagaataatacaaagacaaaacataggtctataaaggatcaagtctcatcaattctcattccactagatagtgaaatgaagataaataaaaagaaattggaaaaaaattcaacagaataggactttacatggcaaaggcaggagctagaactgacataatccattctctttttgttcaataaacaaatcacaatattagtagaaacaatcaacatttttctgctgtgttttattgatattctccttattatttaccaaagtatagggttttattctctagaggaaaggcttagtatttaatttgcaatgctatttttaaaattatatatttgtactctttcatacccacttgatatgttctgaagtgctaatatatcacacttgtatgaatattccaattctatgacctaactgatctcttattgcttatgcaggatcttgatgaagacaaatgatatactttgctgttagaatactccacaagattaataaccaatccctctttggcagttcatcagaatggagtgcaacaaggaggaagcttcaagagctaaggatttagctgtggtaaagctgcaagaagcagactatgctggtgctaaaaggattgccctcaaggctcaaaagcttttccctggccttgaaaatatttctcagctgttaactgtctgtgaagttcacatctgtgctgctgttaagatcaatggggagactgactggtatggtatccttcaagtagaaacaactgcagatgacatgttactcaagaaacaataccgcaaacttgctctcttactccatcctgataagaacaagtttgtgggtgctgaagctgcctttaagctaattggagaagctcacatgatactgacagataaagtaaaccgttcgcgtcatgactcaaaaaggaactcatttattccaaaatctgcaccaaagaagcgtggacgaccatcaaacaaaactgactatgttgctaagagggccaataaggagaacactgatgctggacattcaactttctggaccatttgcttgacttgtggaaccaaataccagtatccatatagtttgttgatgaaagttctctggtgccagatctgctcaaagggtttccttgcttatgatttgtctaagaaaccttctgtcggagtggaagcatcaaatccatggagtggatttcggatgcaacaccaaatgttccccccaaatcaatggacacactttgccaaccaacaacacaattaccagagtgtccctactcagcaaaatcctatcactggtcatcaagctcctgtccccaaccagcaacaacctcagaatgtctctggtcagcaaactccagacattaaccagcaacaacgatcacagaaattccctttcagttcagagccaaagaatgtggtaaactctcatccacggggtggatctggtatgcaacaggaaatgtgtcctccgaatgaacccacacatgtatctgaccaaaaactctactatcaaagggcccctggtcagcaaaaccctgtcaatggtaatcaaactcctgtcactgaccatcaacagcaatctctgaaagttggggataagaatacttctgtcactacccagcaacaatctaccaaaccccctttcagttcaggatcaaagaatgtagtgagttctcaaggggcagattttctgaacaataatgcaactgcaaatagtaaccttacagctgaagctggggcttgtagtagagaaaagattacaaaaaaaccatcattcagtgttgaaaatggtgaagatagaactaaatcaccagctgagagttctgataaagttcatctagtaaatgagcaaatgaaaggaaatgaggtagctacaggatccagtcatgccataaatggtagccaggttgctacgaaagatgttcttactgccacaagtgcagataaaacactcgggcagcatccttgtacagcaaggcagcagagaaataatgtaattgttgaagatgggtctgatgggtgtggaaaggttagtgatcatcttcctgattctcctggaaagaaaaggataagaaaagaacattcttcctatactggtggcaaaagtgaccatacaacagaaaatgaagttgctgaagcaaacagccaacacaaatatagtattccaagcaaagagaagatgacaaatcaaaaagaagaaatgatcagtggcttaaatgacaatgtgttgcaaggaacaaaaagaaaacaacaatctacaagttctggaattggaagcgatgctgctgctagatctgtgaacaatagttgtcccagcaacgctacagtttcatgtccagattcagacttctacgactttgagaaaaacagggatgcagatcgattcacagttgatcagatatgggcaatttatgatgatcttgatggcatgccaagatactatgctcgaattaagcaggtttactctccaaactttatgttgcagtacacatggctagagcatgatcctttgtgtgatgctgagaaggaatggtcttctaaggagctgcctgttgcttgtggaaatttcagacttggaaccacactcttgactgaagatatcaagatgttttctcatgttgtttcttggacaaaaggaaggaagaggaacagatatgagatttatcctaagaaaggtgaagtttgggcacttttcaggggatgggacatcaagtggagttcagattccgatgatcataggcattatgattatgatattgttgaaatcacctcagactttgctacgggtttaggcacttatgtggttcccttggtaaagattaaaggttttgtcagcttatttgttcgatcaagcatcgaagcaccatttctgatacctagtggcaacacccttagtttctcgcacagcatcccttttcacaggttggcagaaactgagaggaaacacatcccaaatggtgctcttgagctggatactgcatcactaccttctgatttggacaaagcgtttactcctgtgaaccttgacagcagttttatgagcaccggagatggtaacactacatgtaacgtttcatctactagatcttgtaaagtgccagttggaaagaccgaacagagtcaggatggtactggtacagatgtgaaggatgaagttgagaaattgaatcagaatacaaagattgaacaagataatggctcagaggcttcagtgattgatcattgtggtgatgggtggaatgatagctctccaccagaatcaccgactagcttttgttaccctgatacagagttttgcaacttcactagtttcagatcatttgacaaattcaagaaagggcaagtttgggcactgtattgtgatactgacaagttcccaaagtactatggtttaataaagagcgtcgattcagaagactgcagaattcgcataaagtggcttgagcactgtccatgtgaacaagtggagaagcgcttggcacaagacggtttgtctattggctgtggaatatttgaagtcagcaggcaaagtgaaatctatgattgtacagaagtcttctctcacaatatggaggtgatgctgacgggtaaagggaaaaaatatgaaatccttccttgtactggccaggtatgggctatatacaaggactggagcagtgcatggagctttgaagattacagtagatgtgaatattttctggtcgaggtcatggagatttctaatgttaatataacagtgtcctgtcttacaaaagtggatggctttagcacagtattcatgccagagcagaaaggtgaatccaggagttccatgagaatagcaaggagtgacttgattatgttttctcatcaggttcctgccttccgcttgacaaatgaaaatgactatctttgtggttactgggaacttgatcctgcatcactaccagaagttttactggtcagaaaaaccaagtgaaacattggcgatttgatagaggattttggcactatgaaaagtcaaggtatgtttttgacaatgtattgtaaatttgaatagagcagtttagcatgattgaacacatggcacttcttcagctattgttaactattcatttgttttctctgcagcatgctgttgacaaagctgtggtactggattgcttattttggttgttaactgtaccttgtgttatgtaaacaggctaattcattagtttgctacctgatgccactatgttaaccttttgctggctgggtatcgctttttgtttcatctcacctgtttgtctttgttattacatccattgtgcacattttggtggctataccagttgattgcgctgctattgtacgcaccttagcagtgcttgcacactagcatttgaatttcgaaactttaacagcttcagcatgtatatgctatgctccatctcatatctggaaactgagatgggtgtatggaaatgactcgtccag

SEQ ID NO: 4086 - DNA, 9244 bp, Sorghum bicolor
acaatcagacctttaaagtctggttgttctagccaccactttctcaaatctaaacaaactaggttttttaagtctttgtgagcccgaaatttaaaagaagaggcacatggtcactagcagcactggccttaatagacacaaaagctaaaggatatttgctcaaaagtagtggtgtagaagatttcatcaacaacagccattggattttcttgatcgttggtccaaatatttagtcttgttcacttgtctgaaaagtcatagtaagtattgttcactgatttattgtaagagaaaaataatattaaatgactgacagatttaacagataaattcaaacggacagactctagcagaatttttaagttctataaatcagtccacttttggttgatcacaccattatttttctctctagcatttgtcactagattaaaacctcccccaataattgtaggaccttcccagttatctaggaggccctcaagttcttgcaagaaatctgtttttcctccttgtaagggacccatctgcaacaatttcagataaagttgtcaacacagttttaaaatacactggccacactaaaaaaatctcatttaccaataaagcacttcaaatttgtactgttacctcccaacaaagatgctcccagcagtacctacagcaggtaaagcttgccaaacaaagtcatcagaaattattgagactctaaatgattttaatttaaaaacttttcaactataaagttgtaaatcacactgctggctacaattttgatataaaatatatctttatttgagttcatatgaaaaaatatgagttattttttcatataaagtttttagattcacccggtttttgatccagatgagtcttaaaaataagtttagaaatcgggacgacacaactgaacaagtttgagaacctatatgagagatttaaaagtttaaggagcagaatgacacaattgaacaagtttaagtatctaaataatcgttttgcgagtttaaggattggaatggcacacccaaataaatttagagaaatttagaaactggtgatggattttaggccttgtttagtttccaaaaattttgcaaaatttttcagatttcccgtcacatcgaatctttagacgtatgcatgaagtattaaatatagatgaaaataaaaactaattacacaatttggtcggaattatcgagacgaattttttgagcctagttagtccataattagacaatatttgtcaaatacaaacgaaagtactactatttatattttgcaaaaaattttagaagtaaacaaggccttatttttattgaaaccatcccctccgctcacagtcatcagaaagagaggaaagaaccgccaaaaaaaaaaaataaatctcgtaccccagggcccgtcccaacacatgtccggcgtcgtttccccgtgtcctccacaacacgccgctctcggtgggctgcctgccgctagccgacgccgacgccgacgccgacgtggccctccggcccctccccgctttcagaaccaacggctcacgctcccccgcgcccctgccgcgcacggggaagaccacgaattctaggcgcttttccgctgctggggcccggagacgaaccgacggccctcgtgccgcctgcccgccccgaggccggcccccacctgctgcctccttcacatcgcatcgcgccttttgcctcggcatattcgcccgcagccgcgcgccggtgccggtacgctggtggtgaggcgcccgcggcccgccccatgtcaccaccatgtgtggtgggctggtggcggtggtggccgtgctgctggtgcgggccgcgccggtgcagccatcgtgtggcgcccgtgcgctagccactacgcgctcgccgcctgtcacacgcgcgatatttttcctggccctcggcgcgctgccgctgctgcgtcgccgcctctgcttttcctcctctacttgagtgcggagtgcgcctccccgcttctgcagtctgcagttctgcactcccccgagccagcaccacccagccgcttcgccttcctccgcggtcgcaggggcagcgcggagcactagcagccgcgaggtacctggccggcattcgcattgcatttgagatcctttcctgtttcctcctcctgctcttcttctctgccccttccatttcagaatgcacctgagattccaggaacgggggcaataggaactgcggaggggggctatgagttctgggattgtttcttttgtccactgtaaagttgccttgttgtgttgttttactttacaatgttagttcggatttgggaagagtgtgatgtgcgtgtgcactgaggtttgctaagcttattgcttattgtttcacaatgcgctaaatcaagctcattcctatccatcccgtgcatcctgctcctgcacgctcctggggtcagctcttccacaaacgtgttgtgttgctaaaaatttcctgagaggcacttgtgatcagtaagtgtgtttgatatgatgtttttgtgtcagggcaccatttcttacatgaatcatttaatctcagtcctacatgccgtcacatgcacactcttctgatggcaggatctgccttctgatcaaatctagcacaccttttgaatatgccaatactattgtgatccaaagtacagggggttatataataacttactgactcacaatacttttcatattctcatactctcaaatccacctgtgaccacagtagaccacatatattctcagatcctttaatgttcaacaaacattgataagtaagttatatatagatttacaaaataatagttatttaattaatcaaatcccatatccagtttatgatcttgtgttagatggagtggatagggcgggattcccctagtgcaagttttacaagagttcatctgggtggaaatacacttattattagcactttgcttttccatgttcgaatcttcatactttgcatgccactctccttcgtgacttgggtactgagagcaaccacaatgttgctcaaaagcaatccatacggactaaaataatccccaccagctagctgaaacactttgatcagtccatagtaaaagatacccataagcttatagatgacccatagaaaataaaaatgttattttttcttactcctccccctccttgtaagttgatggattggagatgggaattttttatcttaggtgggacccacattgcggagtacttagtccatatatattttgtgaaaataatagcaactatggactggtcatgtaggttccatgcacataaagagatggttcccaataaaaagaagagaatgtcagggccaactggggccactattttctttatcatcaacatggcagtaggttgctaggacagtgacatctgcagtcgtgataattgtggattttccatgtttgaactaaaatactgtggaattgtggattttccacgtttgaactaaaatactgtggaattttgttgcttctgggtaatagaatttgattaccccgttctggaaaaaaattggatttctatgttttgttagacccctagtaagttgcattggttagaccctatatcaccctattattttttttaaagtctcaccagtcaattgtaaacaatttttaaaaatcattcatattactgaaacaaggaaacttctttcaaaaaaataaagtaaaataaaaaataaacaaggaaaactagttttgttgatattttggtgtaaaagggctctttcggtctttccccttttctttactatgtctgagtaaaaatggctgatctgggtaactgagctcctttagtagggtgcatggtcagaaacctcactatgtttttgcatagatttagaatctcgggtaactatgtgcaactcagcattagaaaaaatggcattcccttgaatggtgtctctggttaaacttgaggccccttttcaggttatgaggctgctatgctgtcccatgaattgcttcagcatcttaagtttgaggattctagcattgtcaaaaaaaaaaaaagtttgaggattctcatccttcaagcacttgaaacctcaaaatgttatacttggatctagtctcatgaacatttgctctagatcaacataatatgtaccttctttttttgtgtgccgctctcctttgagaatgagaatatctgcttaggcaatgtggttttcatttttctctgaaccaggataacatgaaaaacttcaaagttttcatttggcatttgacaggtcatcattgaatggctgcaatgatgggttcaatatctgcctatggttcttaccaaacaaataggcccagtgcactaaagcaggcacctcacatgcagttccaacaatgttgtagcagtggagttgggttcttaagcaagcactcacaatccatgcgaagtaagacacagctggctaaaagaagagctacaaataatggaattcatccaaagactactaggccccgggcacctattgtctgttctactggaatggctataatttttgttgcaactgaagtgcacccatggtgcaaaactggtggcctcggtgatgttgtaggaggactgcccccagctttggctgtaagtattcttgcaacacattactattttcaataaccacaagtttaaaagcttgagtccatttcgcaaaccagttgttcataaccaaattcttaggtaattaggtccaattgagaaaatctgatcattgaacactagcaggaaataactcagacatagtttctgcatactataatgatgcttaatatatttgttctcttttgagattgtattgcatagacatttctgtgtaaaataatgttttacatcatgtatatatatcactttttataggctatgggacaccgtgtcatgacaatagctcctcgttatgatcaatacaaggatgcatgggatacaagtgtccttgttgaggtatacatttttgtttctctgtattgctatgtagcttgcatctaacttgaagctgcttaatgatatttatatgaagaaactgaactatgtttcacttccacaggtaaatattggtgacacagtagaaactgttcgattcttccactgctacaaaagaggagtcgatcgtgtttttgttgatcatcctatgtttcttgaaaaggtctgttgaattgcattgctgcattgcttgcttactgaataacctaagcagcggtggtgacctttcaatgttgcttttgaatcatatactccaggtatggggcaagactggagcaaaattgtatggtcctactactggaactgactatcgagataaccagttgaggttctgtcttttgtgccttgtaagtaatccaatttattcatgtttacatatgcttagcaaacccatgcattctctttcctaatttaaggtatactttagtttttttagtaatccctggcgactcttgatctcttggactcctagaagcccttattggtgtagaatctcattgtaaaattataacttctcctttttacaaaatacatggatgatgcaactttccaagcaaaagttgttggatgggatttctatatttgttacagaaaagactgtcacttaatgtcttctgctacaaccattgcagctaaagtgaagcaactaaaacaccgaagattgtgtgatgtgccattttcaccttgtcatataagcattgttgccacactgaaaattgcccatttgccccaataactcttgtcatcaacacaccccaccccaccacactgcacagtccccactccccattttcactattttcacataaactagcatgagcagcctaataaatatatttttttttactttactttagcaactgcaagttttattattgttgatggtaaatttacttttggtttagttgagcaaaacaatgttgttgtctgactgcttctgttccatgttatccttagcagcaagtgtgactatgcctgtggcatttgctttttctgataatgctacatcttattgaccatttggttttctaatcctattcatagcataactttcctgtactgcaccatctaggtatctactaagagaatctaacggtctaaccgctaatgttagatcaaatggcttattaaacatgacaagttttttaggcagggcaaatactgtttcaaaatgaaatcagtaaagttgggcaaggtaatgtgtccctgagttttctaggcttttgcggtcacattgtgagttaggttggtcttgggtctcatattcttaggagtcaaggatgaaatagtacgaaggaaaaaaaaatctgtctactcattgtccttatcaacttttcaagttcatgccatagtattgatgcagcctaggtgcgggaatatgggttgaagtattaatagtagtgcccacatgtcttccatttggcttatacttttgattgctttggtcggtgcagaagctcagtacactgcaatccaacctctctgttttatatcattttattgtttttcttctaacccagttatccctttaggctgcattggaggctccaagagttctcaatctcaacagtgaacatttctccggaccatatggtaggtctgtctattatacgaactaacatgaccacactcttacttactaacatttgtttgtttttttcttgtaatcaggggaagatgttgtctttgtagcgaatgattggcacactgctgttctgccatgctatctgaagagcatgtataagccaaatggaatttatgctaatgctaaggtatcccatttcctttttgtttttcaatttttaagcaatcttgtggactaaatttgtgaggagcagaaaatgatcattcttagttttcatgattcgcttatttttatttctggactgtgatcttgtaggttgctttctgcattcataatattgcctatcaaggtagatttgccagagcagacttcgaacttcttaatctacctgacagtttcttgccatcatttgattttattgatgggtaaggccttcatgttctgttgcttcattatatctgtgttcttctagcttctttgacatagaattcaaatgtgtgcagatatgttaagcctgttgtagggagaaagattaactggatgaaggcagggatcattgagagtgatctggttctaacagttagtccacattatgtaaaagaactcacttctggcccagaaaaaggtgttgagttggatggtgtccttcgcacaaagcctcttgaaactggaattgtaaatggcatggatgtttatgaatgggatcctgcaactgataagcacatcagtgtgaaatatgatgcaacaacggtaaggtctattatcacatcatccattcttacctcatatggagatttctctacataatgaaataacatgtcaggcacctgaagcaagacctctcaataaagaaagattgcaagctgaagttggattgcctgtggactcgagcatccccgttataatttttgttggccgtcttgaagaacagaaaggatctgacatactcattgcagccattccagaatttgtgggcgagaatgttcagataattgttcttgtatgtttcaatttaaaagtgatttcttattctttcacatgacagttccacctgatgattgctaagggggaaaaaacttttgctcttcagggcacaggaaagaagaagatggaggaggaattgacgcagctggaagtgaaatatccaaacaatgctagaggcatagcgaaattcaatgttccattggcacatatgatgtttgctggcgcggacttcattattgtcccaagtaggtttgagccctgtggtctcattcagttgcaagggatgagatatggagtggtaagagtttctaacttgctttgttacaatacaagtattattaaagttaagtattagcagccagtttttgttatcattttacatcttgattccctgtaaaatgttagaaaatacaacatatttatgtagataaagtgcaacaaaaatgaccatcagtagtgcaaatatttttctagatccccatctgttcatcaactggaggacttgttgacacggttaaggagggtgtcaccggattccacatgggttctttcagtgtcgaggtaaagaataatgggcaaccactgattcattgctctcaggcttaataaatagcctttggttatttatttattttttctatcttgtagtgtgaaactgtagacccagctgatgtcacagcagtagcgtcaactgtcacacgagccctgaaacagtatgacacctcggcattccatgagatggtgcagaactgcatggcgcaagacctgtcctggaaggtaggcacatatgccaagttttccgtttattattgacatgcagctactatttgtcaagataagtataacacctctcatctatctctggtccagggacctgcaaagaagtgggaggaagtgcttcttggcctcggagtcgagggaagtcaggctggcatcgatggcgaggagattgctccacttgccaaggaaaacgtagctactccctgaggtttggtgcctcggaaatatgtgttgatgataggaagcatcttctaggatcctgacctggtggctggcgagatgttgagtcagacaccggcaaaaccaccagtttcgcctctactacttcatttgtaatataatccttgacgttctaaaaatgccatgcccctggtttaattttatccatgcacatcgttagctgggatgttcggaaatacttcccgctttccttggatccatgcacaacgttagctacgatgtaaatggctaatgtcagaaggccactcgaatggtcctgttgacgttggattgtgatccaaatcacataccaacaagagctagcatgcctggggttgcaaacaacctgatacacgcagcaaagaactcttgggattgactaaactgatctagagataggttaggccgatctagagtccgtccaacgctgcaaaagcctaagaatgcctcccgggaggacccgtcaaggaggagcacacctagggttgttctaggaccagcaaggccgtctagaatgccaatgaatcttgcggagggatgcaacgaacagctgagggttggaaaagggaaaactaggtagtagatgtatttttttaatgattggatagatgagaactcaatcgactatgctcctctcatatatatagagggggaccggttttatcctagta

SEQ ID NO: 4087 - DNA, 3577 bp, Sorghum bicolor
cacttcattgcattatttagggtacatttagctgcagtaagcatgttaaatacatgtacatttgactcattttgttatatatttttgtttaaataaaaatatttaaaccgctttaatttagcctacaaacttccagcatacatctctgagctagagctgtggtatatgggccctaattctttgttttactagcttttgttacgggcttggaatttatatttgatctaaggttagagtcgtctgtcactgagattattttcttttttcacacgtccaaattcacactattctgatgttatccttttccattagatttcgtttttttttctgtttttacgctgttcaagccaccgttcaaattttttttctgatttatatttttcatgccatttctgccaccgtttttttcttgtccctttcatttactgatgtttccattttctaagggtttttatgggcctttgaatccttaacattcctagaaaacaaaggttccccatttccatttcccacgccaccatatattgtaattcttattagaaataaaaaattgttataatggaatctaattaagttgatagtcaaacaaatgaaaaaataagaactaagatcttgaggagtttgttgtccagtcaaaataaatctcccactgcacttgtgcaatcatcaatgaaaagcgactacgtgcaaaaatgagaaaggtctcccattataatctttagtttagtggaaagaccaatcccatgtggacaaataatttcttaacatgaccagagattacaattatggatttttaatatttaattaccccaacatatgtataccgtgaaaaattaagttagtgtgatatatttaagagaaaatatgtctgtgtttttcaatttgatggatttaataggttgccaacattaaactcacaaaactaatgcatatatacactaattaataaattatatctattaaatttcataggaagggaatagatgtgtagcattcaacgtttatgttttctatgaacgtttttcgacaacttttctttatcatccgtttgcaacacacaaatatgttgtcatttctcctctgttcccaagttttcaagataaaagtgagatagaatatctggtacagatgctctttaacaaattatacctcttgaatttcataaaaaggagaaaaatagatatgtacattctccatttctgctttctatgaatgtttgataatttttatttcaactgttgcaagatacggacacacttgctagttaaagacttaggtaccttcgtctgagcttaggccttgttcagttgagaaaaaattttggttttggctactgtagcactttcgtttgtttgtgataaatattgtccaatcatggactaactagactcaaaagattcagctcgtaaattacaggtaaattgtgtaatcagtatttggttttgtctacatttaatactccatgcaggtgccacaagattcgatgtgacggagaatcttaaatttttttggaaactaaacaaggcctaatatttgtcgaatctgccagccatttcgcagtgtttttcttctctcacaataaatcaacaatcaatattttctgccaaacggacatgctcttattggcttgtcctcagcatgtaccatattttctttttcttttgaaggataacatcgtatatttaaaatgaagagatataataataataattacacaaatgtcaaccggcaactgtatctgtcatgcatggctattggtatatcctccccaccatgataacccgagcagcaaaagatacttttgtgatggctatatcccaccatgacgagcatgtcataccgccgtgttgtggcagtggcaccgagaaccccgaatccatcccacggataagatatgccaggtggcgtgaggccagtggcgggaatcgcccgtggcgccctgccgcgccggctggggataatccggggcatgcaatttgaggccattacaccaccgggcctttggctcgtactacaccacctcaccctcactctctcttccccggccatccgcgccagacgaactcagcacccgcgcgcagcaaggagagtccacacgcccatggccagcaccaacatggcgtcggccacctcgcggttcatgctggccgctggcgtgcccaccgccggcagcggcagcggcagcagcggccgcgtcagcttcgcgccggcgcccaaccagctgggcaggaggctcgtggtccgggctgacccggaagctccggctgaaccggcggaaggggagggcgccgtggccaccaagcccaaggccgagaagccgccgccgatcgggcccaagaggggcaccaaggttcatagccacgccgccgatttttgatttgatttggtctctgatacgattattcttgcgtatgccaatgatcgatcggttgccacatccaggtgaagatcctgaggagggagtcctactggtacaacgggatcggcaacgtcgtcaccgtcgatcaggttaactaccagctcactctccgctagctagagcatatacacacagctatagctgtagtatatactgaaaaggatttatttgttaatttgttggaacatggcaatgccacatatagctagagaatcatactgttagggttatcatatatgtatacaggaccccaacactcgctacccggtggtggtgcggttcaacaaggtgaactacgccggcgtgtccaccaacaactacgccttggacgaggtccaggaggtgaatgaacaaaagtgaggccggctcaaggggctccccggcccgcgcgcgctagctagctcccgtgtgatgatttgtagttgtgaaatgaggctgtgaagctgcatgctgtgctagctagcgtcacaaacatcgatcttatgtgtaatagcttaatctccataatcatcatgtaattgcttgcttcattcaccgtggactcaataatctctcttgctctaaaattatattgctgtattctttttttttgttcttgtgattttgtatgcatgcacataaatctctctctggcaccatatatatttgtggctctgctaaaaactcacttgtgcagtcatatgctagctatttaattatatataccggagttcatacagcatatatagcagatcaattatttgcaactgtagcaatatgacaaacagatgggggaaaagatttctcaaccttggtacaacatggggaacagtttagtatattagaggacataacatgcataacatggggaatagctttaacagtttagttacgaattgaacaaaatcagcatccccaaataacttcacatgtccagttctatatatatatatatatcgtctgagtttgttttcaaatgttgtcaaacaattaacatacatggattttgggagcgttcaaagcttattatttctcgtgtttcttcaagagtagtctatgtcgtctaccactcaaaggaatcaaaactgttcattacgagactgatcgatgtcttcacacatgtgcactgtcccaaattccacatatattatgccttcgatcagttaaggacttcgtacc

SEQ ID NO: 4088 - DNA, 7572 bp, Sorghum bicolor
aaataaacgaaagggttgtccatatcttgatagcgatgaaaatattggaattccaagtgactgtaccataatagaaaacccaaagatgtctgatcaagcatctacgaaaaagagaaaacattctaaggaaatcgaatgctcagtggttcaaacggacacccaacatttacagacacacaacatatcttcacaagtagatgtcctccaagaagatgatgagttttgggcatttgaggtcatgaaagatatgccaatgagtaaggaagagatgactgagttactatgtgattatgtcatggcaattcaggatgaagcgattttaaagtaagctacttgcttattttaattacttcatttactaatgatacatatatgaaggaaataatcatctatgtctaatgctttgtaggaagccttgggttaaaggttttcatccctctatgattgctctaagtgtccaggatctgcaagagttgttaatgaacaatcgagacatccctgagaactgtttcgaaataggagttcgttttcaggcggctcgagagtataatatcatgaaaaattataataatattatgaagcattacatagacttaagattttgtgtaagtatatttttgcatggagtctaacttcaaaaggataaattaggtgatatattatattgtcttaattgtttcgagtcatactaatactgactctcgttatcctttgctttcagagaatgtgtgctttaacaaagatgtcagaatatcgtaaaaaatacaaaacaacagaaatggctgctgcgattggtatatgtgaggatatgaagtacaacttagcacaatgcagatacgtaagtcttttgctcaacattttattgattgttccctataaactattctaatcgtaccgtgtttgtagtttcttttagcgtggctatcctttcgaaaatatatgctttatgttttcgatatgcgggaaaaaatgctcatcatgattgaccctagacctcttgaagagtggtgtaaagacacaccagcgcttatgtatgccaaatacactcttggatttagctacaactacacggccgcagttaataaacatattcctggatggaatgaggatgttttcaaatgaaaatttaaacgggcagaaaacattgcagaggacatagatgggtaaataactcatcggttacgataacaaatacatatggtttaactatttctatatattgctgatcgtgaatcttgatacaggtacttaagtggatttctcgtcctacagtatatgtctgcatggaatagaccacaagccacacacatttataccgtgagtataacagtttgtctcagtttttatacaagttttttttataaaaacgtagtattatccatgcgacacacaataatatatatatacatatactcaaatgtgtgacaggatggtatggagatgcggcgaaacttatttgtgtatttactagcacacgaaagaaatggatatcgaagatttcttcctgccgatattaaacattatcttggtcgtatcaccgaaaggtctataaagtagaatttgtgaacttataacatcatgctctccgtgactatgtttgagtttagaaactttgcttctttaagataaatatcactttatagctggtatttaagttttattataatattattattttattgtgcgatacgtgtatttttaataaaaaatgttagctatcccgtagcaacgcacgggcacactacctagttaaaaaaaaaaattaagcacgaatcctggcgcggcgcgtgctttccttggtttggtcaaaccacaagagacgtgtacgctaccagcctaccgcatccgattcgcacccatccctgatcccccgccccacgcgaccccgcttacaacggacgcccctccactttcccctttcccttcgcgcgttttcccctcccttcgcgacctcttcctgacgtttccccgattcctccgcgctaagccgagcaacagcgatggcgacggagtgcgctgccgccgcggccgatctggccaccggccgtccccgcaagcgggcgaggtttggctgggacgtggcgccagctgccgaggtaaacgcccctcaccgactctctgctctccgatgtgctgtaattcaggatacggttcgcaggcgattccgcataaaactatcacctagtacgttagctatgtgttattatgattcacggatacatggatcttgtaggtctaggtcgtttatgtgttgtgttagagcccagatctacagaaattttatagtggtcttgcaaaactagtttgccaatgatctcgatggtgctgctaaattcttttaggatgattaatctgaccagatttatatctgacctagagcatgcttagttttttttttcgagagcatgcctagagctgcatatagtttgttttggcatactggcaaatttcccagaaaaaaaatactggcaaatttgggctcagtacatattagattttcactcctttgaagttatgctttaattcatggaaaaatatcttgtcctgaattagtagcataaaaatatatgctttctaccttaaatgggaacaatgtttcacataattcaacaatgccttctgttgcaattgttattatgcttgatctacatgattatggtctaactggattttatcaatcagataagaaccacttgttagcatttatgaatagtaatacaagtagtacagcttaccaagtttgcatcttaatacaagtagtttgttagcatttatggatggaataaagggcagaatgtgcaatacgttctcttcagttacaactacatgctttcaagttcttagctataatctctcatgtattatgtctgtgataacttatgctattccttgttttattcacccctgtgttccctttttcttatgtggctctgttatctctgtgaccatcacacatggaagtatttgtctatattttttcttgcatgaaaaaacgatggatggatgtgtgtaggctcagataggaacattttgtgggcaagaagttggtgatgtggccagcctgctattatcagcaaatccttccgaccatacttgttcgtctctgctcccgaagggtgtggctcgaaatgcttcccctccctggagagaagacgacaaagatggccattacgtatttgctgttggagagaatttgacctctcgctgtaattacacttgactatcattgttggagtaatatctctgtgatatgtgatgttcattcatctaggagttacattccttttttcttgtactcatttaaaaagctgtgggtttctttgtattgttagcattttttttttcttttgaacggatatcgacattttaactttttcattatttttcaatcatgcctagtttcataccattttgggacatttcttatacactattgcattaagcaaatagcatttttaaaaatattttattacttgggtgctcttgttttatttagtgtttctaacttgtggctcaaggctttcattgttgtccatgttgacttatcttatagctctcaatgatgttatgtttcatcttgacataagatcctttttttttcctctttgtgatcggcttttgtattcctataaatgttctgaacttattgcacttgtgggaatggcaccattctaatatatcattttttatgttttttttttgcagacaagatatacagaaaaatgggtgaaggttagtatttctttgccatcacatactcatatgcaaaatacagactattcaattttagtttagtgagttcaagaacctgtgccattttttttctcggacacgcaggagagctgtgtatgattatattaagaagaaagaaaaaggggaacaacccaaacaaacaaaaactcacccactcacgctaccgattaactaaataagtgtgcctgtattctcggacacgcaggagacctgtgcggctgtaccattgaaggatcatgttatttttatgatgcaagtgactcaggaaaacttcctgtaatatttgatatctttttatttgtttaggtacttttggtcaagtactggaatgctgggaccgagaaagcaaagagatggtggctattaaaattgttcgctctgtaaagaaatacagtgatgcagcaatgatagagattgatgtcctgcagaagcttgcaagaaatgatgctgcaggaaaacagtaagttatacttttatttgtcctcattatgaaaacaaagaaataagttctgtgcattaaattgtgggctttcttaaaaactatgttgctgctgtaatggaggaaagttacatccttatgagtctttttgcagctgtgttcaaatacggaactggtttgactatcgtagccatatttgtattgtaagtataatggttgatttatagaattttccccaacctgtcatgtagacattggggtcgaatcaatcaataagtttcgatgaatgaacaggtctgcgagaagcttggcccaagcttatatgattttctgcagaaaaccggcttccgcccgttcccaattgatctagttcgccagatcggagtgcaacttttggaatctgttgcatgtgtgtagagacagtaccctgcaaactttgaatatgttgaattttcttttatttaagagtgttattttttttttgttttcctcatctgatgtcttgctcttctttgacttcaactgagtatttcatcaacatcaaaattttataacacatttggaatacaatggatagtgttttttcatatttttccttcctttatttagaaaaatattttcatatttttcaaatacttgtgtgctaatttgatattgttttctttgcctttttgaatcatcatcttttatgccagtatacttgtaacttggtttcactttttttttcctggtgtatcctgatatctgcctttatttccatgcagtcatgcatcgtctgcagctaattcatactgatctgaaaccagagaacatcctccttgtttcttcagattatgtcaagttacctgatcccaaggtacttttactctacatgattaagcgtaacttgtttacttgattcagtgtgatgtgccatctctacttttatagagctaaccctaacaaatgatgctaacaatcttgatctcatctgactgacaatccactgtctatcgcttagctaagaagcaaactaataaaccaactagcttgatctgatcaattgcatgcttttgctgattgtgtgctcggaccattatggctgtctctgctaaggcccagcccgtaacactcttcagttttatctcttgtttactgtaatttttcttgaactactgtctgcttcactagttatcttaactacgaattttcaatctaggatggatcattctcaaggaaactgccaaaatcaagtgccgttaagttgattgactttggaagcgcagcatatcatcaccaggatcgcagttacattgtatctaccaggcactatcgagcccctgaagttattttgggtatgaacttgactgtagctgctgcctaattgcacacgtccttttcattacttgtggagctcagtagcttaatatttgtgttgctgttgtaagggcatgggtggagctatccgtgtgatatctggagtgttggttgtatacttgttgagctttgctcggtacgtatttctctgttctctgattttggctgttgatatcgaaaaggtgcatgtctgattaaatcatttgcctcattttatagggtgagacactgttccagactcacgagaacttggaacaccttgcaatgatggagagagttctaggtcctcttccacggcacatgctggaaagagccgagtatggtttttgttacgtgttggcatttttgtacgtaatgctgcctttctgagactaattctagtcgtttgccttctgtaaactcagccagcatgcagagaagtacgtcagaagaggaagattgaactggccagaaggagcagcaacaaaagagagcattagagctgttctcaaactgcctcgccttcaggtaaatgtgacaaggctccttgatgcttggctgattggttcttcctccagtgttttcaattttctttctcaccttgctattacaaacaatggcagtaaggcactcaaatgtcccctccttggcttggtattactatcttctgaatttgtttatctgtcgctctaacagtgctcccttgtttctgatccagaacctggtgatgcagcatgtggatcactctgctggggacttcattgaccttctgaagcgcctcctagcctatgagccctcggcaaggttgactgctcaagaagcgttgagtcatgtcttctttaccagacacggcaaaaaccaatagccacgacatctcagatgatgctatggcacatttatctgacagagaactgacaaaatccagagacaattggtgagctctgaggatttagaggcaagagatacaggcatacagccttgtgctggtagacgtggtcgctttatatgttgtgactgactgatttgtaactgaacccattgtcctgcctccgcggttgtacctacatagattgtagcagatcacaaggagccggtctggtatatgtgtgtgtgtgtgtgtgtgtgtgtgtgtgaagattgcagttggataccaatgcaagtgtaatttaatcaactggtacaattttttctttgtaaagtgcaagttcgtacaacaccagtttcgttaagcaatgagcatatgcatcgcggacgaaatgaaatttgtttttgtgaatgttgctgatgcgttttggcacttttgcggagttcctgaagcatcagagtatataataaatatataccgaagaaagaaaatagaagacgaatattccgtttacttccaaagaaagaaagaaaacataggatgaagatttctagtttatcttgccattgtttctcctttctttcccgtcgccggcgacctcaccgacctgtccatagaaaatgaaaggagcagcacgcatcgagatggcgggtccggccaactcgccgccgtgccactagtcatctttccagaaggagtccaaacagagcagttcgtccttgtgttcagagaaagcccttgtttagttccaaatttttttgtaaaatatgaatattaacactttcgtttatatttgacaaatattgtccaattagagactaactaggctcaaaatattcgtctcgtcaattccgaccaaactgtgtaattagtttttattttcatttatatttaatactttatgcatacgtctaaagattcgatgtgacgaaaaatctgaaaaattttgtaaaatttttgggaaactaaacaaggcctttaattaattaaaaaaaatcgacgcgggcaactaatcaggtcagcccaccctgccgtgcccggctcgcgcccaatagaatacaccgacccggcgacgccgcaaggaggacaccctcccgtccacgcgacgaccgagggacacccaccccagcaccaccgccaaggcccaaagccggccaacccaattccgacgccatggccg

SEQ ID NO: 4089 - DNA, 5403 bp, Sorghum bicolor
aaattgtgatggctgcccaccggattggaaagagaactgctgcatctgggcaccgaaaccggtgggaggcaccacccactggcgtagcagttcggctcttccgttttccatccaatccagattcacgagctttctgcaaccaccagaatactggcttccttgacccatggaactaccaggcaagtggggcatgagagaaggccagacgccataccccctcacgtagttgctgaacaagaggacatggtggcagggacatggggggtgcttgcaagggggtgatgggcagcagattggtgagggagttgggcggaagtagctggggacgcaccttgttcacgggaaacggcaagggaaggcgggagaagggaaatgccaagcgggcgaacaaccggatggcgagcgatgtgggctgtccaggaatagagagcggaggggagggatggagagcaataagatttggatagtcacctggagaggctgttggagaacttttcttttcaaataatagctaaattagctttaggccttgtttagttcccaaaaaaatttacaaaatttttcagattctctgtcacatcgaatctttagacgtatgcatggagtattaaatataggcaaaaataaaaactaattgcacagtttggtcggaattgacgagacgaatcttttgagcctatttagtccataattggacaatatttgtcaaatacaaacaaaaatgctacagtatcgatttttcaaaaaattttgaaactaaacaaggccttacaaaatgttttagatcatctctcggagatgcttagatatgactttcttcacggtatagctactaacgcagaagacctcaaccttacatgctgataaaactcccgaactttggttttgttggcgatgagattttttaaactaatccaaattcattcccacaagaaattaaattcaaaacctgaaattgttactaaagcgcgtgcaactaactttttcgcactctttaagttgacgtctttgacatgtgccgaagataactcactcgaggaaatgtgtgctaaataggtgtctattttgaccatcgttttatttcctaattagatgatattatcaacttaattaataatgattggctgataaatagaaaatacttattgcaaaattagattttgtcttttagaatgcattatatttataaacgaattttgaatctagcatgaactatattatagggcttttgagtatatatacctagaatagatgaataaatacaaactgttagttccatcctttcattaggccttgtatacttgcaaaatattttataaaatgtgaataatatcaattttgtttgtttttgacaaatattgtccaatcatggactaactaggctcaaaagattcgtctcgtcaattccgaccaaactgtataattagtttttatttttatctatatttaatacttaatgcatacgtctaaaaattcgatgtgatggagaatctaaaaaaattttgcaatttttttttaaactaaacaaggcctaaccacttgcattttcatcacgatcttcacgaatttcaggcaattcattaactgttcacttcaagctctccacgtgtcataatcggaccagttggcttggctggtgctgattgatatgccacggcgtttgccattgccaatgcttttagtttctgaaggagaggacgtccgccttgcagttgcagcagcgactggtggtggtcggagacggccacacccgcagaaatgtcaccgccaccaatcctcctgctacaatccgcgccatttctttcttcgcttgcctcgcctgccgcgaaaaaaatatctccaccggctggacccacgtgtcatacactctaatgccgtgagggaggttccattcggaactccgaagctgtataaaataattagtcgatgcaaaaaataagaggagattgttcattttttttgcccccttttcagttgtcttggcctgttctttcccggtgatgggcgccggcctcctcctcggcgacgccgccagcctgggggcctaccacgccctacgccgccggaggacgcacctctaccgtcgcaactggggctccaagcccctgccgcgcccgccggtctggctcggcgcggccgctcgtgtttcacggaatcgcgacgaccgccgtggccacgtgcccaggttcgccgcctccgcctcgggcggccgtgacgagcccggggagctagccgaggacgaggcgcagaggaagagggagcgggaggcggagctgaatcgccgactgaaggaggccgaggagatggaggagttggagcgcaccgccgagcagctgcagagccaggccgccgccgaggcccccgaggagtcggaggaggagaagcgtgagcgtgtacgccgcgagctccagaaggtcctactactcttaacctttaatactagtacttagagcttgccatcgtaaagacactcactagtcactagttgtctactcctagttcactacacacgccaaacggcaacgagcatgcaaactgcctgtcttcctcaccaaacacaaatataccaatacgcgtgcaagcgattactactacccccaacaagttaacacgttctcggccatttgtgacgcacctacgaggttgtaattttagctgttcgcacaacagagtgagacaaaaaatcattttgttgcgtgagctttgcaggtggcgaaggagcaggcggaaaggagggagacggcgaagcaaatgtttgaattggggcaaagggcctacgggaaaggaatgtatggacgctcaattgaattcttggaggctgcactcactatcatacgtccctcctctctcctcggtggcgaggtaatatctctgtagttgagaatttgagaaaggatgaaaacggtcggaaatggtcgaaaacggaattacaatgtagaaaacgaaagcggtcggtacggaatattcctatattttagcaattaaagagtacaaaaaaagaataaaaatggttgtgaaaccaactgaaactgacaaaattttatgtttgacaaaattcgaaaacagtttcataatatagaaaacgatatcataatgtagaaaacgaaagcggtcggtacggaatatttccgttccgttttcatcctggattgagatttctgtagctttctcatctctggctgtatgccaattaactcttttcgagtttgttggaacttggaagggaaaacctatggctaagattctgtacgcatctttgtgatatagtgtgtacctttttccagatccaaatttggcttgcaatggcatatgaagccaataggaggcacaaggattgcattgcattgtacaaagagttggagagtacccaccctatgatcaacatcagacggcaggcagctgaacttagatacattttagaggcacccaagttgaagatatcaaacgacgaggtggtcacaataccacaaattgggagcagctgggattggtcagttatcaatctgagactctgctctttccattccccgtctccatgccatttggctatggaatttagtttctgtgtacgtgggcataaatttgttggtgccttataattgttctacccatatattgaagaagttcttcgtgttcactttgcttgaaggaactttgccggttgcgaaaagccagataaatataaagttgtagtcgcgtcaagtctgcaaacacttctttctattgaaattatgtatatttagctgtatctttttgcctgtatggtgcttgtgatctgcttgaaatctcacttgtatggtgttttattcctatatcattctctttttgactgaaggctgaatggtgaatccttcagcttgtaactaatgtctagttttctttcattgtttcttcaaacctgcatggctatggacaagtgttcaagacacatctttccatagagaagatatagctaccgggttatctttgttgacatcattctttagctactgtacatcctagaaccaataaccttttcttacccctgatttagctactatacatcattctttagctaccatacattattctttagctactatgcatcattctttagtacttgagttaaatgcttaaactagagataattaccaccattgtaaacagttgcaaagcatccccttccatggaagccttttctgttttgcatgctgctgcttcctatccccatgatttcatttcaagcaatgtagagtgatccacaatctcattcacatcttgcaatatcatgatatttgttatgtgaatcaggtatgctggaacatggagcgacaaaatcaaggaacaagaggacaagaaaagaaagatgattgctgctagcaaccaagttcaaccttctccaaacatctttggagacttctctttcttgcgactgccaagtgaatggaagaagagtgcatgggtgattgttactttgtgggtccttttgattggaacagcaatctatctgcaaacatgaacaactcctgcaactctgaaacatgccactcgcatctttgccaggcactgatccatggttcaaacccagagatgttgctaatatggccgtgcctcagactcctctaagacatgataggccctggtggattgcatttgttattttaggcgtgctatccaagaatgcatcgtatactcttccggactggcatgggccatttgtcatttgaagattttcttttgctgcaatgtaaatactaactattgtaactagcaatgcaagcagatgtcatctagttcaattgattagcagttcacctgtgtgctcgtatacacgataatattgcatctggagttgattttttattaccttggtaggagttgatacgtgctctgaatgaaagatataaagtgtgtcagacttgtcattactctgttttaaactttaatttaccccacaatccaaaaactttttaagattttctgtcacatcaaattttgtggcacatacatggaacattaaatatagatcaaaaaataattatttatatagtttgtttgtaatttgagagacgaatcttttgagcttagttagtctatgattaaacaataattatcaaatacaaacgaaagtgctatagtagtcaaagccaaattttttcaccacctaaacaaggcctaagagttgcactttggaaatcagtggatcatttgaagttcgatgacaatttcttaacttctttccccaaaatttttcaccacttaaacaaggcctacagtagaacattttttaactcctttccccaaaatcccaaatcatctgacatgtacccaactttaccgagacatgtgtatttgttagtacttcacctatctgtaggccatcttttgctcgccattcttttctcatttatcgaaacccttgca

SEQ ID NO: 4090 - DNA, 6241 bp, Sorghum bicolor
tcgcctctcttcagcaggagtttgctatgaaggatctgggttggctccaccacttcctcggggtcactgttgagcctcattctgccggattactccttcaccagcagcagtacactcttgatatcctggagcgagctgggatgactgactccaagccctgctccactccagttgacacacaggacaagctatcagaggacgagggtacaccaatgacagatcccactgcctatcggagtcttgccggtgcacttcagtacctcaccttcacctggtcggacatcacctatgcagttcagcagatatgtctccatgtgcatgatccccgtgagccacacctcaccgttctcaagcggatccttcgctacctccgtggcatcgtcgacttcggtctcctccttcaccgccagtcatcctccaccgagcttgtcgtctacactgacgccgactgggccgggtgcccggacactcgcagctctacctccagctacgccgtcttcctaggcggccacctggtgtcctggtcgtccaagcgctagccggtcgtctcccgctccagtgccgaggcggagtactgcgccgttgctaacagcgtggctgaggcttcctggctccggcagctccttaccgagctccatagccctctctcacggagcgcgctggtctactacggcaacgtcagtgcggtgtacctctctgctaacccggtgcagcactagaggaccaagcatgtggagatcgatctacacttcgttcgtgatcgggtcgccatcggcgattttcgggtcctccacatcccgacgactacctcccagtttgccgacatcttcaccaagggtctcccgtcttcgaccttcattgagttccgctctagcctcaacatcaccagtggctagttgtctgtgggggggctcgtgtgtgttgtacttcttttcgtgttcagtctgcaaactccgctgcgccgacagttcagactgcgggggggtgttagagtatgtgtaatgcaggcccatgtggctaggcccatgaggcccatgtattcctaactatatggccaccgtggttagggttggcctaagtaatgaatgacagttctctaacatatatgaacaactcttacttgctaggtcatcagctgttatgcatatttgtcatttttaacttatttttgcaatttttccactgaaagaaaaattaactttatatgcattatgcaactcagaatcagggatacatgtttgacttgccattgagatgtgataaagcagtataaaagtgctatagacgacatatgatagctggcccaatgagccgctcgtctgatatccttatgggccatgcgcccacatgtaattaggatggttattgagtaaataggaatagtaccatattgctcaccgcctatgagactcaatgcaatccatcaatttccgtgtcatactcttgcttacaaaagtatgcttctaacaatatcccttgaggtaagaaaaagtaagaaaataaaataaaataaaataaaataaggtttcctctcatttatatttgcaatacagtcctccacaaagtcattcattgccaaaggacattttagtggtgaaattgtagttatttgttttcctgatagcaggacttaagttccagtttctgtgtgccaagttttcccttcttgtttgttttgttctgtgtgccaggtttttcccttctttcttgtttgttttgatcactcgtttaatactgacaatttgatgaactttgattctcatgtactccaatccattactacctaaatttctcataaaatgattgcaattgtatgaatcttatcaaaatattggtaagttctaatttcaagctaggctccgtatccgtactgcataggcgccgatcatcctcgtactgcgcgtcgctgtagcggacggcctcacagaaccctcgcgcctggagcttgaccttcatcagcaggctccactcgtggtagttggagcaggtgagctatggccatgcgccgccgtcgtcgcggtagacctgcaccatcggggagcgcccacggcgtccgcgacggcactctggggatggcgacacgtgacgacggcgctccgggctgggtgagtgtccaccaatccacccgcctccttcagctccgcgcgtagagcggcggccgcggccaccgcagcctgagcagcggctgctgcctttgccgcggcgagacgagcctcagggctgccgggatcgacagccttgccgtccctccttggcgagccatcgctcttgcccccggcggccgcggcggccagacgcgctctcttggcagagttggaagacatggagaaggcggtggctgggtaggggctttgctaaccttaggctctagataccaattgttgcccaaacatcgcaagtaaagggatagaagaatcccacaggtcagcttgaccaatggtcgcttggattgaatctgaaagttgcaaagcatgtgtttacaataggatggctgctgcttatatagagcagggcctctaccaactacttagcatattcttgcataaagcaagatgctctaggctacatggttgccaaggtttctcatgatcaacttgagggccaaggaacccgtaatgcaaaaagtagaaatgcagaaaagtaagatacatgtgctagcttaacactgtcactatccatgcatttacaatgttccgttgtttgcacctttgttctttcttacactcatggcagttagtgactgactgttggagtgttagtacaagatatagaagtattatcatattttattattgtgtttgtgagtaagcttgaagttcatgtttataaattgatatcaacttggcttcctaaagcctgtgaagtagcactatagacactcagttggcattttggtataactgtagacatcagttagcatttttctatcattgtatgcatattgttgcttgagagtaagatagtttccctggcgaatcagaccaaaaaatcataaagcaacttttagccagtgatgttttttatttgcttttcagaatttgatctggagcctgttgcttcattctttgtaatatcaccacttacttcattacttatcttggccatcccaattcaaaagattttccattttggatgaagtaagtatgatgaaagatatgtaggcctcgtccatttactttattttctttcatgctcagtggagataccagtgcatgaaaacttgcaggagttttatctgggaaagagaagtccatttgaattttgacattctcaactcaaattgtgcctatttagcccaaggctacaaaaccgtatacttatgccccctgaggtggattttgtcacttctgactgatgaaatgtgattactcagcaaattgaatctcttatgtgctctcccacctcaagagatgcactcactgggcccctcaaaaacttgatgttttctgtgtggaaaaaggcaagggaatagctatatatacaactgagtcgcctgatgcatactaccatggcagcatgatccactaatctggtggctcatccaaattcttgtggattgaacaagcctgtgagtgcagtgagaacggagttgtacattatagtctaatatatagcaaggctgcaaggttcataaagggcctgcttggttcgcagccatagtgtgccttgccaagtctacagcggcaaaaacctccaccacagactagtacaaaaattgtggcacaccatactttactgatcaaccaaacagcagacttgataggtgtgacagctttacctgtggcagtggctcgtggtggtgggcaaccaagcaggcccatagcatcaaacaattaaactgctctactaagccccagttaggtatgctcactcatgggattaaatatgttacgttcattcttatataggcaaccttctgaagatatgtatcttatgtgaccttgcatctcacttagaatcagtttatatacctgccagtgaaaattgcacctttcctgctctactttatacaacaggccattttccaccggtacttaaaactgtggtagccagcttgactcacttgtattttgaacttcatgtgttcaattcctttaaaaaggataggagtgttctcacttctgatgcatctttttgaaaggttcatacagttatttttcaagacattttattgccccaaaataaaaggacattactgtcatgctgagacaacatatatttcattgaaacattccatagttccatgatgtaagttggtggcaaaatttgtataatatatagaaaatgtttctgttctatgtacaggtcaatcaactatgcgaattttaatcatgcatgtgggtaattgcattattgatttgtgttaggtggaatattttggtttctctgaagtttatcagtgagttctggtttaccttttggaatagaactccagtatgtctgtttgtctcctttcttttcctacaccttttggaactctgatccatcttagagttcttcttcgttttccatatggtttgttcacccactatactgattgatgtttccatcagtagtattttatggttgtgccttgcacttttataggttgtattacaagatggcaggtcggagcgtctgactgtttgcgctggtccaaataccgcttctgttcaagatgctttgacagagtaccgtgtgattgagtcttgtcctcaaggtaggcaagaaacaaaaatgcatgttgaggagcaaatgcattttattgttgtacggataagtaaattattactgctagcagtgtcatttcaaaatgggccactaaagcttctgataaaaataatgtcaaatagatatcaaatcggatgtgaatagaaacaagttcattcaaggaaaattcagaggcattaaactgtaatatagttttggtattattgatgaacatagatgatgtaggtttatgtttccctgtgctataaggttaggtgtcctggatgatgatagccactgtaagcttagcaaactaagtagattgctgaactatgatgcatcattttattgaatattgtcgtcctttttagtgatgggtttgggatattgttagtaagcagcaaaatgtgatgcagtgaaattgcttttagttaaggaaagtccatcctacttcacatataactgttattgtgattcaataatattgaagtttgctaatgattttagggtacacttggttagaattattccctcggactgggaggaagcatcaggtaattataaattcataatactcctatatcagttatctctgaacaaactggtttcgttgtacttacttgcaaggtaccacggtcacactaaccactctgaaaaactttctcctttatattcttgaactgagccagctccgagtccattgtgcggaggttctgggaacaccaattgttggggattacaagtacggacggcaagcgcaccagaactggacgcctcttcccatgccgcaaacaatcaatgaggaaatgctcaagaaaaggaagcttccctttgggcttgctttgggcggtggaagcgtagctgagcagcagccacagctgcatctacactgcaagcagatgatccttcctgacatctcagcagctatgcagcagctgcagtcttcagatgctgaccacaatttctctgatctggagaagctgagctttgtcgccccattgccattgcacatgcagttgagctggaggattctgatgtccataggcaagtaatgttgtcatttcttctttaggcatgcctgcttgctgtgctgtattactgtggggtttgctttaaaccctgcatgcctgcttactggggcttgctgtcgcagaaagcttatagaacagcctgaaaccctgaatttgggctgtagtagtagtggatctctacaatggtgaaagatgagatcatatgcagaaaccatgttgataaatagattattctttgttttctttttatttttctggttttcctccagagattttttttcatataatgccgcataatcaatgagcaatgatacaagttcatggattcgattaatgccgcatcattgcaggcgtctggggggttttctggtgcaccgcagccgcaggggcgaaatgaccctctgctgtggtgatggctttccttggtcgtttttctaacgtgtgcgcgtcgtataaactttgacagagcgaaacagctaatattgaattagtaactccggtccgcatttgagtgtgttctt

SEQ ID NO: 4091 - DNA, 6681 bp, Sorghum bicolor
gtttgccttctcgttcgttcccgtggcttctggagtcttctagatggtagaaaattgcgcggtgcgttgatatctctatgtaatcccgacatgtgggtctttcttccttatttcctgataaccccctgcagaaatagacaaacaccaaaactcgtggaattctgtcaaataaaaccctaagtctagatgttgatttcatgtggatccttttctttgtttatttgataattaaatttgatacttaaggaccgtcaacagtttccttggtaaggggattggtgattcacttgggaggcttggatggaatccaagtgttggtcggctcggatgagaattcaagtattggtttggttctctaaggagaaggtagaatttaacttagtaaataggttctaaggatttaagaaaaataggatgtgttgcttaaatgtttgtgtcagaacttgaaagcctatccttgtgttgtccctcatgtcgtacttttcctacaattgcgtagtacattacgatgcactgacccttctctttgttcccctgctacctcacctagttgttcagactagaagatggagtgtcccttcaagatggtgtttcgtgaagatagtgttgatgctaggctggtgtacccccggtcggctgtctgcagagatggagaccctgcttcgttgaactctgatgtaattttgtgttcagaacctttggttatttttataatatataatcgcttttgtattaaatactgctttgtatcactactttgttgtcacatgtatgattaaatagatcctgacatacatgtgatgtgcattcggtttgttttataaaaccgggtgtggcacatgtgatgggattcagtgtggaggccttccttctcacagagcgttgattggggggttgccataggtgcaatgcgctgattggcaaaaatttgtcggatgtgtggggcgaggagactgtgaggtgccgaatggtcgagatatctagggagcaaggtgatggccgggctcaccgcacgcgagagagattgagggagcgccggacgagggctatcacgctagagagttcgcatcactggtggacaaaatgaatccgtatgttttagttgtagagatagagaaaaaaagagatagacaagggaaaagattaagatttttttgtgcataattagttagattttttaatttgtctataaaaacactaaccttagcttgctatttagagtataataacattgcttttttttgaaaaatttattattttttagcaactttgaggacaatttataatatgactcttcttttagcaagcgataaaaattctataggtacagcgccacagcacacagccaggctaggttgggccatttcaaaatcatgtagggcgcgtttgatttgttgactcgtgagagccaggccgtcgagccaggcctggcctaggctgccatgggccaagacccttgtttgattgtattttaggaaaaacaggctcatatgatcctttgttttattttcatttagaagcctggcttgcagcccactgctacttgtgtctgcccaaatagcccgcgcgagctcgaggcctctgaaaaaaatggagaagagcgtttctagggagacatgagagaaggtattttgcagcccaagagctaggtttacaaataggccaaatatatcaaacacaatttcttacaactccagagtctagctagggaatcttgggccttgtttagttcaccaaaaacttttcaagattcaccgtcacatcgaatcttgcggcacatgcatgaagcattaaatatagtcaaaaataaaaactaattacacagtttacctataaatcgtaagataaacctttgatagttagtttataattagataatatttatcataaacaaacaaaagtgagagtaccataaaccaaaaatttttataaactaaatgaggccttggcccatatcaagcgcaggtacaccaccagcccagcacgttacttggtggctcatccagccaaaaaccacagcctcatcggaaccttgcccccgccgtcctccggagtccgaaccctccctttcacctgacctccgcctcccgttcgaacgcggcaacgtgcgcccctcaccctgctcctcagcctcggatctcatctcagtaccaacctaggtaacggtcgcttacttcttcttctttttttttggggacgagctggatgtcactgttacggacctacagggattggatcatttggcggcgcctctaaggctactaaatgtcgtaatgcgaattgcaaaatgctggtccatagtagaaatgggtcttgcgcggataccgctgccgggtcttgttatttgtcatatttggatgcgaggtttgaatcttggatttagtttagtggtgcccgagccggcttaatttcttacctcggttcaacatgaatgtggctgtgctgtacgaggtgtagagttgaaatcttatatgttgttgtgctcgcgctatgtgtttgtttccgaattatgacttaccaaaggcggacttgattttgccgctgtggtggtaaaactgagatcttatcacgtattgtattcaccaagatgtgcgcataaacagatctaataatttaacacatggatccttgtacatcaatctgtgcgtttcttggaaaaccctgggttagttttggatttatttatttatagtgtttgcctgagcttgactgtaacagtgaaaccatttcaatcaatatacatcctgattcctgatacagtgatatttctttaagtgtagtccacgatactgtttccaacacattcttcttgcagtcctactcctttttgtacataaaggaagatgggagcatatgcgacgactggtatgcagatgatggcaacgcgcccttgcatcccagcctgcaggcaaatgcttgggccgacatcagcactgtctgcatttggaagggcaatttgtaccagaactggttttgctagctcttctaaagccacatcagcaggaccactggtttctttaaatcgcaagagggttgttgtgagggcaatgtcgcagagaggtgcccaaggacttcccattgatctcacaggtaaactgaatatccatccataaattgcaggtcattactggtatatagttctaatgattcatgtctttgcttatgtacacttgttcttctgtaaaaaccgtatgtagttatcaatccatcacttttgttctgtgttgatatacaagatctggcaatctttttttttaatctttgggatctgaactaatgcacatcttcaatcactgcaagttttcagttataattatcttggaagttttcaggtaaaagagcatttattgctggagttgctgatgataatggttatggttgggcaatttctaaggctcttgctgctgctggtgctgagattcttgtcggtacatgggtgcctgtaagttgatctcatttgtgaaatttatcagaccagatgttctggggtaaaattatactggagttatcaaaattttgcaggcgctgaacatatttgagacaagcttgagacgtggaaagtttgatgaatcacggaagtgcgtgcatgtgattaacagtagtttgagggattgagcataattgatgttttctttattctactgcagtgtttcttgctggaagcctggaactgttgtttcctttttgactttacaagtatttgattcaggctacctgatggatctcttatggaaattgctaaagtatatccactggacgcagtttatgacacccctgaggatgttcctgaagatgtaatgctcatcgtttatgatgtttgcattatcgtttttctttcatactttatgaactttttgtccctgttgcaggttaaagcaaacaaaagatatgctggagcttcaaactggactgttaaggttagttgcaaatgcaatgtgcctttgcacccatcaagcagcatcaatgccatgctatgaacattttcttatccagtgcttgattcctgtgtgtttaaaatatggtaggaagttgctgagactgtaaagaatgattttggtagcattgacatccttgtacactctcttgccaatggtcctgaggttgagttgccatcaaaatctttatatttcctgtttcattgccaccatcaggagcatttagttgaccttttcttttattatcacaaaggtaacaaaaccactgctggagacatcaaggagaggataccttgctgcaatttcagcatctagttattcttatgtttctttacttcaacacttccttcccataatgaatccaggtattccgttactgatatgctgtgccgattttctcttctgttcctatgtgttgacgccgatttgggttatcccttttttactgtcaacactatgatattggctcaggacttcaggactttatttttgggcgattacccatctactcaagatatcattatatttaaagtgagcaaggtttagtactatgtttaactagtgtacatgtactttggaaaaaattgaaaatgccagcagcatactttaccctgtgctatgtgaattatgagccctgttaggttggtgtcgcaatttgacatagtcacatttagcccatgcacatgtgtagtcagtgtttgtcttctgccacactggtgtgcaaccaatccttccatgaggtagccccttgccacattttcctcacgtcttgtataaacatagcaaagagcaaaagacaatgtttgtcagctcttaaggctcgccaaacttgggggtaaattaaggaaccagcagtccctgttaagccaagcaccaggcatgtgaagttgccaaacatagctttacattggtaacaacacactatgccagacttactataaaatgaggccactgctactagcattgtatgtgccttggtgtggttaaactgcactcaacatgcttgtttaataaaaagtatttcttattcttgccagataagattttatttgttttgatgtgtttacctttctttgacactgtttcactttttaaaaataatttgcaggaggtgctagtatctctttaacttacatagcttctgaaaggataattcctgggtaaatatttctttattgatttcacagttaagctatcagggctcgttacttatgattgtttggtgattgctttgtagatatggtggtggtatgagttcagccaaagcagcacttgagagtgatacaagagtacacacttttctatgcgatctcacaccccttagattatgatgtccagtggtgcttccccatgcatatagttacttataagcctttttttctgttcaggttcttgcttacgaagcaggtcgaaaaggcaaaatcagagtgaacacaatatcagcaggtaacttttttttttccccttcttttccttttccaagaaagtaaacaagtccactttcggaaatcttgctgaacagaatttgtattcacgaacatcacttatacaaaattagaaggggactgtagtttgcagtttgtctgaggctttaataacttattaaccagcacttgcattgttgtatgtcatgcattgcatctgtctccttaggtccattgggaagccgagcagcaaaagccattggatttatcgagaagatgatagagtattcttatgtcaatgcaccactccagaaggaattattggcaggttaaatttccttctttcctttatatctactttgcctgcctgaaaagaagaaaaaagagagaagggatttcttctgtacttcccctgaaaacagcttgcattacatatgaacagatgaagtggggaacacggcagcattcctcgcgtctcctttggcatcagcaatcactggttcaactatttacgttgacaatgggctcaacacaatgggacttgcacttgacagccctactttatccacatgagcacatttcagctgaacgtggtgcagttaggtttgtaccggagtagtacgtccaggtctgagcaaggcagtcaaattttggaattagtttggaggatggtagattttgcagattccgtttttttcgttctcattaacttggactgtcaattacccgttagaaataggaactgtaacaggctccagtctcctggtctatgcaatgcactaatgcagatttaaattttgcagcaattgagtttgttttgctatctgcttgtgtttgtataacagatctccgaggtctggacttcggggtaaatgagttgcaactctggtctgtattttgtctgctcattcgatcatgtcaaacagcgtagaataatttcaaaacctgcacggtgtcgtggctttggaaatagttgaaggacgtaagtacgccgctttcccatgtaataccgaatcatctgttatgttggtgtttttagtcagaatcttgcttggaccgaccctatctgtgctaggtcagatgacttggcaacctttttttttttttgaaagtatggcagctggggttgaagaaaaagagacggaagaacatatgttcatgattactgtctgtctcaaaaaagatgcaattttgggtttggcttaagggtgtgtttggtagagatcaggatattagtttagaaatgtttcagatctaaattctctctagaaacatttctatgttaattaaatcagaatcaatttatataaccgtttaactag

SEQ ID NO: 4092 - DNA, 4967 bp, Sorghum bicolor
cttggaggtgctctcattgaaccaatttcgtgcatcccaaaatatttattctccttagagcatctccaacaatctgataaaaatcacttggcaaatcttatgatttggcaagtgactaaaacatatatcaagtgaaaaaatagtatctccaatagtttggtatttgagtttggcaaaattaagaaaagtggacccactccaaacagatccaactgtttttggttgtatgtttaggccagtctcaatggcccatttcaatgcactgtttccaaaacaaatctgctgacagagcatcaatgaaacgaacaatgaaacaacctccacaatgcatgagtttcaccttgatgtttcctaggttgggcaaagcatttaattactgcaaaatgattggatcacatgcaagatggtgaaacgatttagtcctcggtagggatttcatcctgtttcaccgcgtaggaaacaacgccagtagagtttcaccatggtgaaactacttcattctctctcctcttcgtttcatacaaaaagtacagttttgctgacatggcgctctaataaatgtgtatgacatccttgtgaaacccccactgagagtggccttatgtcctgcgtgtcatacctggtggccgccgctgcgcatgttcacattaagtgaagattgaccaatcaactgttggccgcctgcgcacgaagtagcaaatatgtatgtgtgttgcatttaaataaataaaagctgctgctatatttgtgattgatgtgacaaaaaactactatgctgatcagacctttgatgaaaattcatgcctcgcgctagagaggaggctacggcgcccgcacctcgtgatggcaagcggaaggaagcgcgcaaatttgcgcgtggatggccagagaatgacaagttgccatttttagtaagttgtttagcaaaccattggagggataatttgtttagttttgttaaattatacaagatagcaagtgtgtttagcaaatcattaggggctcgttcgtttgacctagaacagaggccgggaaccattccggccaggaatgatattcaaatttatatatctgtgaacgagtggaatgattcctggccgggaatctccctaaccgaacggcccctagagagcctggtcgggaatcttcctaaccgaacggcctctagagaggctcttagagtatctccaagagactctctatattcttcctaaatattaggaatactaattttaatgaaaaactcctctccaacagcttatctaaatggtatccaaatataactattgtcttttcttgatttttcgctagccaaatatagaagacgagaatgactctctagagtgaacatgagatttaacaaaactgttggagagtgaaaaaatataaaaaacgattttgatgtaaataactctttaaatgatgatttagagaatgagatttagaaagactcttggagatgttcgtcctaaaatatataaaaatatatattgtagatataatttttttcccgagggaacagatgtatatgttgtataggcttctggcccggcccggctcgaaaccgaagcgtcgctcacatccatctccgaccctttcaccttctcctttctccagcgccgcgcccgtgcacacgtccgcgccgtcgaaacccggcccccaccccagcctcggaggcgtgcacgctgccgcgtaggatcggctcgctactgggcgtcatcgccgccgacctcctcgttcaccaatctgcaccctgatcgccgtgcagtggaaactaggggatcgattccccttctcggtaagacgaagaaccctagctcgctgtcacgaatttatgtggggaattggggttttgcccccgaacctaacccgaaatttcatctctttctctctcatcagttcgtcgcggatttctcgctgcgtgccgtatggtgcggcgagtgattctccaagaaatctggggtcgctgatctgagtccgcacagaacgcagtgggagcaatgatgatgtcggacgacgacgacgccgagccccagctcaacgcggtggagagctactacttcgttgactccacggacgagaacgaggctgtctgcttctccaacctgcctttcctgttcggggacactgatgatcttcctgactgcaagaagaggctggtgctgcgcgggactggtgacccgggcgtcaaggtgtacaatgtggttgtggcctggagactggggctcgagggaaagcagccccagtttgcggtgctcacagctgaaggtagacgatgggtacgtctcattaggcccttgaagagctacgaggagatgatcaggactctgctgatcacggcgcagatgctgcattttctcaggaggaagcctcatgagccagagaaaaccttgtggaaccacctttgcaaagtctttaagtacattccttggcacactctgttgtgtttgttcttttggcagatgttgaacactgatgcttacagatctgacttgtgcttctgcagcaagtttgatgtcagaccctcagaggacgatttcaggaaccaccgctcactgatgaaggagttcgcggcaaaagatcctgtcttagtaaaatcagaggtgtctgttctattcttgttatcgaaattctcaagtgtgtttgttagcatagcacaattgtttctaccatgagcatgaaataatctacaagttatgaggggttagcaacctaatcacctaagctggcattgtaaattagaaaaaattgacacccaagtcaagttgaagagaactcaaaccaaggtggcgggggtgtacacccacaatccacacctccaaccaactgtgttaggctcagtttttgattaactttgttttatggctagctgtgttatgtaaagttgtaaacattgttcttaactccttaatttgcaacaaaaaacacattcttgctctaagattgtaattctctggcatgtctgtgctctgctatcttctagctaccattataacccttagagatgcaatatttgataatctgggtttgtattgccattgattcgttgtttgcttcttgatgcttataatgttagatgacaatgacatgtaaaaggactgatctgcacgtgatgccacctacaaggcctttcttccttatcctgtctctataattagctaaagtgattggaacaacttgttattgtgcgtgattgctgttatttgtgagtcaaactgacctggtatgatgattatttgactgattttgctatgatgattatctgatagattttgcaagtatttgttgaaggaagatctagaaaaaatttcactgaggtatgtgtatatggttattgaatggtaaagttttggaagagaaattaaccacacctagaatttaaccacacattaactattactcttaatataattgtgactaggttggtgcagaccacatcgatgtcaagcagccgttcatcgctgatgatgaggacatagatgagatgattgtggaagatgccgataatgaatctgatgaagaagaggatgaagatttgtttgattcaatatgtgccatttgtgacaatggaggagacatattatggtaggtggattcccttgtgtgattgagtaggctacctgaaagtcttttctcttttcttgagaatctaggcagcttagttagtatttagttgttcatgtcttcagttgagcatgcagcataacaatttcagatatattttacatggtgattaggccataaccatcgcgccaagtggctaggattgcttttgtaaatgtttgtattatggacttgtttgggacagcttcaccattgaaaaagtgaatatggatctgggattcaccacggagtggatctgaaatctaccagagaaccgtttgggtgacatggcaactccagatccacgcaagggcattttgtttggaatgcccagatttgcccttgggcacaggtcccacctgtcaatgtgtgagaaaagcttttcagtcttcttcttcctctgaccggatctgtggggcatggggtggatggcggtcagccatggccaggcacggtcaggcgcggtggtcagggaggacgtggaggggaggggaggggaggggcgggcgcggcggctgggagcctcgccagatgcggctaggcgggtgtggacctcgctggatgcaggcgggcaggcacggccgctctcgccggatgtgggtgggtgtgcgcggcatgtgccggacgcaagagggcacggccctcgccggacgcaggcaagcatgtggcctcgccggatgtgggcaggcgcacagggctgggcgagcatgtggaggttggccggccacggtggcggggaagggtgcgcggtcgcggggctgtcacgtagtgcttggggcggctcgtcagccgctaggcgagtgcacggtggggcagagaggcgagcgtcacaacagaaaagaagaggagatggtcaaaaattagaatgaagtggttcatttgtgtaaccagtggcagtggtgggtaattttccccaaatccatcaatttgaattttgtggagcaccccttgaggagatccactgttttggtggagctagactgtttggcaaactttctgtggagtggagctatttttagtgaatttggagcttggggagctgtcccaaacaggccctatatactaaacttaggaaggcccatatgacatgccttaatggctacctgtagagagatcaattgctaatgttaggctgtttgaactgatagttaacactatcatcataaaatgaaacagaagtggtggaagaagtataatgtttacaaaaatgctgctcatttcactgatggaaattgcatcttactgggaaaataatatatgctcagagctatatgtgttactatgaagtagatcatcggagttactccatatcctgaaaagttttgttatggaaattccagtagtgttgttgttgatatgaaatg

SEQ ID NO: 4093 - DNA, 4956 bp, Sorghum bicolor
ttgaaggaagataaggtagatcgggaagaaagcctatcttttcttgcttgaaccgtctacgcctctccggtgagaacttgtcaatatttatagcgtaggttgatgcttatgctaaaattctgtttgagaaaaatactattcattcgctgaaaagtattactaaagtagtacaacagtttattaggaattataaagtatggagttaatctccaaagttaacatttcattgttggtttaattgaacaacaatcggtttcaaagtaattttgacatatgaaactaatttaactacagttactcatgtagactttacttttatgaagatactttgacccggtgagtactccacgttggttagggaaaaaaaagaaatccactgtgcctacatgatattcagagagtgtctgggactactctgcttctgttattctagctcagtattatcaaacacccccaactccaggaactccgctccaaacaaaggtggagctggaagtcaatcaggggcataataaatcatgtgccagtatcacctgctctacaaactccacggtgaagttgctccatggcgaagttagtggagcaaagttagaaaaactggagcaaagcagtgacaaacacccccctccctccgggtggatttcttggatccgatatttgcattgttaagaaattttgaatctagagctacacatacgccaagagcattagataaatcatttgtttatatttgagaccataataagtataaatatctaaatcactttgatgtagttatacactatactacacaatttttttctgcaggcaagtgttttgggttaacggagataggcaaagtatttgccaccgctcgccttccttaactaatttaacgtaggcagtcgcttttgttcgctggtctaaaaagtcatggctaaaattactgttgtttcatttattgtgagaaaaaatactactaactggtagaaaaaatatggctgataaaacaagtgaacgtgctctaattgattgattggttcctagacgagcttatcttgtcttgcctcgtcggttcaagagatcaaaagtccaaaaccttaccactttacagggtcgacattgggtctcatcaaatatacgttcggtctttggttttctcaagattttggctatctaataaaaatgaagacgggtataattacaggatcgtactaaagactaagcaattaaatttggtcatttcagttaacttttgggtcttagatcgaactaatagaatatttttcgagacatgttttgacagcagactttggcattaatttctttatcttaaagaatgttttgatagtaaactatcacaagatcaatgcaagatttgctcttccgcattagcaaataaaggtaataagttatatatattaaccacctattccaacacatatcgccacaacaattctcgattggcaaggcaagacaaactttgcttgaggcacacgtatgtatacacatatattcacccttaagtcatttttcagtttgggggcatcatcgattcatataagatcaaagcctgcatgccacaacaaaaaagaaagatcggaataggggaagggacacctatattattcataataaaagccaagtaaaaattgtacaagtatttcatactgccaatgtgaaatagatttgaactagatagatagataaatatagatcttttgtagttaacatgcaagagtctacaaatatagactcaacctagatatgggttttgaatgaagctgtgccaacctagatatgtattttgtctatcgaaaaggagtacataattgcatgcaagaaacaggtatacagaattatcaatggataggtccaagcacagagtatctatcgctttcacatattaagtccctgtgatgtgatcacattcaacttttttaattggtttggatttgaagcttcttccttctcctcctcaagtcaccatataaaccaatcagctcccatcccaggccacacacacaaacacacaccacacacacacacagagccaggcattgcacttgccttgcacaagccccggaggagccccacacccagcggcggacggaatgcggctgcgcctgggactgcctcagtacgcctctctcactccccggctcccccgttccttctccccgctccgttcgtcagattgtctcttgggacggccgcactcggtcctccaggatctgctgaaggcacgcactggctttttcagtttccctttccttttcttggcaacacgcatatccaagaaatctgcagaaatcactaggcaaattgggattttgggcccaaatctttcctcatacaattggtagctgattggccgcgtgattcgagcgccaacattagcctccgcttgttgaaatctttgtccggtgtggtggactcggtcgttgaaacccgtcacctgattacttgggttgtttcccttgctgttgagctttgtgatgtgaagccgccaattgttcattacattttggaacgtttactgtctggtgagcgaaacgatgtatcttctatttggagttttagtacttggtgttgtttctacattggaagatttgtcggtgttagtattcgtatacacatacttctattcatataaattggtgtgttacaccttagtccgggtttgggccagtagtttaagtaaattctactgctctaaggagccagcaagcacagtggatcaatcatctctgccctaatgtggcatgagttgtaattttgtgttacaagtagtgtcaattaattattttttgtagatctattgataaattgtctgaaatctcggagaaaatgacttgaaatctggcattctgttgaccattccaattctccatgttgttgatgttgttaccttgaaatttttataaccagttagcaattcaatagtatgtgtgtgtttcattgttatgcgcctaggcttgctttattttatttcagaagcaaaacagactgctgtgtagttggactatctaggaattagttttgctatttgaatgctttgctaacactgaaccgattgcaggtgaacattctgctctgatggcgaagcagtattacgctacgagcagcctcgtggttgggtacgctctgtgctcgagtctgctctcaatcatcaacaagtatgctgtgacaaagttcggttaccctggcctcctaactgctctacagtacttgacatctgctggtggtgtttggatccttggaaagctcggctttctcacccatgaccccttcaacttggagactgcaaaaaagtttgcaccggctgctcttgtcttctacctagccatattcaccaatacaaatctcctccgccatgccaatgtagatacgttcatagttttcagatccttgaccccgcttttggttgctattgccgacacaactttcaggaagcaaccatgtccatcaaagttcacattcctatcccttgtggtcatcttgggaggagcagttggctatgtgatgacagattcagcattcagcatcacagcatactcatgggcacttgcatatctggtgaccataacaactgaaatggtgtacatcaagcacattgtgacaaacctggggctcaacacctggggctttgtgctttacaacaactttctttccttgatgctggccccgatcttttggttccttacaggggagcacaagtcagtctttgcagcgatggaatcaaggggcgaaggctggtttcacctggatgcctttgtagcagtggcattgtcatgcgtgtttgggttgctcattagtttctttggttttgcagcgagaagagctgtatcagcaaccgcatttaccgtcactggggttgtgaataagttcctcaccgtggctatcaatgtcatgatctgggacaagcatgcaactgcatatggtttggtttgcttactgttcactattgtcggtggagtactctatcagcaatcagttacagtgaaaggaaacagcgcagcgcagcgtgagctggtacccgaacaacctaaggagggcaatgacagcaaagagtttgatgaggagaaacaaagcttagtttcttcagctaaataatacagtgcacaaatcacttgcatgtaggattcgtttgcagatttattctttggcctttgaataggctggtttatgtgtctgatccttgaaacgaatcaaacatgagggaatactagtggaagtagtacttccgtcgaaggtagttctgctgttgttttggattgcactaaaactgcaatactatgttcactactgatatgtaggtctgctagtgtagctgataaaagcagtttttgatattgcatattttctttttcaaaatttcattttatgtgtctgacagttgttctacgataaatattgctcttcaatattctttagtaaaatgacttagcatggagtaatttacagtgcttgatgcagtcctgtggcacccctctcgttgtcatacatttcaatgcctatttttgtgcaattattttccctttaaaattagcaagtactttgtcatatttggtcagaattgttagacagtacaacatttatcctttccaatcttgtacgatggctgctccccacgttttacatgaaaatgtgctgttggtggtatgccctacttgctatctgaatgagcatcttaagccaggagaatttcatgcttaggagcaagaacaagaagacgacgaagtactatttcccgaattaacaaaaattagacgtgcacttgtatgcactacatgttggatgaaaattttcaggaaattcaattctttccgtggtaaatttgtggaatggaattaagcatatgcttgtagatatttaccagacgtgtgggccagaatatattgcagactgagtggagcgaggtcaccgcttacagttacagagcagtccgtaagacaacaattatcattgtgtacg

SEQ ID NO: 4094 - DNA, 3657 bp, Sorghum bicolor
  misc_feature (3086)..(3657): n is a, c, g, or t
gaagagcatacaatattgtagaaaagcatgtcccatccagtgcagcgcaaagtgcatatatatgaaatcagtgaaaagacgcgcagaaagagatggcaagcgcagaataattactttgggccggccttgcttgaaaaggtgttttcttagacaacactctctgtgaggatcaagctaggtagacgagatgtcacaagttctttcgcagggaagccattagtagtgcggcaggctactccatctccactaataaaatgcaatcagattcttcacctgttacaccaacaaacccattctctggacagcacgagaacaacaagtgatttgtttattgatactcccagctttgaaagttgaagctattggaattcaaagcttgagaatgagtctctctccctagcagcctagctgaaagattgttttagagatagattatacactcagcttttatggaaatcaagagtggggtacaatcacagctgtgctctgtggagatatatatatatatatatatatatatagcacatatccatcatgtcaaaagtaacagaaatctgaaaacaaaagatgaataggtagcctaagtttctaaataatctgtgcatatatctacgcatgtcgaaggagaagatgtgccaccaaccgtttctaaattatacatagtcgtagctgaggaagtttgtgtgtacacaacacggatgactgctttttacctgaaaactctcaagagagaacaaattgcaaccatcatgacaaataaacagaataagtttcaggcgaatttcagccctgttaataggcctacatttttttgttgcgaagagaaaacaaaaggcatcaaacctgtcacaacatgtatatatatctttcattcggtcctcttctagagactagagttgcagcaaaactcaacgccgtccatgtccattggttaagttggcgctgatgtccctattggccaccaaccaaccggaccggtcatgagatcgatgagagtacaagatggggggccactgctggagctcatgagatgagctaggtctcatcaggaccgaccctcctcctcctctggcgtcgccccttcttttccttccaagaacaccaggtaggtatccccatgcatccatcgcctcagatagtgctagtgctagcttcctggttcagttcaattcaattcaattgaattcagcagttttctctacagtttttagtttcttggtcctcgcatctcgttttggtctgaggttgctacctttttttggtcgtgttttgggagtttgaagttgtacagttgcagatgaaatcttgttgcattatctaaagaaatcactagtacaatttataaacgatagcatacatatatatatggctcttctgtgtctgtatgtattgtggttgtagcttcaactcactgactttttgttactagaagagagagtgtgtaatcatcggtaacttaggcacaggttttcaattgtgatttctagaaaattaatttctagatggtgtgcatgtaacatgctccacaatgaccgtgttttagttctgcgtgtactagtaaaacttatatattgaggttgttcttcctgctttcgtttcaatgaaattgataaggcagtcttgtgataagtggtattggttccaagaaaacaaaacaaaacttatggttgttcactactacctgatcctagtgaaagagcaggggacaagacaacttcaaccttctttaagaaccaacaaccctgacgctagatcgttgtgtgtgtgtgtgcgcgcgcgcatctgccgattgttcttacaaattatatataccctgcttggcatatatacctttataatgaattcatttctcatctactcaggctctagtgaaagggaagctcagtctcacactgacttgaagacaactgctgtcgaagtaattccttttattttgtatagataaggattttatctgagagtggttaaaacgttttggcttagttgttaagttataacaaatgccttccactacgatggatgcaaatgcaatccagaagctctatgaggtctgtaaagtatcattatctgagaaagggcctctatcttctgaatctgtcgacaatgtccgtgctgtattaggtatgaactgccttcaattcctttttggttctgatgattacataagcttaggaacatcccacataaaggatgcaaaatcgatatgaaccaagaaaaatctggtgttgttattgtttttcttactattggttatatataaatctttctggcagacatgattaccccggcagatgttggccttgagtgcgaagctgaagctgtgcgtgtttggaggagtccacgggccctgagtaggaaaagagtttttcattccagcccggccatcagataccgtcatatttacgagtgcaaaagcttctcagtaagcccaataaaaagattttgcatttccactgccaaatactgtatttggttttcacatcacactgcagcattgaagtgtttgtcagatctccaccattactatattattgcatacatacgacactgatgtaagatttactcccacattataccggcctgcagattggaatattttgcataccagcatcatccatcatcccactccacaaccatcctggaatgactgtactcagcaaaattttatatggcacggcgcatgtcaaatcatatgactggattgacacagctgaatctcttaacttatcaaaaggtagaattttcttaaaccatgatgaaatttttaaagatgaatctgaatcaagtactgcatttacctgtctcaataacatggtttttattgtttggatttaaacctgcattaagtcctctggtatatgttttctaccaactgactgcacacttctctttttttgtaatcacagtgagacctgccaaggttgtaagagacggtgaaatgtctgcgccttgtggagcgatggttcttcatccagaaggcggtggcaacatccacgccttgagagccattactccctgcgccatcctggacattttgacgcccccatactcttcagaggatgggaggcactgctcctacttccgtnnnnnnnnnnnnnnnnnnnnnnnnnnnnnnnnnnnnnnnnnnnnnnnnnnnnnnnnnnnnnnnnnnnnnnnnnnnnnnnnnnnnnnnnnnnnnnnnnnnnnnnnnnnnnnnnnnnnnnnnnnnnnnnnnnnnnnnnnnnnnnnnnnnnnnnnnnnnnnnnnnnnnnnnnnnnnnnnnnnnnnnnnnnnnnnnnnnnnnnnnnnnnnnnnnnnnnnnnnnnnnnnnnnnnnnnnnnnnnnnnnnnnnnnnnnnnnnnnnnnnnnnnnnnnnnnnnnnnnnnnnnnnnnnnnnnnnnnnnnnnnnnnnnnnnnnnnnnnnnnnnnnnnnnnnnnnnnnnnnnnnnnnnnnnnnnnnnnnnnnnnnnnnnnnnnnnnnnnnnnnnnnnnnnnnnnnnnnnnnnnnnnnnnnnnnnnnnnnnnnnnnnnnnnnnnnnnnnnnnnnnnnnnnnnnnnnnnnnnnnnnnnnnnnnnnnnnnnnnnnnnnnnnnnnnnnnnnnnnnnnnnnnnnnnnnnnnnnnnnnnnnnnnnnnnnnnnnnnnnnnnnnnnnnnnnnnnnnnnnnnnnnnnnnnnnn

SEQ ID NO: 4095 - DNA, 7315 bp, Sorghum bicolor
ctgtgaaggagaccgacactgctgctgccggaccttctccgtcggattggagcgagcaagaaggccggcgcacggcccctcgctggcggcacgactccatgccccaacacggcggctccgatggcttggcgcggctccccagctccaggctccggcggctccgatggctcgactcccttccccaacggcacgagcacgacgcacggcggtgcgcctcccctgcccggcgtggcactctacggccacgacggtgcgacggcctatctcggtggcacggaggccctccccgaaggcgtggcgacctacgccggcgcacctccagccacctccacctccatccatggcgagaagaatgagagtatgacatacgggacccacgtgtcattctctgctatgattagtttggatagtgtgttttaggtagtttgctagagttgaaagcgaaatataggtagtataaaaattggtagctacctaaatagatatttagatagtctaatttaggtagaactgctggagatgctcttagagactgtgtaactacccaaatcaagcaagggtaaaactctgaatttgcacggacaagcgcagggaggtcgaggcgacagggccctgagtgccaagaatcttgggagatacggtcaggcgatgaataaaaacaaggacaagccgtcccgtcaaccgtcatgcgccctcatttaggccatggccttgtttagttttaaaaatttttgagaaatcaacaacaatttcgtttgtatttgacaaatattatctaatcatggactaactaggctcaaaagatttgtctcatcaattccgatcaaactgtgcaattagtttttatttttatctatatttaatactccatgcatatgtctaaagattcgatgtggcggagaatctgaaaaattttgtaaatttttttggaaactaaacaaggcccatgtttagttctaaaatttttttattataggattttcgtttgtatttgataaatattgcccaataatatattaagtaggttcaaaaaatctatctcttaaattatagataaattatataattagttatttatatttcatatatatataccgtaaaatttgatgtaataagaaatctgaaaaatcttaaaattttttttgaaactaaacaaggccttactgcgcagcattcattcctcttgcccgcaaagaaacaaaaaaattccaacgggccaatcctgcatgcagtctctagcgagagggagcgagagacactgcagtccggggtgcagcctgcagtctgcagatgcgtaccgtacgtacgttaatggtgagcacagagcttttctgtaatccctacatgtcagtggcgcttatttattaattaatcttatgagtggggctgcattacgagcaaagcatagcagcatctgaaggaaaggggccactgccatgccatgccccatggccaggggctaacagtcggttgcgcgcccactcatgactcatatctggcagtcccagtcgcagtcccgccgcgccttttcacggtgaggggctgtctccaataacgtatgcattttgaacccaaaataggttttcaacacaatacctatagcctccaacagaatacagaaaactcattttgggtatcaggggagacataacccaaatttgggtatcttctctcctcgagacctatttgcagagagtgttgtcttttaggtcttgttgttggagaagactaaaaataggtatggaaccttttacctgtagcgctatctaaagaacaaatgggtcttgtattttaggtgacgattgttggagacagtctgatggcctgctgctgctgctagctacgagtacggtgctcccgccgcctcgcctcttttctccaccatcctttttccgctttggccgctttattgcttttcctctctttccctttgctgcttgctttgggggcctttgttcgatcgacacatcctccccgcatcgatcagcggtttcttcatcgtcagcggcatcttctccctccctttgcttccttgttcgcttgcgctttactgttagcagtcagtcgccaccatcctcctcgtcgtcgtcttcctcgccgacctctgaccgccgccgctgcgcccgctgacatttgtctccccatccagcggccgcagaggagaacgttaccttgctggactggattcgcgtttatctacccccattgctcctggaccctgcttgggtttcgcagcgacgttggctgttgctactccctatccttctctcctttgcctctgctctgctctgctctcagggtcgctttgctctgctgccaagattgctctcaaggtatgagtatgacggtgcctgctgctcttgattaacctttctcgctctcacctccatgactgagcagcttctccatcagcttcagatcgtggacccttccggccggttattcagagtttcagtcccaactcccaatacataaaacgcacttgctctaacaaattcagaaatggccgaggtgaagcctgaggacatggtgcatcatcagcccatggaccagctccagggcttcgagtactgcatcgactccaatccttcctggggtatgtatgtcatgtcccacacacacacacacacacacactcaactggtggtggagcgttgctgtgttcatttgtatagtatagctagagggagcttgctgattcttcatctctgtgtgcgtgttacaggcgaagggattgcgttgggcttccaacactacatactgtccctgggcactgctgtcatgatccccacgttgctggttccgcttatgggtggaaatgatgtgagaataccatccttacctttactcgtttggtttcttgattttgttgcctcatgttcaagcttcgagattttgtctttcagtagtgttcgtatcaaaggaacaaatgctacttttgcagcacctaccttgtaaaatttacaacttttgaaactgaagagaaaaatgccgttgtatcattcgttctacagaagaattcattgtgactacagaaatctgttttgttcctctcctttttttttttaattactgaaaggatgacaaggccaaggtggttcaaacactgctatttgttaccgggatcaagacactgctccagacgctatttggcactcgtcttcccacaatcatgggaggttcgtacgcgtatgtggttccgatcctctccataatccgtgatccctcattcacgcagatagcggatggccatactgtaagtatgcaatgatcctccaacatttgtttttatacccctataaaacaaaacaaacggccatggaagattggacaggttgatatcatgaaccgcggcactagtagtgatgaaaaatcccatgatcttttcgcgtttgtcttgtttccagagattcctgcagactatgagagccatacaaggttcactgattgtatcctcaagcatccaaataattcttggatatagccagttatgggcaatatgttctaggtacatgtaattctcccttttgccttcgttgatgcaagatggaattatgcatcaatacccataccaagtgcacaaattataaattatttccttgacatatccgaaagtacgaatggttcacttagattcttactatattgcagctgaggggccctttggtatagatgtttcaactttagcatgacatgttgacagtcttgttatagtggccacatggtcaatacgtggatcattatctgcttattctttacaaactagtctgggccctttggctatccatctacttttgtgtctgtccgtttgaattgttgggattactttagaaaaaaagtacaatatgctaatatgatattaaaaggtagaaaaaaagtacgtatatacaaaggtgataggaatgcctgctaccttctgatccacggcaggaataaggacataaaattttgatgtgcatgttgcaggttctttagcccacttgggatggttcccgtggttgcattggtggggcttggccttttcgagagaggattcccagtggtaaaagctctaatggacgtacttttattttgcataaaatagttcaatccacattgattccttcagtttcatactcaagaaacttggacagtcttatttcttttctttccattgttaattgtttaggaactctcttttttcttccttacattggtgatgatctaaaagcttcactacaattgaagatctcttatcttataactgaaagatatttgtgtgtcagcattttgttgaagttggaaaaattacattaattatccttctattatacgtgctttaaagcgaagagctggcgttctgttgttatgctacctttcaaaaaaaaaattgttatgctctactgagtcctataagctaattcaagaacaaaatttgcaggttgggaaatgcgtggagattagtcttccaatgcttatcctctttgttgcgctttcccagtatctcaagcacgtgaatattcatcatgttcctgttttggagaggttctcactgctgatgtgcatcgctcttgtatgggtatatgcccacatcctcacagcaagtggtgcatacaagcacacagcacttgtcacccagatcaactgtcggacagaccgtgccaatctcatatcttcatcacaatggtttggagacttccctatgccacattgactaattttaacatccacgttctacattttcatgtaactttccattctcttaggataagcattccataccctttacaatggggtgcaccaacattcagtgcagaccatgcattcggtatgatggctgcggtgatggtttctttaatagaggtaccataacatacttactaaaaataaacatagaaagttttgaagaggtttatgtatcataccttgtagaaatttgttggttttcattattttggatttttttttcaatacatctaattcagtggacaatatttgagggttgcagaccacgggagcattcaaagctgctgcacgattggctagtgcgacacccccaccagcatatgtcctgagcagaggcattgggtggcaggttagtgatgttatcctagctttattgcagttcatggatgttggctagaaagttttctgatactttattgcagatgtacatatattgaataaccaacgttttgctgaagagaaattaaaaaaattgcatgtactctgttaaagcaagttaaacatgttctctcctttttcttctcaaatatgtgatacatccagggcattggcaccctactagatggcctgtttggcactgggactggttctactgtttctgtgtaagtgcatcttcatgctgaattgctgatacataaatcttcatgctgatactgtctaagggcatgctgaatctctgcctgaaacacagtgagaacgttggtctcctagggtcaacaagggttggtagcagaagagtgatacaaatttctgctggtttcatgatcttcttctccattctaggtaacatttgtccctagcaagtgacattaaggtgctgtttggtaacatgcacagtaacacaaatgtaatcaaaattagttcatttgtatttgcggccggtaacattcataggcttaaattatttccgtttgcgatacctgctgtagaaccaaacagctcgtaagttgcatcattagtttttcagaattctatacaagttctttcttttttaaacgaattctaaaattatcatgattgcaggaaaatttggagcgctttttgcctcaattcctttcacaatatttgctgccatttactgtgtcatgtttggaattgttggtaagcactaagcagcaaagtagacaaagtgaaaatacccttttctagcaatttgttatactttgaagtgtagagctaacagatacggtcatgtgttcagctgctgtggggctctcctttatgcagttcaccaacatgaactcaatgcgcagtctcttcatcatcggtgtctcactcttcctgggtttatctataccagagtacttctctcggtattccacaagttctcaacaaggcccagcgcacacgaaagctggatgggtttgttttttttttctttcaatatactgcaaattcgaaattccaacttaaacttagctcccagcaagaagaaaaaaaaatctaacatgatatagattaaaagctgagtttgaatatttgtgcatttctttgtttgttgcagttcaatgactacatcaacactatcttctcatcaccgcccactgtcgccctgtttgtagcagtactccttgacaacacacttgatgtaagagatgcagctagggaccgaggaatgccatggtgggcgcgtttcaggacattccgtggcgacagcaggaatgaagagttctacactctgcctttcaacctcaaccgattctttcccccaacataagtctaattgccattgagaagatgctgcatgttaagtggtccactgaagcaagtattacctaacaatgaggtttgcttttgacagagtagaacaacaaaaggttggacaaaggaagaatcagaatgtcagattgtacataaaaccaaatcgtttaggtttgaccaccagtgccaaatcagaatgtcagattttgatgtaatgcgagtttagagatcttatgaacaattcgtttcaagccttatatgcaagctagcttttaaacaatgttttcatggcttagtggcatggtctggtgtctggtcccaaatgctatagaagatgtccagctattgtaagaattattcttcatctcgcattttagtatctatatattaattaatagtagcatttcaacttttgcataatatatagttattgataaaaagattattaaccactacttcctcatatcacaaatataactctactagcgactacaatatgaccctttggcagcaatttctgtacaaatatatggtcttaaatacaaagggtcattcaaagttaacttttcattaatctaatagccaatcttgtgttatgaatgtgtatagaaatttaaataatggcagtcaaatgtaaaacgtttaaaaaggaaaattctagatgtatttataattattattattggaagaattaattaacacataagaaagtactaaacataacttattatgaaactaatttataaccttacaattattattaattggagactccttttgaatcaccaaagttaatctccacaaaaaataagaggaattctagaatttttgtagaaaggaagaaaaatctgaccatcaaatgtgtagacttgcaacacagagaggagag

SEQ ID NO: 4096 - DNA, 5069 bp, Sorghum bicolor
cttgtgcataggcataactatgttgcaagcctgtgtactggttattgatcgttgggaattcgattgaaaactctgttccagttaaatattcccctgagacacagtttgttttcaagtttaatctccattggtataaccgaaagaaaaattcctcattaatttcttgtttcatgggcatgtcatcttctgtaggctcagacaatccatacttgttcagagcaagtcttggacctggtattacagagtctggtgcacggagaccttgtaccacaacctatgtaaccggggaagagtagtatctataaggcatatattctttgcggcgatgataaaatagaaaataaataaccagtctcatgattataacaggagatgatgatattaaagctctatggagcaggctaaccagtctcgtgattgttatacctcatcaccctcttcaaaacagttgattacatggaacatgcagaatggttcaacattaaaccagataactgaatctgcattgccataacggggcataagcccaattctcgcataactttccttctcaaactgcaacaacctatgccgagggctttcatattatgtttgcaaatttaatcaagtagagcaatatctttaactgaaaaggttttcaaagttacatactggccacctttgataagtctattgatgtcgaaagtaagtggtacatccatgattacattgtacctatatacatcaggagactgaattcatcagtgctttgttgtaaataaaattcatcaattctagcatcacttatcaatacagtgatattttagaaatatggctcacttttttttggatgaaacaggagggatgtgaacccctactggaattatactaagaaggtaaaatgacaacccctactgaaatatggttcactttgcaatttattcaggaaaaatgaattttgcacatactttggagtgactcctatttcatgacaaaatatacatctgtccagcttgagatcaactctatgctttagtttggttccatcagctgcagtaagttagaacttcaaccaggaccttgttttaccaaccatgctataaagaacatgacataaaactgcaaactagtgtaaataagatacctgagacaactccaattactaggaatggcttctttgcatttattccatagatgacaagatcccctgatccaggagctacctaggttacgttcatgtgaatcaaaatgaattcgttggttttgcatattcatagagtgtagaaagatgtatcatattttggtttgtagttattagagattgtatagccaccacatattatactttgtactgtcttgtattataaggcacctcacctatatatatatatatgcaactggcttgtgcctagcttactgcctaggcctcgttcgtttggggtggattgagggcaagaattaatccagctgagcactgctacaataaggccttgttcgtttcttcaggattgaaggcctgaaacaattcctagctggattggtttacaaatttgtataagattcatcggcgggaacaattcctgatcccattccaccctaaacgaacgggccctaaatagacttgttattccagctggaactattcccaccacggagtgagcaggggagatccaaagacctctcgtccccggcgactcgcgccgcccccatggcgaccgagccccgattcgccgcggctagcctctctccatccaagaaacctcacgattcctcccctgccagttccgtgcaccggcccccgaccgactttagccaccgcaaccccacccagacccagatccaggctaaccagtgtgagcccgccgccgtgcctgagctggccgccggccgcccgcggctgcggtccgtcgtagtgggtgccctcatcctggagacagcatcggagcctgccgccgtccagcaacaggcgccccctcccaagcgtgtaagtttctcctcccagctgattcccaccaacaggacttccccccagcggcgcttccgcggcgaaatcctgcctcaaatccactgctgctgcttcgagcttcgggaccctgggccactccctcgctgtggagaggaaggagcatccagtccacttcccttctgctccttctcgagggaatcgcaggctggaggacgtcacgtcgactactccggcctccgccacgcagtcagactcccgaactaccgtgcagagtgaggcagaggagggggagtggactccggtgagaaggaggtactggtggcggagtcccgatttcaagtcaacagagcattcaagctccccagccaccagagctactttaggctacgtcggtgccatcggcaacattcgcgagctcctgcgaggtaaatgctttcgtttcttgccaggggacatgccgcctccaattgcagggatccatgaggtgcctcctctacaagtgttggggttacaaagcttgccactgtaagaagcccctgaagctctgcaatccacgtccccttgcgcccctgcctccacagaacaaccttcgcaacttccctccccttggtcggcacatgatgacaaggcctggagatccagctgctcgccccgaggagacctcagcagtggcttcttcaaccaccgacatggatcgtgagctgcaacgcctgtcctcgcacgcagttatcgcctggattggccggtcatgccctgaggtcaagcctgaagtggtcaagagggccatctgctcccagcttggagtactcggcaaagacgtctctatcgtcaagcacttcccggaagacttctacatcgacttcaagcatcgccaccaccgtgatgaggcagttgccttggaaaagcttccccatgggagcctggacatccacatcaagccatggcgattgcccacccatggtgacctccgcacctttgtctagaaggcatcccgctacatgcctagaatgagagcatcgccaagagagctgtggcccgcgcttgcgacatggactacgtggagcaaccgtctctgaacagaagggacaccagagccctctgcctctgggcatggacgtacaacccttcagatatcccgaaggtaacatggttgacattatctagtaggagagtggagttccacgacagagaagcacccccacctggctgtgggcaccatggccttaccttcaaggtcctgatacacctagacagggtggagaaccccccagggcgcgatgggcgcgttatgtcccgtggttacacttggcgctacggcgtgatcgacggcgacaaagtaccttgtgactaccacgaccagccaccccggaactccaccaacactcgccgcaacgacaatgacaaccgccgcgggcggcacaggtgcaagggagacaactggagctcgctgctctttcatagcctatcacaggccccaaaagatagggagtgtgaacgctctgaaatgaggcacgaccaccgccgtgacaggaattctgttcacggcaaccatcatgagcaccttggagataacaacttcaaccagacagccatcaacagcggtgataggaccaccacgcaaacgtcctcgcgacccaacccccgcaaccgtgcaactcccatcaccaataacaagggtccagcggtgattagcccacccaagcctgccccttcgcagggggccatggggcgtaacacaagccacagcccggttcgtgcatccgacggccgaggtagaagcctggagcgctccatgcatcactacagaaaaaagggcatgctccttcccaatggcggggccggcacatcaggactcgcccatccgacgcgtgcattgcagatcagccaaccaggaaggtggccatgacagtaaccacaactcatcacctgaacctctacagccagcaccaccagtggtctcctcgtcttcgtctgatccatgtaattcatcagtttgtgcaacaccaccgccatcaccggtgaaggtccaagatgtttctcacccccagaggcaggtgactagcctcaccacgcaggatcccttgcagatgcgtgactccaggcacagcagcagcatgcgttagcgacgtcgtttcatccctggccttgtctactcccggcggcgcaccggcatagagccatcggttctacaacctactgagtcgtttgtagaaggggccgcagaccctccccaagcaagccctgtgaggagcgcacaggtcgagcagaacgcggtgactgcgttcatcagcacagtcacacagccgacgccggagccgctgatccaaggccctccgaaaagggcagtgatgctacggcgagccaagaagcaggcctcacttccactgcgcaagagtgttcgcatcgcggcggcatcgtggccacgtggtaatgcacaggaaaaggctcgccaggtgctcatgaagaggcttggtatcctgcaggaggagggttgctcgtcagatgacatgctgctgcactacttcaggctgttcagtggccctctctcagagatggtgatcaaggcgctgacggctctatgtggccttgacaacggcatcagcatcagtactgatgctgattaggcccagttcctgaatctccgcaagggctccttatctttgtccatgttagtgtatatgtattctgtttcctgcaaagatgtgtgtgtcagctcgtgtctgtgctcaccaactgtgtctcctggaagctctacctccttgcgccaccacagccaaccagcagccccaagatgtaagttagtggccacattgggtgcagcatccttcgctcttgcagcagccagaggccttcagcctctaatcaggaatcatgatatcttaacctttagtcaagagaacagtttgtggcttgagttccacttttatttaatcctagggttcaactcaaatttttatggctcaacgtaactgttgaatcttaaactggaatgtgcgaggcctcaatgacggtgcatgacgcgactcggtcagtgaacttgtcctgacactgcctccactattgtatgtctgcaagaaacaaaacttcaagtgatagacgatagtgtggtgagacgcaccttagg

SEQ ID NO: 4097 - DNA, 4881 bp, Sorghum bicolor
aatggattcccgaactggcttcgcgtgactgttggcctccagagcagtttccaataaactgaccataactttttattgggaagtccaaatgacgaaccgtttcttgggtgtgaaactagactcgaagagctttccagaaatgtatgccatgcaccacgaaacattgtagattggtacagttttgcacggcaagttgtaccaacattctgtcacggcagactgttgaccttctaagcagtctgtactaattcgggtctgcagacaatatggagcatccaaactggtcgccactagattcattacaaagtagactcgacaagctttctaacaagtcctcatgggccttcatagcttctgtgattaaaaagttatgaaaatttctttgcactggtccgtttttgacttccactgttccgttttttacgtgtcttctaggacttgcactggttcgttcttcagcgtccgattcatccttctcttcttctatatacctgagtacaatcaaggtagaacacttaggtagtatataattctcattaatgttaaaatgaatctcacaaagtagcgcgtggacctcttgttgtagtttctttgcacgactacgtgtaaccggtccatcgatgacttgggctggtgtcggtgtaggtaaaacttgagtggttgtagcttgacttggagcttgtgacatcttgtttactggcgtggtcatatcagaattagacacatatttgcaaagcattagaatctatttaaaatggggcccttttccggcaaggcatttttgcactgatgcatataaactggtgataccatgcataaaaattaagggaacacagtggggcaagacattttttttattttcttttttgcactaaaatcccctacaccttttttcctctctctgattttagttttaatgcaggaagcactgtcatccgataagagagagaggaaggtgcacgacgaagtaagtgcattaagttttctttttgtgcactttttcccctgggctaactgtgcattttttccccactcggctcaccacaggttttacatgttgtacttttcttttggccgccatacacgcgctaacatgtttatattttttattaatctcaaattttatagatgcaagcacatccttcacaagaggcaaaaaaggcacgacgcactacaagggtcgaaaaacctagtggctctgtaagtatttcggctacacttttttctacgcaagttccactactgtatctaaaactgttgatactatgcataaaaatcagagagggggggaataccccatggcagcacacttttgtttagtgtgtcaagataggatagaattttcatacactgagaagagattttttattcccgcaaccaatacgtatgaacacccgcccacccagtatgcatacaaaccaagaaatacatggctagtacgatattttcagtttgtttttcttttttattccgtttgtcacaacgtaccatttctccaattaagttgtatgcaaagcattagtatatctttttttaatcaggcattttttatggaagcctttttttctggactgatgtatataaactgatgttactatgcataaaaagtacagagaaacacccgcgacagtacacattgtcatgtgtggtcagacaggacagagtttttatacacaggggatggggagagattttctttttcctggaacaaaatacgtaggaacatcctacaatgtatgcataaaaatctaggaatacatggctagtaggatgttttcagtttgtttttacatgggactgaatttagatacatatggtttaactgaagaatataattgcatttatacatcatagatcacacggctacaaaatgtgtttatctgtgacacttctcataaggtaccatttttctccaattaagtttttatgcaaaacattagcatctttttacgcaggccccacggtggaatatccgttgcgcaccggatgaagtggcagagatgatgaaaattctcagtgaagaacaaaggcgggtttttgttcgtggttataacctttcgagcttgcttgacattaaactgacgagcagtggccccccttcactcctcaagtggttatacgaccacattgaccccaacacaatggcactcagagttggacctgggaaggagctgaagattaccaaggaagttgtgcattatgttcttggggtgtcgagcaaagggcagtctatatcagacaatgcttcctatactgctagagtcaatgaagcaaagaagctgcgcaatgaattgaatgtaacgaatgccaaggattttactgtcaaggtctgcacgaacagaatacagcagggtggcacagatgacctaacaaaacggtgcttcttccttgtcctattcaataggctttttttctcaatagccagctggcaaataaacaatgcagaaatcgggaaaaccatggacatgtcaaactttgacaacatcgattggtgccacatgatctaccaacacctggtatatgtggtgaagatgtggcacgagaagaccgatgaagagcaaacggcttacaccatatggggatgcagcactgtcatactggtacgtacggatctcatgccataatgctacttacatgcaatccctttgaacatattaatatgtcaatgcacagaaaccattaactgttcaatatatagaaacatgaaacacacaaggcacagacaacattaggaaaaaatgttttagtcactttttttaagggggcaggcacatgtcttttttttaaagcatgattgctatgcactttttcccccaacaagaatgtcatcaaatatatatgcgtaccgtagcctagatctcgaacgttgcgtatcagtttttatgcactatatttttttaggaaaaaatgtttcagtcactatttttttaaggggcacgcacatgtccttttttttaaagcctgtttgttatgcacttcccccccacaagaatgtcatcaaatatatacgcgtaccgtagcctagatctccaactttgtgtaacagtttttatgcactatatttttttcagctctactatttggactggctcgaccaccctgctggtcctaaaaataggttccaaacccctcgcatcagcatgtttactagtgacatcataacgaacctaagcagggcggattgtgtccatgaggggcaggctatcagctgctacggaacgctcaatgtaagcttctacactctataggaaatggaataacctctccattattttttgttatctaagctagttaaaatgcactagaatctgatcacgcaaacgatatgtagttccgccccccagcacagacatgctacacggctgcaccagatctgggaagcatttatgtgcctaagctatctaagttgctagccggaaagatagcatcattgaggggaagcagccggcgacacttcgaggaagtgtgtgccacttatgaccaagacgttgacaggcagtgccagacaatccaaaccgcaataaacaacatcgttgaaaagcaacacaacatggtcaccacctctggatttatgatcgatcaggtactacgagcaggggaggatgacgaggacgatgataatgaatcaggtatttaaacatccttagatagccgtgcattttttttgatatatactttttctcatcatgcgcgcacatctgtacacagcaatttgcaggttcagtcccatctacctacacaaaatgcagtttttatgcatgttaagactgtgttccccctaacacttttttgttactatttttttatacaaaaaattaaacagtcgggagcccttcaatcaagagcaccctcagaatcatcagatgcacacggcagtaccagaccccaccactggtcacgacaaatcaattgcatctccagaagtcgaacaaatggacgaggatgttgaagaagtccaacaacctggtacagcctggaacatcctgccttcttctttttttggatttccataatatttttttaacgcccaatacgacgctttcatttacatttttttaacacacataagactccccatgttcgttcacactcatgacatggacacttccctgcagagccagatgctacatcgatggcacagcaccacgggggtgaggacacaggatatggtacatccacttttcctaaccccccatttatctgatctcccataaaccagcagccttttttgttttcataaatgatccaatcattttaactcactaattagctatactccgccacctcatcagcagttcaagacgctgcccacccccagtccaggggagtatcacctcaggaaacaactaacaaggagaatgtcgaacatgcccatcaaactggtacaaccctctttgttattgacattgcattttgatacaaccactgcacttttccctctgttttttatttgccttgatacattactgtgtgtttttattattgggtcttggggttcatatgcatacacccatgcggttttatgcactatacagaaacaaaaaacaaaaaaaccgtgggaggaactgcattgagcatgccaccagtagctttttgtttccataaatgatccattcattttaactcactaattagctatactcccccccacatcatcagcagacaaacccccagcccacccccactccattggagcatcacctcaggagacaactagcaaggagactgtcgaacacgaccatcaaactggtacaagtttttaccctctgttttttaattgcattttgataacattagtgtgttttttatcaacaggtcttgtggggttcatatgcataaaaaacaaaaaactgtgggggggtgttgcattatggatggtac

SEQ ID NO: 4098 - DNA, 5913 bp, Sorghum bicolor
ttgaggatgcttccactacttttgcactatgtgttgttatgtcatataaacgcttcataaactcatatgtttataatctacatgcatctaattgatatattatatttcatagaaatcctaatctaaataaaaaaataaagttagcaacaaacttctcatattttaatataatattaagaagtattaagaactaatattagaataagataaagttttataccaaaatctaatgtaacgtgtctacaatcaaggccggatgaagggcccgatgctgctgagacgcagcaccggaatctccgagagatacaagtctagagaaaattaaggtgttgtttagtttgcaaaaataaaaattttagatattatagtatatttataactataagtaattagtgtttaattatggaataattagatttaaacattcatctcgcaaaatacatacaaaatttataattagtttttttaatttatatttaatgatttatacatgtgtccaaacattcattgtaaaggaacgaaaagtttttttaagcaagaactaaacaggggctgtctaaaacttcaaattcattccttttcaattaatttagcacctcttctttaatgtagcactccttgtgtagtttgtctgggtccaccactgtctataataataataataataatatcagaaaatgatgatatagctctgcataagtcataacgcaacttctgagaaaacgtgatcaactttatatatatatatatatatatatatatatatatatatatatatatatatatatatatatatatatatatatatatatatatatatatatgccttaaaggagaaaatatgagaatgtggaagagagtagaaagggggtgatcaatcaaagagagaaaagtatatatatatatagccattgagaatttgagagcatcctcaaccgttttgcaaataagctttgcattcatgtatttacaaaaaagtcttaaaaacacttatctaacggtttgacatttagactttgcaattttgttaacttggcaaaaagagagaaaggattggcatatatgccaaacctgttcacacttgatattggtaaattggcgcgaagtgattaatgccaaaccattagagattgtctcttttcacttttattatattttttgagacttggcaaactctctcatttgccaaactaattatgcaaaacggttggggatgttttgatatatccaagtgccttttcagtcgttcgaagggcatatccatagaataaaattgaccgcatgggacaagatgggttttgcaccactcctgcttcctcatcaaggatataaagcgcctccgcacttttttcaaataaaaataaagcgcctccgcagaagggctttcgatcctttgtgtgacaacagactataggctcctttgtgcttttctcttcttctgaggccagtaatccacgtagtcattcaagaactctggaaattataatatatctaaaagcaatagtaatccttctttatgtatgcttaatgcctagattttaaatcatctaatgcactatagtaatttgaagtgactaaacaaatctgatatagtccgaggattgtatttctagttcaataatcatcttttgattgaatagctaatgtgagagtacgtgtcatgtcaaattcacaacctagatctagatgttctaaccagatctatatgggagatacgtgttagtggattagatcaaatgtggcttagttcacctagaaatttcataaaaactatatagaaatttcaccggaatcagtttattttttacaagcaattagattgcataggaataggttggaggaaaattttttgggggcaaactatgtttaagttgtgggcttcaattataattttagagcactattgtcaatatatacaaataaatattattgcttaaaatgcacgaagcgaggctgaggggcatggtagcacacataaaagagcacgcagacttgaagctcagaagatccggtgcattttccaactctaaactaggcaaacaccagcgaagtctcagcttctccgaggaagggggcgcaattgctcaagcagcagcttcacttggggccaaacagaaatggcggcttcttgcgcctccaccctcccttcgctctccttcgtttcctcctcttccagttcatcccgccgattcaggtaccattactgcaaccgctgctaaaatctgtttttatccgactcgatccgcgtggacggttaagagcagaaagacgattcttggtcggttcgacttcgtggttcttgaacgcaggcgctctggtgtggtggccatggccagcgttgggcagaaggtgtatgcgcccggtgtggcggtgtcggagggcaatggcgggctccagaaaatcgacctcaaatccccgcacgggaggtacttttttttttcatttcttcttttgtccgggaatcacatcaagcgatcaatctgcgtgtctaatctgtatgggattagggactgtgtactcttggtttaggtgatgaatttggagatgtatgcgatgagggactgtgtacttctggtttaggagatgagtttggggagagatgggagcttgactgggggctttaggtaagatgaggggagcattataggttgcatcaactgcatatgcaacacgagtcacaactcacaatactagattaggggaaggggaagtgtaacaagagtttgactaattatgcatggtttccttcgctggtttacctagtagatattatgatttgcaaatagtgtttatcagatgcattttcctgtggtatggtatctgtgtttggcagcctcctaacctgaccttggtggtacatttgcatttataaacttatcctggatcccttttgctgtgcaaccaaaaataatgtacaccccttcccctcctcccccgttcctcatatttctttttagagtgctcttctttttataggacattttaggttttgaattaaagaactctggaaaaaaaaatactttggccgcttatttctcttgcaatataaatttccacaaaactagtgttcatatttaaagatatatcaaatcgagtctagtgatgttactttattaccatatagttgcatataatttgactaattatatttagtttgatcttttcaaatcctaatatgccctataaaaaggaattgatggagtactatctttaactctcgcttatttttcatttactgtcaagtgccaactaaatgtgtaatcattttatgcatgaagcgaggctgagatttatctgtttggagcatgtgttacttctttcaaagtccctaatggcaaggacctgctctttgttcgaccagatgctgtgtttaacgggcagaaacccatcaggttagtttcaagccatagaacatcaggtttttatccaatagcatgctaactacatactttttttgaaagcagtggtggaattccacattgtttcccccagtttggcccaggtcctatgcagcaggtttgtgaaaccaattttctattgtaacccatgttaacacaaaaaataaatatgatacgaagcattagtcttggtggatatttggtcccaaaaagttaatgataaaattctgctgatgccacagttaaatatagaacgtatcttggcaaatcaagaaatggaccccaagttagctgtcaaattttatcttcaggaattccatcacgtctactaggtttgatgaatcatagtaccactatcgatgtggttatactaatgatgcagctatgtagcataatgttatcacatttcataatattctacatgataacgaaacacatattcagtgtactctttgtaccttaccaaggctaattttactttgatagcatggatttgcacggaatgtgaattggtctatcacagattcagaagtcatggaaggagatccaactgtaactttggaactgaaagatgactcttatagtcgttctatgtgggatttcagcttccatgcactgtacaaggttaaactccggcagtgtactatgtgctttgatgttttctgtccatacacattcataaccttatcatattattgaccacagaagtggtagccttgtgctttgcagcatatggatttgagtgtatttaaaaatatttgcaggtttccctgcactctacaagcttgtcaacaactctagaaataataaatacggatgtcaagcctttctcattcaactcagcactccacacttatttctctgtaagttgcagtttcctggaaccttccctttctgaaataccatgtagttgatgttcacatatttggtttacaggcttccatagctggtgtttctgtgaaaggtctaaaaggttgcaaaactctcaataaggatcctgacccgaaaaatcctttggagggcaaagaagagaggtcagtctggatttttgtcaatagttatgaggaactctgttttatgcatgaaaaaacaaattagactctggtttcttttgttgcctcattggacttttgccgatcttaccacagtatttaggttccctgccttacattaatatcactgtatgtgactgggagcagaaagcaatatttgcatttagtaccacttttgtctaaggtgttcagagttgctgcatcacctagtgtatttgtaagtatgggtatgctgttgagcataagtttttaatccactcaataccatccagggaagaggtgacttttccaggattcgttgactgcatctaccttggtgcaccaagtgagctcatcctggacaatggattgggtgacaaaattgccatcgcaaattcaaagtaggtggagatctggaaatataaaggactctgttttgacatcttgaagtccacattattatggttgttatttttcatatgcagttggtcagatgcagtcttgtggaatcctcacttgcagatggaggcctgctacaaagattttgtctgtgtggaaaacgccaaggtattacaacaactgtgcaacttgagttagtgtttgatgtttcctggaatcctcacatttgataattgcatgattttggatgatggtataaataattttgtcatgtagattgaaatggtacaactggagccaaaacaatcttgggtggcagaacagaaaattgaactagtctgaagaccttgcagcaattgcatcaagtagagtgagatgcaaatggtgctcccccaatgtaactcttcatggcagtgtcatcacaatagctatacatgtgatgttttctgctaataaaaagaataaatgatgcaaatcatggtttttttgccgcagtctcttgatgtgtactgaattgcaaatgtataatttgaactgcatggactctgttgaaatggaagggagtgcccattttgattttcgacatacggagtatctgatatcttttgcttctgctactgaaatatgtttgtccagttcgctggatatgcattatgattctactcttaacgttaatgtagttgaggcataaaatcaacaacgttctccgtcaggcctatttctcttataaaaaaaatgcaaagaaatcgtgtcttacatgtttcctgctgttgtgtgttgattctaggtaataggctaatatggtcaccaaaaaaacagctaagcagaatatttattgagcgagaatatggtacatcccagcactcatacagctaaaatagagagcaacgggaggagcaaaagaaaagaaaactaatttacagaaacaagcatgacaaaattacagttcagggggttcagtcactttggccataaacgcgttttgctgaatcaagtgtgttgccaagaagcatcgcaatcgttactggtccaactccgccaggaactggagttatagcagaggccacattcactgcttcttcgaa

SEQ ID NO: 4099 - DNA, 5216 bp, Sorghum bicolor
gggtttttaatgagacaacatgtgcaatacaattaatgaatgcaatgtactcttttctccaagaaccgtttttcccattgggttttcggatggagtttttaatgaggcatgtgcatatcgtggtaatcgcccaagggagagtgttgtaaaacatatggacttgatcctagaagaaaaggagaaagaggaatcctaatcctagtccgtttgtatgtgggctcttaccaaaactcttaggctttggcaggactatatatatgtgggagctttatgttgtaatcaccaatattcagagaaataaagaatagtctctctataatgtgtctatttgttcttctacttcatctactatgttgatcatgagagacggagagagaaagatcccaaccactggcaacatgttttataacatactcaactactcatatactactactagaagaaggaatcagcgagagatgagtgagtgagagacgaagcttagtggggaccgacggtagggggaggggggagtgagcggcgaaggaactttttatcttgaatattatataagtatatatatatatataactagatagatttatgtgagagatagaaaaaatatttttttgttgtttaattttagatgtagatatgtagatagatagatttaatttatgatgaaatcacattgtataaagcaatagctctaaatatagatatatagatataggtagatttattgtacaatcacattgcctgattcctttcctatctagcgcttggtgaatatatatctcgataacgtatctatatctatctatccctatgtatctctttcattattttatttacaattacattgtaataatatatgtgtggactggttattatgataatttaatctatatttatatttgtatcgatctatatctaatactaaagagttaaatttctgccacaactaattttttgtccaacttaatactaaaatgacccgatctcgatcgtcaggccccggaaaaccatgtccgttttttctttgtgaaccgttgttaccatccttttccattttttccatttcctccaccgctcaattctatacgtgagtttttgtttcaatttttccagcaggaaatcggacggaacacatgaagaaaaaaaaatgatgtaagggttccaatccaaacgtagctagagcagaaggaataaatatctaaaatcaatggtaaacaaacatggattcaacactccaataaaaaaacaacatatatagattacgtctcgcaaacctttttgaaatcgagtctaacggacctaccagagcgaggtaaacaaggataaaactaacaaatccagacgactacaaataaaatcggatcacataaacctatgtcctggcaccgtggtcgctagggttgggggtccatcgcaacatccgcccgaggccgagctgttggcctgccgctccgcgcgcatggctaagccgctacgaccaagctgtcatcagcttgtcacaccgctcgtccaccgcgttatggtccgcggacctcatggtggccaaggtaggtcgacacttgaaatgccctggcacatagcaacaaggccgtcgccgcctcaagcctatcgcgctatatatagtgctcatgtagtgctccatggtccttcgtagtaagcatgcttgcctctcctaagcagcaagattggagaaaatagagacacaaaaattggggttttccatacgtgttaatgtacgtcctcgagtgcttatagacacgtgaaacgctctagaaatttactttgattaacgataaatgtgtcatgatataggatgtattttattttcttccatgcaagtatagaaaacacaataaactaaatcataataattgctgtccattatatttttaataagactggtttttctcccatttacgtctataaattctgctccctttgttgagagaaaccacgtacactagccagtaggcccaccaccacacagcacacagcacggcggcatggctgccgagctcacgcagcgctgcatcgtcttggtgccgttcccagcgcagggccatgtcaccccgatgctgcacctggcgcgcgccgtcgtggaccgcgggcacggcaacatctcggccaccgttgccgtgcccgacttcatccaccgccgcatgggccagttctccgccgccgaggtcgccctcgtgtccatacccagcggcgtagcggacgacggcggcgacgacgagccccccggatccggcagcttcctgcacgccatggagcactacatgccagcccaactggagggcatgctgctgacggcgcggcgcggcgccgaaggagcccgccgcgtctcgtgcctgcttgttgtcgtcgatctcctcgcgtcgtgggcgatacccgtggcggcgcggtgcagcctgccggtcgtcggcttctgggttgggatgttggcgacataccgtaccgtggcggtaatcccggagcttatcggcaagggcatcatctctgaatccggtattatattccttttcagttctcctgtatttttacccctgcaccatatcatgcatgaatgcagatgcagatatttatcaatttatgtcgcccgattgtaacattgcgtacgttgaaaacacacattaaatttatatatgcctatcgcaagttcgggggcacgtttagcaagcaaagaatcgcaccaatatgaaaagccaaagccgaggcaaaatgctgcttttttgcttgggcactaatatataaaaagtttttttttatgaaactagaggagccggcgtggcccctacagaaaaattactaaataaaataaaaaatgataggatttaagaattacacaaacattacaaagggttgaagatgaggggagagaaattaggagacaaaaggaaacaaagaaaattaaacaaaatcttgggcttagatcatttctaaagataaaaagatcctcatttttctgtcggtgtaccgataggaaaattaattttctcatttttctgtcggtatgcgctgtttttctgtcggtttatcaccaatagggattttttagtttccagaccgccaataacttaaacaaacaaaattggcaaaaattatgtggggtaactggagactccaactcatcttttgcaaggattgtcctttcgcaaagcgagtatgggaactaataaaacagtggtttggctcaagtaacctgaactccatcaatgtgacgggatcattgcattcattctggcgcaaatgttgtgtaccaagatcgaaagaaggaattttgacgggatcatcatttatttctagtgaaacttctagaaagagaggaattgaagaaccttcgatcactaaaatttgcagccaagagaaatagggctcttatgcaaagaagatattcaccaatttcagttggcgacaggcacgaatgttagaccaatttagtgattttgtggccggtgttgttttgcttttttttttgtctttcatcagtcgtttttgtttgcagttgtttgcaggtaggtatagttgcgaggtgctggaaggggctttgggtgggcgagacttgcaattatctttgtctcctttatctttttatcgtctaatataatcggcagtaaagcttttgccaccctttctaaaaaaaactataaatatgcctcgctgtatggacaaccaaatggttttgctttattcagtagactaaaatatcctaatttcagcattcttctcgtgacagtagtcatgcatgatacatggcctgtgctaacaaactgtccttgcctaaatgaaggtaacctactgccagcagacggaaccatgaaagatcacaagaacattggagatctcaacatattgccagcaaagttaaaactgagattcaaagatcttccatggctcctggacagcacgcttcctcaaaagtcaagaatcgacttctggcttcaggcacttgatcgtgcaaagtgcctgccctgcatcctcgtcaactccatccccaacgaaggtggcaactcctctgatgaccagcatcagtatgatctgccacaggaccagcagatgctccaacaagttggtcccttattgttcaacgacgactcctcaaagaagacgacctccatgtggctggctgacaacacctgcatagattggttagacaagcagagccctggttcagtgatttatgtttcgttcgggagctgggctgcaccgatccaacctgacaagatcactggatttgcgcgtggtttggaggcctctggccggccattcctgtgggctctcaagaaccacccgtcgtggcgagctggcctcccggataattacgaagagaaggtttccggccgtggcaagatcgtctcgtgggcgccgcaggaagacgttctcaagcatagggccctgggctgctatattatgcactgtggctggaactcggtgctggaagctgcacggcaaggggttcgcatgatatgctaccctgtcactgcagaccatttcatcaactgtgcctacattgttaacatgtgggagattgggattgagctggccagcagtgaccagagtgatgtgaaagactgcattgagagagtcatggaaggcaacgagggaaagcatttgcagcaaaaggtaaatgagttgagagaaacaatcacggttggtgaggccatgggtgttgccaagagtaacctcaacttattcatggacagaatcaataacatttaggttgataagggcgtaaaagaatagggcaagtattagtaatactgacagaatgatcatgagatggtccatccctatttccaatagtatctctttttcttgaagtcaaattttagttttaagttgatagtaatgcatttgcttccgatgtaatccatttgtgtcgtccccaagagacccttaacgttgtgaaatgaattggaaagacggtggggtaacacaaatcaatgttaccttttcttcaggttgcgctcattccctgcaataataaaatgtttcctaatgttttttgctctcattccctgaaaactgatcagttcttttgttcctaccaatgaccatcaaaattctatctagcttttcctcatatattttttctttctagaaccgtatggcattcacctctagtatagttggcatatgatacaaaaaaataaataattggcataccacttacccctcatattttcttcgagtacattactacataagtggcaaagcat

SEQ ID NO: 4100 - DNA, 5304 bp, Sorghum bicolor
ttactaaattaattactgtgcatcctggatctatttgtcacattgtttgctatagaagggcaaagtgttcgaaaattatttgctggttcaaatgatgagaaggtgaaataggattaacagggaatgcattgcttgtgaattcaaacatgacctgttccatgagaagcgaacttgattcaaatgatgcacaaacatatttgccaattccctttgtgccaccagatatggcagtggaaaatatgtaagctttctggtcaaagtatacaattttctaagcttgatagtgtttctgaatgctgagaaccaaaaaaaatcatggaactgaatgagataggaaagataactttcttatcagatagaaggttatccagaattctactagaggagcttcaaaggttatgcatttttagctttagacccaaattagtagtctctccgggtgacatgaatcatataacttattgcttcaggcggctcgtgtgactgatgaatgtttcagaccaccgtgccattttcagacctgctgaaaattttcaatgataggagaaatagtaacaaggctcattcagcctggtgatctaaacacttgagacttggttcactactgagtactgacatttatgtgctgcagtgcagtagatccaggtaaccgtgcttgctggcagaattactgcaaaagaggccctcacagtagtattatcagtttcgagaaatcctttttcggagaacatgcaagacatgcaaattatttgtttgttaagacaaacttttagtaaataagctatttgggtgagaaatttaaataattgtcaattttgtatacatgaaaagttggcatcagttatctgcttcatcttttgtctatgtactgggtttgtcaactctgcatttgtgagacctgatgcgctctcatgttatttgacgtactagaaatactagagttcattcttgttgtgtttacagtgtactttgactttgcctatttatacaggatgaaatggataatattgaattgcttgtcaccatcaccgtaattgaatacaaacttgtgactggctgtgaaacagtcgcttacgttttttccatagcaggtttctggcagtggacatcggtaaagtgcaggggcttgctggtagctaatgacagtcatcagccaccacacaagtacaggagttagtatatgatcgatggcccctgcggcgctgtgttgacgcgcaccgtacccgttggatttcgcctctagttttaagatttttttttatcaccatttcacaaaacaaggatgtataataatggatctttttttttgttagtgccatgtatgtaaagctttgtaaagtatttgcagctttgtaaagtttgatggccctttctttaaacgatacaccgacgaccgatcgatacctgaggtatcgttgtcacagactcagctttgtaatgctttcttcaaatttattgcttcagttccaaatttttttggttttggatactggaacactttttatttatttaacaattattatttaattatggactaattaggtttaaaagattcatttcgtaatttacagataaactgtgtaattagttttggttttcgactatatttaatgctctatgtatgtgccacaagatttgatgtgatgaaaatcttagtttttttggtttttgaaacaaggcctgcacttgcagaataggagtaatgcccttgtctaactccccacatacatcagtattactgtattatacatgcaaatgccatccgtataaaaacatccaactcatcctgagttcctgaacccatttcgcctttcttcctcacgcgcaaagaagacgcacagaacctacgccgccaacgcgctgagagagactgagaggtgcgactagggttttgctgccggtagccgccgccggtgccaggaaccaaaccatttcctgccgtctggatccgcgatcccacgaagcctctctctatctccatctcctcgccgacgatggaaatggggaggaggtggcgttggcacgccgtcgccgcgctcggcgtcgcgtgcgcggccgccgttgttgccgccgccgccgacacggggatgggcgtacgtaactcgacgcggaaaactgatggtggcaactcgtaccacctacgtctggccggtaatgcaaaaagcgcctcgtgctttttgacgagcaggattactttgtacttgtatatcggaatgtgtctgcaagtgcaatgttttcaggcacgatttcgcaaacaatgtggtgcattttctggatgtttaattctttcgtgttaaaacagccaatggaatttgggtggcggatcgtgctggggtcactaatcgggttctttggcgccgcgtttgggagcgttggcggcgtcggcggaggcggcgtcttcctgccgatgctagcgttgatcatcggctttgatcccaagtcatcggccgccatgtccaagtgtgagcatctaatgctcgctccctctattattcctatatttatggatcagtagtcaacagaatgatcgatgctctgtgtttgtgatcatcaacaggcatgatcatgggtgcgtctgtgtcaactgtctactgcaatctcaagctgaagcacccgagtttggacataccgctgatcgactacgacctcgccatgctcatccagcctatgctgatgcttgggatcagcataggtgtaatcttcaatgttgttttccctgactggctggtcacggctctcctgataatcctcttcctaggtttgtttttttcataatccccaagcaccttgaaaacttcttgtctaatttgattgcccttgcattgcattgagaccctgattgctgattgacctgggtttgcattttcaatgcaaattgaatcacagtaacatcaacaaaggccttcttgaagggcgttgagacatggaagaaagagaccataaagaaaagggtaactcttgcccaatcccattgtaatcttcattttcgtttttctccctctgctatactaattggaatgctttcatctcttccattccaggagaccgcacaaagagtggagcaattatgtaaaaatgatttctttatgatcttcaccaaatgcgaaacctcttccttttgattaaattgtttccctaatataacgtttcagatcaggaaccagagcatgcaacaatagtccctatagggtcaggtgatgccgttggcgcaaagaatccattacatgatgagaaggcaaacttcaaatgattcaagtcttgcattttccaaacaatagccataagatttttgaactagatttgtccaacgtttcagaagtcatcacttctgaagaatgtttactggaaggagttcggtctccttgcatttgtgtggctggcattccttgggcttcagatcgcaaatgtgaggatccatactacagcctctccgctcgtctaacattcagttgcatctcgcataaatttccatgcatattgtaatcagtttctttctttaattgcttctatcctcttcacaagtaataatgcctatggtgtcctctttcaatatttgcagaagtacagtgcttactgctccgcgctatactgggccttgaattctctccaggtttcaatgttaaaaaaaacagatgggatatggcgacaatattagccatatgccatggactgttgctataggaatttttaggatttagatggaaatttttctaaattctaagagaagaatttgattcgaattgcaatcctcgtataataaaaaaacttggaaagcatcatagattaaatctttattttctgttgtcttgatgcagatccctgtggcagtaggagtgaccatgtatgaagcacatgggttggcaactggaaagaaggtgttatcatcgaagggaagccaacagaatgccctaaaatcttgccagctctttgtatactgtcagtttggtatcattgcagggctcgtggggggtctactaggtgttggaggtggcttcattatgggtccattgttcttggagctcggtatccctccccaggtacgctcctatggtttgttttgaatacaatttcattaaaagttctttgggttttctcaagctgtgctttatgagcatttctactagccttgaggtaccattgtataaattaaattgcggtaccaacgattgttatctttgggttataactaaatttcgacagctgaggtacccaaaaaaagtataatttcggtagctcttagtaatttctaaaggctataaaaacctcatgctttaagggtggaacacatccctaacaactggaactacgataggtttctagtgctacagcaacatttgcaatgatgttctcatcctccatgtcggttgttgaatactacctcttgcacaggtttccagtgccttacggtaatcttcttcttcttccacatttcctccatgattattacagtgacagctggttctggattcaattcgtttgccttgtttgtagctgcttacttcatcgcaattgcattcattgctgccatcatcagccagcactatgtgaggaagttgatcagtcggctagggcgtgcttcactcatcatcttcatcttggcttccatgatctttgtcagcgcaatttctcttggtaccatattctaaaactagctgagattaaccagaatccctatggcgcgctggatagttacataaataatcatcgtcttcctgcaggtggggtaggaatctcaaacatagttcacaagattgagtgtcaccagtacatgggttttgaaagcctttgcaattatggtgcgtaggagataaataaatcagttttgaagtggaaagcttaccgtgaagtcatatgtcaaaaaaaaaaggagaattcatatcagagtagattggtcgatttcatcagagccagggttagtaaagataatatagtcgcgcagttaaacttgtgcctcttgtacaaaaatgcatgtcccgtacatgtgtgtaaccacatctggagaatggaaccgcgtcatcctggaattagttgcaaccatcactcacgaaattatttctgtgaagtcgatcatgaggaaaaatgaatgacgacgaaacataaaaaggttgtgtccacagcgcgcgtgtgatagtgttgtggcaacgaagaaagacatgatgcctcaaaattttagaattaacgcacatctatctctactttttcccaggtcgttctacccatctcatcgtaatcttaaatcctgtgcgggagacaaaaattattacaatataatgtgaacgggcgggtagaagtatccacgacaac

SEQ ID NO: 4101 - DNA, 6396 bp, Sorghum bicolor
  misc_feature (1863)..(1962): n is a, c, g, or t
tactccacaacacgtcaacacgtttccaacgggtttgccatagtaggctagtagtatgtttgcaattgttttgtatctatgtatacactcatgtgtacagttagaggattttataaacgtcatcacaataccgctggttgctatctctaagccacagtgaaatgtacaatatccgggattttgattgaatttgttggttactatttctgtgcaattgtgtcgctgatgtatatgtaggatttattttaaaatttatcacatagcggggatagctcagttgggagagcgtcagactgaagatctgaaggtcgcgtgttcgatccacgctcaccgcaaattatttactttttacccgttaagattttttaacctttgccggtccaatttttttcttttttttttaaccctttgtcaatgtcttctcctaagattttcaacacaagaattcaccgcaagttcttgccgttccaaattttttctttttttaaccctttgtcaatgtcttcttctaagattttcaacacaggaattcaccgcaagttttctttttcagcttttgtgaacccgagtcttttttttattttcctttttaccaccattttttcttttttactttttaccccctaagattttaacctttactgatctaaattattttttcttttttaaaccctttgtcaatgacaacacaagaaatcaccgcaagttttcttttttagcttttgtgaaaccaaatcttttatttatttttcctttttaccatttatcaacccaagaattcaccataagttttctgtgttttttctattttaccctttgtcaacaaaaaattaactcatcctttttacctttctctacccgcattaatttttctggtaaaaatagcatttccttttcaccctttctccatctccaccagcccaaaaaaaaactctctttttttcaccctttctccaccggcatttatttttgagtaaaatccataagcggtccttaaactttgtgctgtcatgtcatctcagtccctaaactcacaaatcgattgtttaggtcctcgaacttgtttgtctgtgtcatctcggtctctaaacttgttcagttgtgtcatctcggtcactaaacttagaaatcatccgtttaggttctcaaatatttattcacctgtctcatcccggtcactaaacttggttttgattctcaggtcaaaacaaagcgacctaaaaactctatatcaaaaaataattcataacattttcatattaactcgaatgaagataaactttataccaaagttatagtactcagcacatataaccttttagttgaaaagttttttatttgaagtttgttagtgttataattttttttttaaattttaaaatatataaacttagaaaaaacattttgggaccctgaacgatttcaatttaaaaacttttcaactgtaaagttatagatcatgttgctgcctataattttgatataaagtttatcttcatttaagtttatataaaaaagttatgagctatttttcaatatagagtttttagattcatcatgttttgacctatatgagacttaaaaacaagtttatggaccaggatgacacaacataataagtttaaggacctatatgagagatttttaagtttaaagatctggatgacacaaccgaacaagttcagatatttaaacggttgttttacgagtttacaaagcagaaaagtttatttaaatatctaaacagtcgttttatgagtttaaggaaccgcccataaactttactctttatttttggagcatccagttgggcatttcccagctcgcgccgcgcccccgcgccattccccatttcacagctannnnnnnnnnnnnnnnnnnnnnnnnnnnnnnnnnnnnnnnnnnnnnnnnnnnnnnnnnnnnnnnnnnnnnnnnnnnnnnnnnnnnnnnnnnnnnnnnnnngaacgaccccgcgcacacgccccgtcctcccctcgcccatggcgctcaagcagaagggcaccgatgccgccgctaccgacaccaagaagcgccgccgcgtcggcttctccggcaccggtaccaaactcgacccacgcatcaccctgtcatctcccgcgattcgtgcgtctgacggcgagtctgccactgcaggggtcccattcgtatcgtgacgcggcggctgtcttgttgggcgccggcgcgcgttcattttttgtgcttatttttggtctggccgtctggcggcttcggctgggatcgtcctgccatggatgtgcgtgcggagcgtagcgagagggtggtgcttctcatttagatgcttaatttggtggttgcgacattgaaggtggggagtttattctctgttagtcaaaaggggtgggaaagaagttgctaaattgttaggctttgccctgttttctgaactgaggttgtgcattgtccgtaatgaattgattgtctgcctctggagcactggatctggcccttcttgcttggttaagccctgatgcgctgtatttagaggttttcgatagtcacaaaggttaaaatgtgataggaaacggtgaacttctccaccttttgcattctattcattcttacgttttcccctattttgctttctttgtggagagcactcggcataaatcaaactgtagacctgttttgccttttacaaacctgaagagacatcagactttttgtggttctatcagccccataaggattgttctgtgagatacaatcgtacaagttaattgcgctgtttgttcatttgtgtggatgtcccttgcacatgtctgtgctttcggccgtttttgtttatttctgacctacaggtgaactggttaaatcactttctatttcctattgttgtgcagatgctggtgttgaggcaaatgagtgcatgaaagtatttctaggtatggaattgctttaaatatccctctctaaattgcaaattttagcaactatcacaccccttctgtatgtactatgtatgctgtcccttttttctcatattcccactagcttctataacatttttcacatattggagtttttcagttactagcaatgtaaaaaatttaatgtttatactcagtaaatcataatcctgttaatttggttccttcagttcttcattttttttcttgcattggttttgtggcagtaaggaatccagatgaggtgggctctgtagactgcacttctattgagccgttcgatctaaaccatttttttggtgaagatggaaagatatatggttacaaaaatcttaaggtaaaggactgttattgaaataacagactccacccccttctcccactagcttgacatgtgagttatctgacatgattgtatttgatgtgcttgtttgttacagataaatgtgtggataagtgcaaaatcattccatggatatgctgatatttcatttgacgaaacgtctgatgtgagttagttcatcgaagaatactcaagcaactatgttgttatgacttatgagcctatttgattatagcattccatctgtatagaactttgactttatgcgtatagatgtttctttcaataaaacttttagcatgtgcagttactccgtatgattgccagccacaactgatactacttcaatatgctttctgaatccaaatttcaaagaagttgttgatacttctgttagttacaaacttgtcccttgtaattgtaacctttgacttgttttacatttattatgtccatttctttgatgtatcaatggcacctcacagaaaccatgtctaaccttcaaccataattcctcatctttgatgcctttctttaacatttgaatatattggctatagttcaatgagtgatgaaacagagattttaaaacttcagttgacatgtatttgttagtaacggtaattagtccttcttgatttcctcaagtcctgataaagcatttttactgatatcttccagggagggaaaggaataacagatctaaagcctgttcttcaggtctgttttgtccatgatgttcgtatataactacagacaatctctgtgcataacgtttcctaactcataagctttgtttattctataacagaacatttttggagaaaacttggtagaaaaagaagaatttctgcatacattttcgaaggaatgtgaatgtatcaggtactcttgtttctgaatagtagtatgctgcagcagtattatttgttgcttcaggaggcatgacatagttacttgtactgctacagaactgccgtgacaaatggtagtgccatcaagcttgatggctcatatgaatcagacccagcagttgaggtaattttcccctataatcctatgcatttgtgattttgatctgtaacacttatttaactttgttctctgatttcaactcatccaattaaattgaatttgatcatgtttaccctataatttaggacactatgttttcaaaatcaatataaagtccaatcacttactctgttaaaatgcatatatttttccatattcagaatgtttaatctagtatgtagtatgaatctgttagatccattgaaatttacattcagtcttttctctgttgttcaaaatgttttcctatttagttcccatcaattttgatatttatttgcatgtaataattcccagattgttcgagttgaactccaaggtgctgctgcatttctttattctcgtctggtaccgcttgttcttcttctggttgaaggtaactgaaggttttgaaatataatagtctgttttacaaaggacttctatttgcttatatcattgcactctaggttccacgcctatagatattggagaacatggatgggaaatggttttggtagtaaagaagacaacacaagaggctgtttcgaaatttgaactgctaggttttgcagctgtccataacttctatcattatcctgagagtactcgcttgcgaatcagccaggttggccctcttacagctttacttactatttacatcatttatgtggggagtctccagtatttagtccatttctttgaagttattccatggcactgctcggttattctttttgcttttgcacccatgggcagtctgttctttttcagatgttaaactgacattgacagaggtgtatcttttggaaagtaaagcaattttccggtcctgtgaggtgcttatatgatttttgttgtacttttccagatacttgtcttgccaccttatcagggtgagggccatggtcttcgtcttcttgaagcaatcaattatattgcacagtctgagaacatatatgatgtaaccatagaagacccttctgactacctgcagtatgtgcgctcatccattgactgcctccgtctcctcacgtttgatccgatcaaatctgcactcagtgctattgtctcgtctctgaaggagaccaacctgtcaaaaaggactcacagtttgagaatggttccaccagctgagctgatggagactgtccgtcagaagctgaagatcaacaagaaacagtttctccgatgctgggaaattctaatcttcctaagccttgactctcaggagcataagagcatggacaacttcagggcctgcatatatgaccgcatcaagggggagatccttggcagtgcctctggaactaatgggaagcgtctattgcagatggtaagcagttcaaatgaggagtcttttgctgtgtattggacacaggagagtggggacgcagatgaccaaactgttgagcagcagccagaagatctcaagactcaggagcagcagctcaatgagctcgtagacaaccaaatggaggagattattggggttgctaagaacgtcacctcacgtggcaaggacaagctggtagagctggtggcccaatgaatgaatttgggtgattcctacttgagatgatgttaagatgctgttgaagctcacctgttgagatgtcttatgggttggcttctgggtagaaaggaaatgattggttattacactttcatcgtagtgttagaaccaatacaaagctaggcactaagtagattttgtcacggcagattgttatgtacttcaattctggaatctttgatgaggatgttattttagatcgcttggcaaccatgccaagctcagaagtcagaagtgttccatccatttccatgcactacttcccattcagacttaggcattggttgaatttttagggtgatcactgattcgtgatctgtttatgatcaacagtcgatgccagtttccggagcgtattttgggctagctacatcagcaaatgatatctgtccaacatcttagcgaattgaaagggcatagggcactgccccagtcttagcattaagcatagacaaaagcatcagtttacagcttgt

SEQ ID NO: 4102 - DNA, 7115 bp, Sorghum bicolor
gatctttattaacgggtgaagaatgggcaacagatcgggccagactgacttgttggccggcctcactaatattatagggcggcctcactagtattagggcgttctcgctgtgtacaaattaaggtcagatgcggcctcggaagtgttagacatcgttggtgtgtgtgactagacgtacgtcaacaataactctataaatactatgaagacagtagggttcgtcttatactcttagtgctacgatgatcgatcgtcgttcctagctcagaccattaatatatatatatggcgcctgcgttcttggttttactgctgctatttgcccctgtcgccgtcagtcagcaaggtataccgatcgatctctggcttcaaccttcatttcgtcgatccgtcgatctcatatgcatgacctcagaatgaaccaacaactgatgagtcgtggatgcagatttcttgagcatcgactgcggcctggacaccaactacagctacacggacacgatcaccggcatcgactacgtccccgacggctcctacgtggacgccggcgagaaccacagggtagcggcggaatacgagtggtatttcgcccgccatcaaacgctgaggagcttcccgtccggcgagcggaactgctacgcgctgcccaccgtggccgggacgaagtacctggtgcgggccatcttggcgtacggcaactacgacggcaagaacagctcgtcgctggagttcgacctgcacctgggggccaactactggacgaccgtctacccggacgcgacgagcagctacgtgttcgaggccatcttcgtggcgtgggcggggtgggcgccggtgtgcctggtcaacaccggccgcggcacgccgttcgtgtccgtcctagagctcaggaaactcggctacgggctctatccgcagctggcaccacaactcatcctgtctctctacagacggcgaaacatggggggaaacgtttcagctatacggtaatataatatagtcatagttattatagtagttatttatagtagaatacatacagatatagatttttctaccttatacttgtgcaaaatctcttaggtatattgtttgggtatagtcggattcatatcaatccatatgtgttggagtggattagagtgaaatttgaactaaattccacacatcaatacacttcgacacatgtggattaaggtaaatatgataacatccaaacaaggtcttagtggtactcaatacaaaaaaatatgataatttaggagaccaaagaataacccaaagttggtactcatccaaaatcttttaagtcttatttggatgcacatgtatttatctcaatccacatatgtggaagtgggttgggtggaaattaaattaaattcaactccaatccactccaacacatattgttgattgagatggatacataagcgtctaaacaaggcctagtggttgtttcgacctatatagagtagagctacttttcttaaaacaagttttacagtgtggtcactcgttttatgcttgaatataatgtttcaaagtgttttaatttttttccggttagtattgaactgaattttgcaatcacatattttaaaaaatgaagaaacttttacggcccctgcagtcgaaagaagaaaataatggccgtgatttgtgattgaaaacaaccttgtatcataaagttacatggtactgtaagttattttgaagctatagaaatccataccagtttccccaaataaactaaacacaacaattatgtacatcgtaaacgtgtctactattgtcttacaaaatactctctccattgcaaattgtgtacgccattttgatttttctggtctacattcattttgttttttttttagttttttcatcagaagctaactgtcattcattctcaaatcaaaccggatatatatacatctaataactttctcttgattcggagaaggtaccctgatgatcggtacgaccgtttttggtggcccatggacgaagccagcccacggtgggtgaacgtatcgaccacacggcccattcagccggacgccatttacggcgtgccgtcggccatcctgaagacggccgtcgtggcgggtggaaacgacacggcgatcaccgtgaggaagtggcagtatgacacgccgagctcctactcgttcatgatcctcctgcacttcgtcgacttccaggacactcagcttcggcagtttgatatctacgtcaacgagaacgatccatcgggaatggagctgaagtcgtacaacaagacatcgttcctgactccgtcccatgtgtacactgaatcctacagggctcccgacggcaactacaacatcactcttgccaagaccaacgcctccgtgctgcctccgatgatcaatgcgctcgagatctaccttcgcgtcccgtacgagaatccgacgacacttgctcaagactgtaagctaccccagctctctctttttccctcatcgaaattggatgttcagtttagctgttagccttgttggtacacacactacaacatttctatgatgactgcgagtgcaataaaacccactgttgcgcctataaacaatacagcagcccctgtgccccatgtgctcgactgaatgtcgcttaaggcgatggcactaaattggggtctgaactctgaacctaggatgttaaaatggtttgacaaagattctactttgaatcgacttttttttttatttttcgttttcctctcttgttcttgtacaaacaatggtttttctaagtcatgtatgtatgtgggtgattacgcccagttcccaaacatagtcatgactaattttttgcatactagttgacgccatcatggctatcaaaactgagtatggagtcaagaaaaactggatgggtgatccatgttttccaatcaaatttgcttgggacggcgtgaaatgcagcaatgcaagtggtaacacgtcgaggataacatcactgtgagtatctgatgcattatttaagagaacctacatgcatcatcatctcatatgtgctagtatattattggtggattcaatagctgatttatgttgaattacaaattctcatgcagagatctctccaacagctcgttgcatggcacaatatctaagaattttacactgctcacagcactcgagactttgtaagtgctatataacagcaggctaatgtcctctgcgttcataatttatgtcccaagggttcagtgttcacattccatgactggcaatcccgtttactacctgtgatcatgataagtcagtttctttggcttatgtgttctgtgctaataattttgttggataagtctagagatattttttggaattaatctatagattacaggcctctgtaaaattataatacaataaaccactctccccaagctcaaacctctataccgaggagataggactcgtgacatatgttgcgttctactttagtagcatacgttgcacctcattttcatgcatatcttgttctgtttcaaatctatagttgccaatcgaatggatgaggcaatagtaggagagtcttttctggccatatttggcataactgcatccgtcatattttcgaattaataaactagatcaatcgtttatgtttaaatctatcaatatttagtgtaccttgctctttagatggacaatgctattacaaaattaattgttgtaccagagcatacttgtcaggactatgttcccaatcccaatgattgaacgacaaagcttttagttcttactactaaattcctttcctgtagagtttgaatcaaatatctatgtaccttttgccttactgaagttatgcaaatgtttcagagatttatcttacaaccagttgagcgggtcaatacctgattccctaccaagtttgccttccctacaagttctgtaagtgtatatttgtcgcaaattattaccaacccaaggacgttaccaatcacctttcactttctacaggaatgtctctggcaaccagctgagcgacgagtccctatgtaaaaattatactggacaacttattttcaggttttgatttttttttctcagtatatccattaatatgcttctgagttttgtattgtatttcttgctgtgaccttcaaacaagtgactgtttatgacattttctcctcgaaaatagatccagttctgattttctgtactttcagacatgatggtggctctgtatgcaacaaaccttcaccaagcccaccaagaaataaagtagctatcatagctatttcagtagtggttcctgtgttggtagtagttttacttcttatcgcatatttcatttggtggcagaaaaaaaagcctaatggtgtgtatcctgttgctcaattctttcctgacatgtatcaatcctttcaatttataataattgacctttcttatctgatactagtgcaaccagtccccataaatggcccaacaagagatccagaacctgataatgcttcgggaagtaaaaaaggtcatgtgtacaacctgaagaaaactgagaatcgccagttcacatacaaagacctcgagaagttcactaataatttcaagaagttcataggacaaggaggtttcaggcccgtctactatggccgtttggaagacagcaccgaggttgctgtcaagatgcgttctgaatcatcatcacatgggcttgatgaatttttagctgaggtaccaaatttcagtggcctagaaaaagcgtattatcaatataaccaaataatatatgttgggtaccttgttacataggtccagagcttgacaaaggtgcatcacaggaatctagtgtatttgattggttactgctgggagaaagatcatttggcactggtttatgagtacatgtctcagggcagtctttttgatcatctgagaggtatgtctatggaaagcctattgaatattgatttaggcataaccagctatgtgaccttttcaatttgcttttcaaatatctatgcatggtttggacctgagaaactatcttgactgacttataaatagactcggccagggggagagacatccccctgattttcgtcaagaagatggtgccgtgactcgaacccgggctggctcagccaaccgcttatttggcgtgttgtgctgaccagttgcaccgtgagagtgttggcttgactgacttataaataattctggtatctgaaaaatcagaagccttttttggggtatctacacgtcttcctactgaaatgcctaatccttagtgacagcttggttgcgaaatatttgccagcatcctgcttatattgtcagtccatcttaacattgggatgagggtgacttgatgctgtgagctacatccagttaccttaagccccaccatttgcctatgctttattttattttagtgtatgacttcagctaatgtgtatgttagaggatcagttttattttgcttattaactatattgcaattccattatagaagatcatatcaaaacaaggaaaaggaaacattccataactttgtagaaattgtcacgtcaagcttttaaactgttctgttatgttaaaacattgaaggtaagaatggtgtttctgaagccttgaattggaggaaacgtgtacaagtagtgcttgaagctgcacaaggtatgccgcaacaaaagcacatcaagaaaactggaattaagcaaatgcttcatatggtcattattgctattctcattttttgccatttcctgtgatatataaaggcttggattatctgcataaaggttgcaatttgccaatagttcaccgtgatgtgaagaccaacaacattcttttgggtcaaaatctgcaagctaaaatcgcagattttggactttccaagacatatcttagcgatacacaaactcacatatcagccactgcagctggcacagctggttacatggaccctgagtatgtcttatctttccctgtgtattttattagcatttcggtattttctccatgtagcttatttcttgaatgagtactaagtgaaagaaaactagtgaaactcgccttaatacaggcaacttggtttccttctcttgcagttttcttattcaataaaattaggcgcgtacggtgctgtgttttgcgaacgtgctatagtgaagcattgttgccagctgctggtatgaagtgtttatcttgaacttcttgttgctgtttcttcaggtactaccacactggaaggctcactgagagcagcgatgtgtacagcttcggggttgttctgcttgaggtagccactggcgagcccccaatagtgccaggccatggccacatcattcagcgtgttaaacacaagatttccactggtgacatcagctcaattgctgatttgcgacttggaagtgcctatgacatcagctccatgtggaaggtaatcgacaccgctatggtgtgcaccgcggattctgctactcaaaggccaacaatggccacagttgtgatacagttgaaggagagcctggcgttggaggaaactcgtgagaaggacagtagcatcagggcaaaccaggcgagtgatatagaagctatggtgtccacatttggtccattggcaagatgaagctgtgcctagacctggattcggttcatggctgacgcgcctctactaaaagtctacaatggtttatggtgaactccttgttatatgaagacaactagtgtataattgtgtgctgttttgaactgcatttgcttgtgtgtaaggatttagagagtccaggcttgtgtgtgcgagtaataaggtttggtgtgagcttgcagcttctacagaatccagatattatgagctccccatgctctgtatgtatttttaacaaatatttcccatgtttgtatgtaattgcatggtactagaaacataaaggattgattagtttgaagggaggggccgataaattgagcgtgagcctttccattccaccatgcatcctctgttcaatttccaacggttttccttggatatcctatttgccaccatgattatcattctattcgttgttcatctgcatttgtgtgtattttactggttatcacaatactatctgcttagatggctgcctt

SEQ ID NO: 4103 - DNA, 6069 bp, Sorghum bicolor
acattttcggttgttacgcctgttctacatggcctatatatatatactgatagctctccaaaacattatagagcggatgaagggtccagccaataaaatttctttaacaagcacaatccaatcattaagaaaacagaatcgagatgtccagctacacaaaattaattatatagttaaaaccaatcatacgtctaaaatatttggacgtatcatactcgagagttccacgaagcacatggttggaaaagaataaaatcattttgctcgtggccaacatttcaaaacgctaaagacacggcaaaagcagcacataagacacacaggcagccattttatatattgaaccttagcagagaaatacaaccaattatatgcgggccttgtttagatccaaaagatttttttcgtttttatttgacaaacattatccaatcatgaagtaactaggcttaaaagattcatctcgcgattcacagacaaattatgcaattagtttttgtttttagttatatttaatgcttcattcatgtgccgcaagatttgatgtggcgaaaaatcttgaaaagtttttgactttttggggtgaaagccgcaatatctgttaattatattgtactccctttggtcctgtacatgtggtgtgcacaagcatttttttgtttggtcacatgcacggatccagcagcggcaagggagttggaggccccgccgctgctgagctagtggagtttctactgttttttttctaattttaaacacaaatgtataagataggggtggctgacacctttattttttataatatattttgtgaatttcattcttgattgatgtttttaatataaaactacttaaaactattatatttttttctattttgaagggtttacagtagaactaagtcaatatagcatttttgtttaacctcctaattttttgacttcatccctgtttggtcataatatctgacggagtgaggataccaagactaaattatagtttatatgattggttaggaacgaagctgcatgaatggtgactagcaacgaagcgcgtacttagagcaggttgcccttttcactttatgagtagtaaacaagttaatgctatatgtctaaaatctctatcaacacaatctctcatagatgatggtagaatttttattttgatacatattttttttgtgtgcatgtgtacacgtgcatgtcctcatatttgcataaaatagggtacaatttggttaacttgataaacaaaagagatgaatggatcaaatcagagtggatgatgtcactccaattttttggtcagatacaaaatatgtgcatatgtagaaaattatatacttgtcaagaaataatttagaaaaaagataatagcaactaatacacaaatagtcttgcattgtagttttttttggtgcctatcacaccgacaattaacatttagcacataaaacaacaacatcaccaaatcagatttcttaactaacaagtttttttatccacatatcctatagtttagtcgcctgaacagttttgtctttgttcttccatagaaaaaaaaaatgatttgtttattgtgagttgtgctaatagatttggatcattggatggagatctgatggttgatagcttttgcctaacaaatgatatatttcagacacttgaaatatagcatattccttttctatcttgattttttttagtgtaggaagagaaactagcgctatcctatttaaaacactcgataatccgtatttatatccattagattttactgattttatattctacctcgcattcctacacaatcaaattcagattatctaagtttttttaaaaaaattagattatcgatatttaattacataaaatattcaaaaatcttttaaatataaatatatatctttataagattcggatttagatcggatgctagtcgccgtctcaacttttgttgcgcgtgtttaaactagggtttaaccggggccacacgtcagcctccacgccgtggttttctccgcctttattcccccacctctccacccatccgccgcctcccaatcatccttccccaacctccctccatccccgcagcatctccacgccgtcacacctcgtcgcgtcgtcaccggcgagaagatggtcgggccgggcctctacgccgagatcggcaagaagaccaagggtgggtgcccgtccgtccatctcgcccctccttccccacggatccctttcaagctctgggtgtcggggatggagttacgctggatttttctcttttgattgacggttcccttattatcgttctccgcagatctgctgtacaaggactaccagactgaccacaagttcaccctcactacctacacctccaatggcgtcgtaagtgctccgctccgttcaaaacaccccccctctcctcttcttcgccttcggtcctttgtgctagggcgtgggcgtgcagtgctttcgtcggacggggacgaatccggttgatgtagctgtgggatgggttcatgatcttctattggattcgtctgtggggttcggatcctgttgctcgatcttagcgagtgagtggctgtttggtagcgaaagccagcacaggagattattatcgattagattattaggttcctgcatagccctgcttattagttgtgctctgtgtctagcttcttgttcgtttttttttttgctgtagggtatatgattcagcaatgtgtgatttacatgcgatgctcttttactacttgttgtgagtaagtgggtcgctagagaataccacttgaccgggggtgaaaagggttcgaataaaaaggacagtggaaccccatgtggttgcggttctaataaaaactgtgaggtgatgtgaaatagcagcaagcttgagttatgtaactgatgtcgggctcaattttcaaggggtgcaacacatgttagcactatgtggatagtgggatgacagttgggtagtcggttatgagtagaataattgtaagtagctgagtgatgtcaatgcggttcggtggattccttccatggttggggtgtgagtaaattgcaggttttaatgggttttagaattttaggaaaaatgtatctgtactgaactaaaacaattgaggataatagaactataattgaagtatcaaacaccttataagacattgaaccccagttatgctgttaccataatgatgtttctcaactcatgaatcatgatgatgaattttgcatcttgtattttcccttcatgtattggaatctggaattatatatgctgttgtctaaatggtaaggcttgcgtgatttaacagctaatagtttggcgtgcgtgtgtatatttgattgttctcttaatgctgcctacgcgcttgtactgaaaattgttactatgttagaattatgtccttatgattttagtatcctctgttgcttttttcatgcaggctgtcactgcttctagcacaaagaaagctgacctgatctttggtgagatccaatcacagataaagaacaagaacattaccgtagatgtgaaagcaaactcagagtcaaatgtaagtctctgtctgtatatgtatatacttaacccctggaaattgcatgctttcctcaaaatggacatgcaacatgttcatttcttgtgatatcacctagactaataattgtagtttgacaaactagatatcaagcatgctatttgtgttggtcaacagtttgctctttgactaattagttgatctgtcatatttctcactgtttgagttttgttgactgcttgctttgatgtgctgttcagatcattactacagttactgttgatgagattgcaacaccaggactgaaaaccatccttagctttgctgttcctgatcagaggtctggaaaggtaattatctaattcagtttattatttcttaagtggaaggttattcttcaatgtattcatttatttatttctggttgcaggttgagcttcagtatttgcatgattatgctggagttaatgcaagcattggtctgacagccaatcctgtcgtcaacctctctgctgcctttggcactaaggctcttgcagttggtgcagatgtctcacttgatactgccactggaaacttaaccaaatacaattctggactgaggttcactcatgaagacctcatcgcatccctgagcctgtgagttttcaaagtgtagtaatcttatatattttggcactgtatgtcactgttatttgacaatgcttaagattatttgatacttgtaatttctttatttatggttaagtgcaaatccctgcttgatgcatcctaacttcaagcgtgcataaaaattagtcaaaatattaatatattgtcaccgtgatttcaccttttgatacatttctcaaatggagtttttgaaagaagcaactttataattttgcttcactttttgtttgcaacaaaaatgagtttgtaactcactcagattattgcacgtacagaaattggtcaaagttactgactttgctaagcgttttctgtttcattgaaaaaaagggatctcttgcagtaagctggtggcaatatggctaatattgagccgtgcctccaggaagggtttgatgctcagtattttggttttctacttgagtaaaaagtcctatgtataattttgggtttgaagctcagtattctggttttctaattgagtgaaaagtcctatgtataatattctaatattaaatgaaactgatgtcatagctcctcaacagatataatcccgtttcttttaggatgtttactgtcttattattgcagtgtggccttccaaatttcatgttactgatccaaccttctcctgcaggaacaacaggggagacagtcttactggagcttactaccacaaggtgagcgaattgaccaacacagctgttggggcagagcttacccacagcttctcgaccaatgaaaacaccgtcacctttggcgggcagcacgctctggacccactaaccgtcttgaaggcccgcatcaacaactctggcaaggccagcgccctcatccagcacgagtggaggccaaagtctctggtcaccatctcggccgaggtcgacaccaagaccatcgagaagagctcgaaggtcgggatcgccgtggccctcaagccctgattggttataagaccattttttttccttctaagctcctagcatgactgtttgggtcagatcaggtcagctggggaaaacaaaaactgttggggttcccggcatcctttggtcgttgcagtctgttgatttcatgaactgcgtaatgcttcgttgaggaaatttttcggtcatctgtgtagcgctctgttaaatgagcaaccttcacaataattcaagctttagaattctgaacttgtttacaatggttgattgtgactttgtgtcaactgaggtaggggcgattctgttttctgcaaccatttttctgtcttggtgtcggcgacttgacccaatcgattgatgtgttttttattggtgctgtcttaattaatgtcatataatccgatcagtttctgctgaattcagttgattgtcaacctcatgcttggttgccagttattctgttttcacccatggtctgtaccgtgtgacggtgtgagagacgtcttccatctgatacgagcacgtcttccagctgatacgagcatgagaaatcaatataggtcctgataggagcatgataattcaggccttgtttaggttaccccgaaaactaaaaagtttttaagattctctgtcacatcgaatcttgcggcacatgcatgaagcatgaaagatagatgaaaacaaaactaagcacacagtttgcctgtaaatggcgagatgaatcttttgatcctagttaatctataattggataatatgtaccacaaacaaacgaaagtgctacagtagcgaaatctaaatttttttcacatctaaacaaggcctcatttcttattataccgggttgtcgtttggtgacatgtgttgctataatgtatttaaactatgtttttaattgaacggtcctctatctacaat

SEQ ID NO: 4104 - DNA, 5796 bp, Sorghum bicolor
tggcctgtctagcatagtagctttgctgccatgtctcgtcctctcatgcacagaaggggaagtcgactggttttgactcagggagtcggatcaaatccgagggtactcaatttagttcgtgaaagaaacagtttttgaatactatatatcacaattcatatttgtaattataccaaccaatcatagacttattagatttaaaatattcgtcttgtaaagtatatgtaaattgtgtaattaattattttttaatctatgtttaatgctttatgcacgtgtctaaatattcgatatgatgggatgaaaagtttttgaatagaaactaaacagggtctaaggtgtacacatgaagtgtgtttggttggcatcccaacatagctatagctttcttgggccagtgttcgcatgtttggtccttgaattaggtttgaggtctggctaactaaagtcagcctggagcctgaccatggatccgcctttcttctaggagatctgacgcgtacctgcagtcctgtggcaaggacctccgccggggcatcaacttcgctgcccggcggcgccactgccatggatacgcctttcttccaggagatcgacgtgtccaacaagctccgaaccaacctctccctcagcgtccagctcggctggttcgaggagcacaagctgtcactctgcagctccccaaaaagtccgtcacttcacattgctttgctttcttttcaatactcaatcggattttgcatttgggattttgaccaaacaaaagaggatattgtccaatgattaagattcaagtacagcactgattgcaattttttctcctcaccattgtttactgttatctctctgcattttggtatgtcctgcattacatttcacacatccaatgcctcaaggggtgaactcaccttctcaaataaaaggtgactctacacaaagcaagtcatctaacgaaacaaatcttttgtctagccaggtttatacaatacagacaatcaaacaactgttaattagcttagttggagcaggctaaggctggtctggcggaattttgctagccaagctcatctagaaaacgaaccaaacgcaaagctgctttgagaagaagagtgctagcctgtataacgagattggcagaaaatcaaataactgagatttatattacaacattatgataaagagaaatacaagcaattaagattctattcatgataaagagaaacacaaacaattaagactctattcgtttgtcttataagtcgtattttttattagccagtaatatttttctctactaataaatcaataaataatatttttaatcataaggctcgcacataatggacgacactaggaatgaattcgaagccctgccctcggtgacatgtcaaacgtaaagataaaaacagaacgaaaatattccgtaccgactgcttttgttttttatattataatatcgttttctatattataatactgttttcaaattttgtccatgttccttttctatattgtaaaccgttttcatccttagtcacatgtgtgcccacgccatgagcggcgaataacggttgtgccacttatccccatgcgaatcttctcttatctcctctcccgactcacgaagggcgcgacgtgcgcgcgtgccgctgcgctgcgctgcactgccagtgacccagatatgccatgctgtccggcccccgtcctcatcccgcagctcactcacagtactgttgctgtccggcctccgtcacctcacgcttgacgaacgatgccgccaccgtcttcttcctcgcgctactctcccggccggctactcgccgcgcgcccggcgtctgccaccacggcatgttcctcgtttccattccgatcctttcggcctcttcttgccttggtcatctctgcatatgcaggcggaccgccagaccgtgtgctcatgtgtttgcacgtgcacgccacaggtggggagatgggcgtcgcgcctgtcgtgctcgctgtccatgaacgggtgcgcgccgggcgccggggaccgcggcgcggtgtgcgtgcgcgaggcgcgggcgctgccggccgcgccggcgccgcacgacgccgtgggccagctcagggccgccgtggacgcgctcgtcggctccgacgcgccgccctccggcatcatccgcatcgaggtgcccatcaggcagcgggtggacgccatcgagtggctgcacgtgcagaccgcgctgctgccccgctgcttcttctcggcacgggcgccgttgcccgacgcgcccgcgctcgccggcaccagcagctgcggcaacggcaacggcaacggcaacggcagtggccatcggcagcagcagccggtgagcgtcgcgggcgtgggctcggcggtcttcttccgcgggacggagcccttttctctcgctgattggcgcgcaatcaagaggtaaaatcgcctccttttgtactgtgccattgacgtacgtttccgtttacatccagatgatgttacttcttgtctggctttttttaacaacaacaaaaagggcatcatcttattttctgaatttgccatgtttggtatggtcgatactgaacctggctgcttcttgtgtttgcaaatttgtgtgtctatgaagatttcttccaagggactgtccactgattcgcgcatatggagccatccgtttcgatgcaacgagtgatgcttcggttgaatgggaggactatggatcattctacttcattgttcctcaagtaagttggtctgcaactgctagactaggagatgcaatgggatgctgtgatcttactctgaattttgtgaaactgtctgaagtctgaactgtggtgtaggttgagttcaatgagctcgaggagagctcagtccttgcgacaacgatcgcatgggatgactcgctttcatggacatggcagaacgctgtggaggagctccaatcaactctgcaaaaggtgcacatttctcttcgtccagtttttctttaccacctagaagatagtaacagtctgtagttctctcagatatcgccttgttctgttcaatcgaacaagaccagcctacaaacagccatagtaagtctcaatcatgtcccaaccaaggcatcttgggatcttgcagttactaaagctcttcagatgatcaaagggaggcaaagagaattggtaaaggtaagccgttctgttaactttgatcctattatattaacagccaaaagcatctctggatttagaggttgtcattccatgttaacaaaaaaatgcatagagaaaatagagaagcataatgatcaacattattgattgttgcttgttaactgtggccctgtgacagagaaaacagacaagtacagttgacactttgacagattgcacaggttcattgcttgtttctagccaataggtttcaagtcggacaatcttttcaattttagcactattcatgtatgattgatgtaaatccatgtggaagatattattggcttaatttatgatttattattctacttttattctctttttgtttagagcgtatctgaaaccattaatgaagctaccaatctttttcataggttgtactggcaaggtgtagcagatacattactgatacttgcattgaccctgtggaactgctagcttgcttgaaggtctgtatgttttttcccctatgttgcacattccaaattgattttattccatgagaataccaatctctaatttaactatacaggttgagggccaaaatgcttatcaattctgcatacaaccaccagatgctcctgcgtttgttggaaatagcgtatgtttactctgttctttttatttaaaaaatcatcaatgcatacttgattttttttcttcttctatttagttagaaaaaacagtcagatgtatttcctagttatgttgcagaaatgctaaataatcattttctaactaatgctaactttatgcaaacattctgaatagccagagcaactatttcaccggaaacacttgaatatttccagtgaggctctagctggtactcgagcaagaggaaaaacaagggcagatgactttcaaatcggtcaggatttgcttctaaggttcctttccctccttagaatttgtaacttactatgatcaagggagtcagtgtgaaatcaacaccttgtactaaaactgagcaagtactgatgcaaaattttcttgcagtaccaaagaggatatcgaatttactatagtacgggatagcataaagaacaaactggaggcaagttgagttctagactcgacatggacatattgcttttctgtgagggggatggtccctgcaatttaataaactagcctctgtgatctgatctgcagatgatctgtgacgaggtggttgtccatcccagcaaggctctgcggaaacttccaagagtacagcatttgtcagcacagttagctgcgagaataaggaacgaagatgatgaggtaacctatgaaaatgaaagcacttgtactacttaggtgaatatgtttgtatgtaatcgtcgagaaacatgaccactcctcatagtcagagtacatacactaaaataatgataacaagttctcctggcaatgcagtttgagattctaaatactcttcatccgagtccagctgtttgtggcttgccaactgaagaggcgcgcagattcatacgagatcatggtatgtctaacttttttggataatttgtagaatgtgtatgtaccacagtatttctaaaataagaacaatgcaatcattaaatacagtgatttgctagtactaaatttttaatattctcacagaaatttttgaccgtggaatgtacgccggtcctgttggttggtttggaggagctgaaagcgagtttgctgttgggattagatcagcgttacttggaaaagtaagcaaaactacgaatatgttaaagtttacctactatgcagttcccatcttgtattctaacttttttttttaccatacttgcatatatagttgtcgtattttacagttaccaatctcctattattccagggtcacagcactttagtgtacgccggtgcggggattgttgaaggtacaaatccatcttttgaatgggatgaacttgatctcaaagcatctcaggtaccatcttgtcgaattcatgataaacagtgtgctgggtttaaattaaagagtaaggctaaatgcatccaatttttgggttattttcagtttgcaaagctgttgcggtaccaagaacaacatattcgctaccaagaggctgaaaacttgggaacagtaatctgaatagagaagtacagtagtaactagtaagtcatcacaaagttcagcattcatttagctagttatcgtacacttatttgtttgatagtaaactagaagggattttcagttgaaaaattgtgtaattatgggattgagaacgggcggcggtgctggaaaatacattgatgaatcagcacgtgaatgtaacagaatatatttacagcataaactatttgattgaatcatcacgtgaatgtaataatagactatatttacagcagaaactcatggcaattgaaacactccattttgcaactttgctctgttcgcgtatataggcagcatactgtttgactaaatatccgatgaaactatgtcaaatttgtatccactggatcagtagtgaatctatccaacataagagcaagaatgatacggtttcatacaagcactgtgaaagctgaggttgtgacaatctccaagctatttgtactgcctcatttagaagttatatattacag

SEQ ID NO: 4105 - DNA, 5791 bp, Sorghum bicolor
tatttataataaaaattctaccaatacctacaacatcaatctactcaccccacctcaaaacgaacgcatatcttgtatttcaaggggctaaactatatttattatcaaaatatactccgtagtccaaagcatatcttggttactttaaattcattctaaattaaactttttaatttcgagtattaaagtattaatctaatgatgatacctagtaacgtcgtaggcattagcacttccattgtatatatttaactaataaatttagaaaaagcgtgattgtttttatatatgtaactaatgaatctagaattagtccaaaagcgagaggtgtatttttttttatggaggagtagtttcgctaaattcagttttgaaatggattttactataaaacttggttagagtcaaccaggcactcacgtggaaaaaaggaaggaaggagggggggagggggcagtgttctttttttctttgtttcctttatttatttttccaatgctcccatgcttttggttttgggaacatgggccttgtttagttctgaaaaaatttcagatttcgctactgtagcactttcgtttttatttgataaatattgtctaatcatgaactaactaggatcaaaagattcgtcttgcgatttacagacaaactgtgtaattagtttttgttttcgtttataattaatacttcatgcatgtgccgcaagattcgatgtgacgggaaatcttgaaaactttttggatttcggggtgaagtaaacaaggccatggtgatcgtggcggacacgcacagcggcacagcaccatgggctccgacgttcggtgtgggagctgagagtgaggtggccgtatgaccgacgggacacctgccgccacgctgctgaccccaatgccccaccacaccaccgtcaccgagcgtgtcagcaaacctgagagggagcagagcaccggaaatgcgaacggatattgtttagttgcaaaaaattttgcaaaataggtaccgtagcattttcgtttgtatttgataaatattgtttaatcatggactaactaggcttaaaagattcgtcttgtcaattccgatcaaatttgtgcaattagtttttattttcgtctatatttaatactccatgcatgcgtctaaagattcgatgtgacgggaaatctgaaaaattttacaaaattttttgaaactaaggccctagatttcctgccgaaagagacacacacgggcccgcaagtcgggagggattcaggaatgctcacacgagacggcacgcacggattatttgcccccttgcctttccaatcaaattccgaaaataattccttggcaccctttcttggaccagtaaggctttgtttagttccaaaattttttggaaaatagacaccgtagcattttcgtttgtatttgacaaatattatccaattatggactaactaggcttaaaagattcatctcttcaattccgaccaaactgtgtaattagtttttatttttatctatatttaacactccatgcatgcgtctaaagattcgatgtgacggagaatcttaaaaaatttacaaatttttttcagaaactaaactctacagagagacgccccgatcgtaattggacggaaaaaagaacacgacgcgggagacgaggggcgctgtcagagaaggtgagcagtgcgtgtcgtggacggcagctcgctttactactattaattagtttattataaaagaaaaacacgacggacgttcatttgttcgccatagccgagagtatagagtattgaaagctagtaatccaaaactagcattattatttatttatttatttatccgacgagacgaaaaggattgcggtgcggggcaagaaatatcattttattacttgcggtttcttcacttcaacccctgctgctgcctgcttccttccacgtcgttatccggaaccggaagagtagcgaggaggagaaaagatcccctccgtcctttttactcctactctttcccctcccgtccgtcctcgtctcgttgtcctccctccctccctcgcttctgcggtgcggtgcggtgcgggatacggccgggccagattcagtcagcgccttactccatgatccggaggagcgcctcacgtgccggggacgacctcttcgccacccagtagcagcaggaggcctccttgccccttgccggttgccgcggttcttgcttgtggagtcgggtttccaggtgaggcgcctgattactacttcctctctctctctatctctttcttcctttcctgcgatggttgatccttgcccttggcggcgtcggatccttctgcacctgtcggatcgatccgacgatgatctgatctgttgctgcccgcgcgtcttgatttcctcgtgcgtccagtgaaaaatcgtcctgttactgaaaatgaatcaactctcagacgtgtatcagtatagcgttcgattttgggggcagatccgactcctgtcctgtgcccttacttgcttgcttgcccgcagttcggggacaccgtcgaggaaccgcgcaatacatgttttttttagtttagttttctccaatcgttctggaagttgccacactgaaattggccttccttcttgatgatctaccgtgcacttcaacgttgcttgcatgtctcagcatcttgtattttcttttcttttcttttcttttttttttaaaaaaaaattagacaagacacttgttgtctgtttatggattctgcgtatctagcttccttgtaccatctattacactccttcgatgctaagcaatcattgatggatgtaatgattaggcccacccaataacacttgtttgctgcaattctttgtttgtccctgtccttcccacaagtaaattgcgtactaatccgaggccagatgattttgtgacacaggttagtagcatgcgggagtgatggcggccgccgaagcgagggctgcctggcaacgcgccgccaaccgctgcatggtccaggaggatgccaagcgagctcccaagctggcctgctgcccgccgcccctgcaaccgcacgacgcgagcgatggaagccctccgagtccgcaagacctccattcccctacatttatgcccatcaactggactctttgaactccagtctgcctatggtacccagtgtggctcctagttgcagcccaactttgggtgcaggcagccttgctagggacacctcaactatgtaggtggggacgccgctgagaagaaaatggagggtttagcagcgcctgtatccaaacttgaggatgtccaagcaaagaatgctgcagatccttttgagcctccgtggatcgtttcgatggcttccatgaagcaaacacctgagacgggtttggaggagttgaagaatcttgctttctataccccagtgagcctcaagtgcaaaggaaatgccaacaactgtatttacgaggataaagagtctgcagagttcaaagcttttgatcctctgtttcctaagaagccgcaaaaggaacactgtgaaatgcatgccccttgggaacaaaccaagaaatctcagccatggtggcaagtagctgatgtcgatggtttggcttcccttgtcgctgaaagagcaatggaaaacattattaacaatgatctaccaagacccactcagacagtccgtgttcatggagctgaagtgaagggtcgtgaaaacaaggatgattacgggctgcctgctctttctgtgggcaaagagccagatcctgtacatgacactatggagtatagctacagtgtttcaagcaccaccaatgacacgtattcttctgatgggggacgttggcaacaacatcaaagaaataatgtgcccgggtaagttattttctttcaacaagcagtgaaataaccacaagtccaaaaatacaatgatgtgtcttccttgtgtggtttccactgggttttccctgttttatgtagttctcctcactgatggaaaaacttagatgaagcatagtttccatgtactgaatttaagagactaataacatagtttccctgttttacgagttctagtttgtgtcaatggtgatatcctcctgttccctgctgtctatttatatgcaaggtccaattcagtatttacttacttcttttcaatgaaaagttatgtgtgattgtctgaagtgatctgtgcatcaatcataggaccagatagtaggtatcctttggatgcatctccattggaaggctttagatgtcttctatttgtccatgtcttgtttccggtccctgcccatgcactaaatattatcatattctgcagggatgcacaggattctgatggttccaccatcaatacaccaggcagcaagccaacatatcagaatgcttccgagagggccaagctactagatgctctccgtcattcacaaacacgtgctagggaagctgagatagctgccaagaaagcctatgacgagaaagaccatgtcatcaagctattgttccgtcaggcctcacacctctttgcatgcaagcagtggttgaaaatgttgcagctggaaaacatatgccttcagctcaggttcaaagaacaccagatagcaaccatgttcccggaccttccctggatggtggtgaaggaaaaggtagcaccttctcaagagcacaatgacgggactaggaagaaaggcagaaggccaaacaggaaaggtggcctctgcaatgccgttgcatttgctgttggtgttggtcttgttggtgctggattgcttcttggctggactcttgggtggctactgccgtagctggaagttccatcatcttcgatatgaccataaaggtgacaggacaaatgcctcctgtgcaaactaaattgaatggcaataggtaagctccagctccgagtctctgcttcatggagagtgaaaaagggcagatttttggaattcttccacggtagtctgttgatttggtgatggtagcttgataccttatgttggttcctgtatatataggatctggtgtacatactgccagaaactggatacctaggttggtagtgtgggtgtgggtgtgggtgtggatgtggatgcgatgcttatctgtgtgttgtacatagggtcagtggtggtctggtggaagatgaaatcagccgacttcaacaacgtatgtgctagtactgtaaatctgtagcttttatttgcttaattaatgtagcagaaattgtgttaatccgtgtaatgtgtgttgaacgtatttgcatgtcttctcctagtggttatggaccgagtctatttatcattctgtggattcagttattttgttctcttattctagaccacttggggattgtttccttggttttatacgggaaactggcacccaaacccatactgctgaaaattcagacctgggtcatggaagcctattccgactgttttttttccgatgttcgaaatttcaatacatacatcaaaaagagggaatgcaacaggtgcaccaattcaagagatgtcagcagatgtttttggatccgtttgtaaacgagtgagaatcagaaacagaactttgtttagctcaaactagtagcaaatgttttttaccgtctagctatcttggtcagtagagcattgtcattgccagctacaacgttgcatgaaacatgtgcaactgcagcgcaaaaagatacaacccttacattgcgtagcaagactcaaatgtgatcttttctctgcgctgttcggagggagcatggttgcttatgggacatttacttgtctaggccccggctaccgaatgt

SEQ ID NO: 4106 - DNA, 3360 bp, Sorghum bicolor
ttggagcttaacgagtcactcgtgaaaaatctgtaggtgaatacgcgtactgagagttgagagtttgcctacttccagctgtactcatatcatactaatgagcaggtgactttgacgacgacggcgagtcggccagaacgagagccttccggccggtcggcggcaccgtgccggtgcagggtaagcaagcaatctctgtcactgctactgacaacgaccgtggattcgttcgtacgtacgaggatgaacgtttcaagcaagaccaaaacgcgtttgttttatacacagtagtatatgatgcgagcgacgcgaccgcgcggcaaccggggcaacaagagtcgtactcgtacgtccgtcgtccaaaccgaccatcgtcggcaaagatgacaaggttacaacggacgaactgcatgccttgtctgcgttgctagctaatacctgatagatttcggttggtgaaaaaccttgtcaaaggtagacgtacgaggatgaacgtttcaagcttgaccaaaacgcgttttattatatacagtagtatattgatgctagcgacgcgaccgcgcggcaaccggcaacaagagtcgtcgtactcgtacgtccgtccaaaccgaccatcggcggcaaagatgacaaggttacaacttacaacggacgaactgcatccatccttgtctgcgttgctaataatacctgaaccttccatgcatcgcctgcagatttggattaacagtacgtatcgatttgtgtcagatttcgggttggtgaaaaaacttgtcaaaggtagacgtatggcgccgtgcaataattaagttcatatgctggatcgatctggatacaccgatggcgacctacgtggctacgtgtgcgtgggcagtggttatcgtcctagatatagcagcgctagccctaaaatatctgggaaggcgatagtgctgcactattgctagtctactacttgacgtccaagttttaccagtgcgagggtaacatgatgacaatgacttggccccgtgacagtgagtgccatggtatatatgatgacattgacacgagaatgaatgcaatatctcggaaagtggctctaaaattttcgactaatggaatgaattggcaaactaaccagtgcaactcgtttgactctcgactaggccttaaccaagaagctagcacgcggaagaagcacgaagcatcaataataataaaaagaagtgagtacacctggtgagatagaataggccttgtttagatgcgaaaagattttggattttgctactgtagcattttcgtttgtttgtggtaaatattgtctaattatggactaactatgataaaaaaaatttgtctcgtaatttacaggtaaactgtgtaattagtttttattttcgtctatatttaatactttatgcatgtgccgaaagattcgatgtgagagagaattttaaaaacttttttgttttccgagtgaactaaacaagacgatagtactatatggcatgtgatgagtagcaagtgagagcggtcagtcggtcaccaacctcggtacgtagggtcagctgatggtcagcctctgttgactaaagttagcctcagattaatctactagagcaagcttgctactacaatagcatgattagtactttacaattttctccatattctactaataaattatactaacttgttctttaacgataaatccaccggcatcatgaattgaacacaatatcaacctcaaaaattcattaactactacactgatcgagccgaaatggataaggtggaaggtatagaaaagctaacagcagcctaacacaggacaggtcagttcgcaaaattcggaagccagtcatgtgaagctacgtgcatggcatgcccggtcaacgcttgaccgtacctcgcggtggatgtaggtatgaccaacttttcaacaggaaaacgagttaaactcttccctacatatactactcctactactcgtgcaacgccggtccacccaacaagcctctttcttctctacgagcagcagagcaggctacggcctgatcgcgaaaaaaaaaaggaaagcagagcagagcaggggccgcccgaggcagaataatcctatctcctaccgagccggagcccggaggctcctcccagtcccgaggatgacgacggcgtggtggtggttcgtcgccatgaacgcggtcgtcgtggctatcgccgtgctgtccacctcctgcgcacggccacgacgccaccgctcctccggggtcacgcggagagcctcctcggcgtcggccgtgctgcagagcctcctctcattctccctcttctccttcccgtcggcatgcctgtcgtcgtacctccagcccgacatcgccgccgcaaccactgaccaagaaacagaagcagaggagctggtggcgtggtcaccaccaccacccatcaagccgtcaccgtcaccgcgcgcgctccagctcacaccgccgccgccgcccgcgccggctgcagatgacgaggaggaagaggaggaggacccgaacgcgatgagcatggacgaggcgtacgcgctggtcctggcgtcgcagcagcggccggagcgggagagggaggaagaggccaggaggtcggaggtggacgccaaggcggaggagttcatccgcaggttcaaggaccaactgcggcagcagcggctcgactccatctccaactacacgcacatgctcaaacagcgtgcgcccgccggcggcggccagatgttctccgggcagatcgctgctgattagctctgcctctgactcgtgtgttcaattcgtttaggtgtttgtcagcttattgaggggagccaataattatgtttcgattttggtgtttttgtacataataatgcttagcatatgcatagagtagagtctgcaggtgtatagtagtacgtacgtagtagctataacagatcatttgttagtcttctttttctttgtagatatacgtttttgcttcgcgcatacttgaatttcatttgttcaatatttaactttgttatgtgaacaagatacaccgaaacgggggatacgaggccacggggtgacttcgtgcctcataattcctctacattcctctcctactcgccaaatgttgtacgtgtcaactcgtaatagtgggctgtgtgggtatcgtgtgtcatgtacaggcgcttagcagctggggtacgggaacatgggcacgtttcccgttccgagaacttcgtccggaaacgtggaacgggaacatcatggaacatcgttcccaaatgcggtggaacacgaatcatatataggagcaatcataggaacgtcagttccaagcgactatggaacttcgtggtgtgtgtgcatactg

SEQ ID NO: 4107 - DNA, 4341 bp, Sorghum bicolor
tacaacctctacagagtgttaaaaactggtatactagccgtgctcacggtcacgaacggccttggggattcttacattaagggtgatgaatcttgttatgttaagatactcattgtttattgtttaatgctctacattatttatgtcacattgatcatgagaccgtgggatctatactatctagttgctatacttgcggagttcgtcttcgactcagttttgctatctcccccacacctcaggagaagtattgggcgtgtgatcaaccagtcagttggatcctgtagagtgaagttgacacccgaaatttagaattatcttccgtgatttgctgcctaaggttgtttctgatttattatgtacgctatataatttatgcgttgtcctttgatattactccttacttgtaactatatatgaggtttgtcttctaaaacttacatatggtgcatatctgattttattcttaaaatcagatgttacattagttcatgggatttaaacaagcccttgtttggaccctcaaagactaaagtttagccaactagttgttagtccaaggttcgttgaaaaatggttgcgagtccaagggatccaaactggcataaggtttgaactagatatcatatatataaaagtgcaacaagcattaaatgcaaagataaaaacacacgtaaagtaattggtaaatttatcagagcttgatagtccagatcatgtatataaataggtattgtgttaagaaattaatagagaaattatgattagtggtatgtatcaaatttatcaaaaaaaacctatgcttatcttttcttagcatgagttgatgggtgatttaggcaaattaaaatacggttggaaacctttaggtcccctaatttacaccattgcatgctattgctagctatctatggttataaatccatggacatgagagcctgttaagatcgaaaaaagagggatcagattcttgcgaagcatgcaggtaccatcgttgaacaacctatttacaagatctcgctctgtgcatacattggcttaatctagctatggagagagttgtatcgttgtaactgataacattcgacgtcatatcggaaaccaggcggcaagtattatgtgcagtagctgtaatgtaataagaactgcctttgtcttatggttgttctgacctgcgaattttctaaagaaatcattgttcgttgtctaaattgtctattttgagaagtttggcttggttcaaacaagagtagacaatgctctgctcaatcctttttgaaagacgcgctattcaatgatgtcgagaacgggtcacgcaggcagcagtggagatttaagaccaccttttaggttgcatcgctgtgcatacttcagtttgtataccatttctgcgatatcgaaacctgaattttttttgaggaaatatcgaaacctgaattcgtatgctaggacctcctattgtatcgttgcaatcttcttcttatttacaatgatgtgtaaatcttttgtgtgtttgagaaaaaaatcactttgaataaaaggtgacgaactctctctgagactagctctgcatgcccagctcggttcgtgcgccacggatgctaacgttcgagtcggtttcaatttaaacttgaatgtttcaatataaaacacctgctacaattttgatttgtccctgatatgatcttatatccacatgcgtgttgtttgaatgaaaatataatagtacaaattgtgtgattctgattcctataccattgcaagtcaaaggaacaatgccatttgcattggtcggaacacgtacatcacttgatatatttggcgcaatgcaatatgatattgctctcaggttctcagctcgctactacgtactgtgtgtataaatatgcaaccacaggcacaacagcatgggagcacctcgacacacagcagctacgtacttgcttctgcttagctaaaggaagagcgccgagcggctgctctgctgagtcgttccggccatgggctggcaaccccggctcctctgctgcctcttcctgtccctgtcgctggcagcggccgcgcgcgccgccgccactgttcaccaggagtgggagatcagctaccagttcaagagccccgactgcgtgcgcaagctcgcggtgaccatcaacgggcagacgcccgggccgaccatccgcgcaacgcagggcgacaccgtcgtggtcactgtcaggaactcgctgctgacggagaacgttgccatccactggcatggcatccggcagatcggcacgccgtgggcggacggcacggagggggtgacgcagtgcccgatcctccccggggacaccttcaactacaccttcgtcgtcgaccgcccgggcacctacatgtaccacgcgcactacgggatgcagcgctcggcggggctcaatggcatgatcgtcgtgaactcagcgcgcggcgggccggacggcgagccgttcacgtacgacggcgagcacgacgtgctgctcaacgactggtggcacaagagcacctacgaggaggccacgggcctcgcgtccgtgccgatcatctgggtcggggagccgcagtcgctgctcatcaacggccgcggcaggtggttcagctgctccaggatggcggctggggcatgcaacgccaccctcccggagtgcgccgcgccggtgttcgccgtcgtgcctggcaagacctacaggttccgcattgccagcgtcacgtcgctgtccgcgctcaactttgagatcgaggtaagcacgacgtttaactttcctctccttcttctcaatcactttttgagaaatcaaatgatttgaagtttttaactaagaatttttttatgactataataatccacggtatgcatggtttggataagggccataatatgacggtggtggaagccgacggccactatgtgaagccattcgtggtgaagaacctcaacatctactccggcgagacctactccgtgaccatcacggccgaccaggatcccaaccgcaactattgggtcgcttctaacgtcatcagccgcgagcctggcacccccaccggcaccgccattctcagctactacagcggccgcagcagcccgcggaagccgccgccgaccacgcctcccacgggtccggcctggaacgacaccacgtaccggttccggcagagcgtggcgacggtggcgcacccggcgcacgtccagccaccgccgccgcgcgccgaccgcaccatcctcctgctcaacacgcagaacaagatcgacgggcgcatcaagtgggcgctcaacaacgtctccttcacgctgccgcacacgccctacctggtggccatgaagagcggcctcctcggcgccttcgaccagcggccgccgccggagacgtacgcgcaccaggggtacgatgtatacgctccgccgcccaaccccgccgcgacggtcagcgacgggctgtaccggctgcagttcggctccgtcgtcgacgtggtgctgcagaacgccaacatgctggcggccaacaagagcgagacgcacccttggcacctgcacgggcatgatttctgggtgctgggctatggcatcggccgcttcgacccggcggtgcacccggcgtcgtacaatctgaaggacccgatactgaagaacacggtggcggtgcatccgtatgggtggacggcgctgcggttcaaggctgacaaccccggcgtgtgggcgttccattgccacatcgagtctcatttcttcatgggaatgggcatcgtcttcgaggaaggcgttgagcgcgtcgctcagctgccgcaagagatcatggggtgcgggaagaccaagggcggccactagtaggagtaatcatcaacgggctgaggactgatgctcttcagcagctgcatcattggttgctttcattcttttgtttccatacaatccatctaatggtacgaaagaccatcagtctggaggaagataaattgttgcactatgtatttttgtttcatcaatgtttcaaaatcaaatccagatgataagatttgtatggtgtttagattcataatgttacattatatactgaatactgaaatgagtgacattatgtattgaaaataatgttctcatgatcaaatgaaaatgcacatgtgttgtctcccttttccctccattctttggctattttgttcatgtttactaagaacatatggggatgtctgtttaattagaatgcaggaatttggcatcatataagattttagtgaattggctagatcaaaatgaaacccagatatgcatgatttgtatgggtatttagattggtaatgttacattatatacagtccttatacagt

SEQ ID NO: 4108 - DNA, 3472 bp, Sorghum bicolor
agaatttgttcactgagtaatttgctcttccaaaagaagccatgctatctagtttctccatttctaattcttagagtttgctttagttttgtcttatgtcaaaactaataactttgaccgaggttttcaaaaaatatatattaacacttacaagttcaaataaaatgtcatctccttggttctaatatagcccgctatagctttttcctaggatccactgatacgatagttctgctattactgctaatgacgctatagctctgctaaacatcaatatttggcttaaccacaagatatgtgtaggccctctataatattgaccaaggcaaatattcattccttgatcctgatgactataatctatgcattgtgatctttaattaatggatgatgtaatgaactattgaatagctttaattgaccgatttcgagcattgaagaaatttaaatgttgattacagttgtgagcatgttgattgttttattgaatgctcagtattaatgggcatagtaatttgtttccaatgtccttatacatgtatatttgagtatttgtgttcataaatttttgttaaccacatgttttcctagataattatttaagaatattaatgttttctgcagaaccgctaaataaaatagctcaactatatcatgttatagctttttatagattatggaggaggctatcgctaccgctaaatgttcattcacatagtccacaattgaaaaccttggtcatctctcatctactcttatagcttacaaatatataaagaaaattagcacgctacttttatgcctagtactatgattgttagaccaaaaaaatattggctatgcaaaatgagctgacaataatcatgcacattgaagcataaaaagggagagaagtttgtaactctgtatgtaacaaaaaatcaatatatgtgactttatctcaaagaatttatgagatatacttcaaagaatttgttcattgagcattctcttggaaaaaagagcagtcgggctatgtactcctctgtttcaaattataatttgctttaatttcatcttaagtttaacttcaataaatttggctgagctattcttgaaaaatgaccagcttctttaaattattaacatttacaagtcaaatacaatacaatatcaaaacatattactagtagaaatttaaaataaaaggatattgtagacggtgatgcatttcatatgaaggtttaaatattgaaaaatattacttaaaaataaattaaatactctctctatctctgaaagctttaatttctagagatatcttaagttaaatttttttaaactttgaccgaattttttttaaaaaaactaagatttatagtactaaattagtacaactagatttatcataaaatattttttcataagatatttattttatatcataaatattgatatttttttataaagttagtcaaacctaaaaaagtttaactaacacaaattttagaaattgaaaggagaaactgtactttcgaatatttggagcagtactaccgagcgtacaaagtgaatgaaacacatatgcagcccgacaccagaggctccacaaagaaccccacgccagactcagctatcaagcactattctttttctccaatttttttctcaaaaaaaaaaaactagaacatattcttttcctccaggaaaacctcgcaatcggcacaatgaagccaagttaacccgatcactgcacccaaatcaacgacaacgagtgaacctgacagtttataataaaaacccgtgaggtggacaggaaataaattcagcagcggcgacagctccccgacccagcgccaggaaaagaacaaaaccgcaatgatcgatcgagcgagcccaggacccagggagcctgacgtggatccgacggaccaccgagccgcatccgacggcccggatcgtcccgccccttcttttatccccgtccccggccctctccttccctcccggaggcacccgaacccgcaccccacaactccgtcgtctcctctcctgtcctccacaccacacgagggcacgcacagagagctcgtgcctgcacttccatggccggcgcctcctcgtgtgctcctcgcagcatcacgaccgcacctttgcgttagccagctctgtcttgttgtcgcacgtgagaggagcgagagacgttgattgattcttcctttttctcggcgcgcgcgggagggggtagcactagcacaccgccggcaaaggatcgtgaccgaagatggtggggaagagggagcgggactgcaagaacccgatgcgtcggacgacgagcatgacggagttcgcgccgcccgacgcgctcgcggcggtgatggaggacgaggaggaggcccagctgccctacaacagccacatcagcagccgtggcgccgcggccggtggtgggcagcagcagcagcagcagcagcaggactggctgtccgcgttcgttgggggcggcggcggcgctgggcccgggggcgccgcggcgcaggaggactggctcgcggcgtaccgcgcccgcgcggcgcccgcgcgcgcggggctccgccgcaactcggccgactactccgtcgtcgagaccgccgcgttcctccgcgcctgcgggctctgccggcgccgcctcggccccggccgcgacaccttcatgtacaagtaagtgcttttgctcgcccactggcctgcatgcccgaccggcggcatgattgattcttgaacctgcgcgtgagtgacataccgaccgtcggcgtcgtctggtggtgctgtgcagaggtgaggcggcgttctgtagcctggagtgcagggagcggcatatcacgcaggaggagtggaaggacaagtgcgcgctgacgacgtcgatcaaggacgctgccgccggcgccgccaaggccaacggccgccgctcctccggcaccggcaaggccggtggcagggtggccgcggcatgacgagcgaggcgctgcacctacacctagctacctaccactaccaccgtaccagcagcttcgtcctcagctagccggccagctgcaagctcatcatcgaccgatcactagcttgtccagagccgctaccatatctacactatagtcatcatccccaggccccagctagtataggctttatcgattagttatctggatccatcgatccctgcatggctgcatgctgcatgcaagccgtattaataccatcattattagcttgattattccaaatcatgcatgcttcgtaaaagaaattcttcaagcttgctatagctatatgctactagtacgatagatgatgttgctgtatacttttgctgtcagtgtagcgattgagcagcatgagtacaggccttgtttagtttgcaaaatttgtggtttttagctactgtagcactttcgtttttatttgacaaatattgtcaaatcacgaagtaattaggctcaaaagattcatctca

SEQ ID NO: 4109 - DNA, 5555 bp, Sorghum bicolor; identical to SEQ ID NO: 3447

SEQ ID NO: 4110 - DNA, 5117 bp, Sorghum bicolor
caaaaaaatttgcaaaatttttcagattcgccaatatatagaatcttgcggcacatgtatggaacattgaatatagataaaaaattaactaatccatgagttgctcttagctcattatcccttcaaggtgggctaaagggggctaaaaatgctaacatatgacttatttttttttctctcctctccctttcaccttttagtcatgtatatccaaacagcttaagagcatctccaagagcttgactaaaattaatagctaaattttaatgtttagctattttgtaaaatagacaacttcttaaaaaagaagagatccacaacagccttgctatcagattgctagtgtcagtggttggctatatatggtcaacgaaaatcaagaaatagcaaactttccattttacaaaactaaatagcacatctgttggagcttatttttcggttatacaagttctaaaatgtttttataataaaaatagcaaagctcttggagttgctcttagggactaaactttagccccttctttttaaaagctaatctttagtcctgagctaaactttagccaaggagatccaaataggattagatttcattttaaaaaaagcaagagcaaattcactccactatagcggtatggacataaaagccctaatgatttatcccatcctataaaagatacttccctttgatctagatttggttcaagttttagaactttgactatcattgctattaaaaaaatataatgtgcatatttgtctttagaacatttttttgaaggacctactatattaatttgcaacgaaatggaaatctcagtaagagccacacggggtatagtgttttttgaaggaaacagaaatgatatagttggttaccacacggggcgatgtcgtctgccttggattgggattacgcaagagccaagaaaaataaaccattggcgcagatcaggtacttggaggcaagaggcatcaaatagttatggcaccatacttttttctttgaaaaacgattgctactgcaatctaaaataaccttgtgtcgagatctcatttgcaacgaaatggaaatctcagtagtcagcaaataatatagaacagccagcaatgctaaaccataacatatagaacaacatggcacaaataattttctccgtcgttcagcaaataataactttctgcacagccagcaatcgcgcgacatttatttaggccctgtttagatttgaaattttttgctaaagtggtaattttttttggtcagacgcacgcgaaaaattttaggtgtttgtttgtcaaattttgttctgacataacttaggctgcatgcaattgcagttgtcattggtgggcttccataggattacgtgcatagttgcagtctaaaattttagcccaaaattttttagccccgtttagttctcaagtcccaatttcacaaaattttttcacttcgagccaaaaaatttcaaatctaaacattgtattagccacctgccttgccgccagcctttgctgctttgcacacacaacataccaggcgtcatcactccacagtccacagtccatcctgcataaactcctatactctctgtctgggttactgtgggacccgtgggaaatcagttttttttttttcaaccccgtgggaaatcagttaaccaaccaatgggaagctccccaacttgccggcttgcccaagttgactttccagcctacctgactccatcactgacatcacgtcccaaatgtatgatggcccacatgtcactatgctacacggttactacactcgaaccaaaagcgagcggtaaataaatacgtattaaaattctcccgaggagaagagaagacccagatcgccggtggctttggagctacttgcttgcttgctgaccaatggcggccattccggctgcccaagctagccagagctgagcatccggcctgaataggagaggcgagcgagagagcggccagaggtctcagtcagaagcatggggctgtcatcagcgtggcgggaggggcggcggacgctggtgctggtgaacctggcgtccatcatggagcgcgccgacgaggcgctgctgccggcggtgtaccgggaggtgggcgccgcgctgcacgccacgcccacggggctcggcgccctcacgctgtaccgatccatcgtgcaggccgcctgctacccggtggcggcctacgccgcgtcgcgccacaaccgcgcccatgtcatcgcgctgggggccttcctctgggccgccgccaccttcctcgtcgccgtctccgacaccttcctccaggtctgccgccgcccgaccgccattggatatgctcatatatgcctttgctgcttgttcagtttgttacaagaatagtacatagcgagtgctgtgctgctgcggttagaaagatcagattgcatcagggatctgtctttcggtttggctcccaatcccaatctccaacattttcctgctgttagctaatcagcctcaaccaatctgagattctgagtaggtgaagtttgcttagggaggcgggtattttcaagaaatcatgccgttgtcagggctgcagcttgtgaaaagtatgcttgagggcgataatcatgccaggaaaatgacaaaccgccgaccgccgttcggccagtctttcgttttcatagtagaattcgtggtaaagtatgtggaattttacagttgacacttgactaagtaacaacccagaagcagtcatctgtcatctcttaagttcttccgcttggcgtataatgagaggagaggacaatgaagtatttccttctcacaaccgatggtgacactgatgacgtttcagactttcagtatcatttagactaaatctaaatagatggcattccaggcttttcttaatacacattctttgggatcatacaaatgcattaggttttaatatttccatgtttctgaccgtaacagtatactgacacaacataattttactgcatggagacagtaccttctttccaaaatcaaggcatgagctttttagaccaaactaaatccttctgtgccttttttttcttcaaattaacctgtacaattggttaaatgattttggacaattttgttccagggggactcagtgcagttatgaagtgcttctttctatccattatttgtactctcattccatgacagtaatcttaactgaacatatggatacggatactgccacaaaggactactcaaacttaattcttcttctcctccaggtggcaatttcaaggggcttgaatggcattggtctagctctcgttataccagcagttcagtcgctggtggctgactccaccgacgacgacaaccgtggcacagctttcggttggctgcaactgacgagcagcataggctccatatttgggggattctttgccttgatgctggctcagactacaatcttggggattgaaggatggcgtattgccttccatctcgtcgcagtcgtcagtgtcatcgtaggcatcctcgtgtggttcttcgccgtggatccccatttccccacaaacaatgctgcctcacatgctgcaccagtgagcaaaaaatctgcacttgatgaagcaagggagctgatcattgaggccaagtccataatccagatcccaacgttccaagtcttcgtcgcgcagggtgtcagcggctcattcccatggtcagcactgtcgttcttgtccatgtggcttgagctcatcgggttcagccacgaggacaccgccattttcacgacgacctttgctgtcgccacctccattggcggccttcttggtggcaagatgggggatttctttgctcagcgatatccgaacgccgggaggatcatcctgtcgcagataagcgctggctctgctgttccactggctgctgttctcctgctgggtttgcctgataatccatccagatccagcggtgtagcccatggacttgttctgttcatcatgggactcatcatctcttggaatggagctgctacaaacgggtacctgcgccacacatttcaccttctcaattttaaacactggtttcaaatctttggtctgtgtttactaaaacgtttcaaaaaatgcccgatttttgcaggccgatttttgcagagatcgtgcccgagaggcaaaggacaagcatctatgctttggacaggactttcgagtcgattctagcctcgtttgcgccacctgtcgttggcttgttatcgcagcacctctatggtttcaaactggacgacaaagggagcagccctgagcaggatcgggagaacgctgcgtcgctggccaaggcgctgtacacggccatttccatccccatggttatctgcagctccatatacacgttcatgtaccgcacttaccctcgagacagggagcgtgcgcgcatgcagtctatgatccagtcagagctagatcagattgagctgggcggttcgagctttggatgcggcgatgacgacaggtttgagctctttgaatcgatgcacgatggtgataagcctggtgaggttgatggcagctatggtgctgaagaatctgctgaggccgatgccggcactgaaaaactattaggaaaccatgagttgtgacggacaaaagatgctacatggtccactttgtaacacgattttaggatattctgccgattttaggaacttgtaacacggtgatcagtatgattcactaaagtgaccattctttgttcttccatatcttcgttatgctggtactgctactgctatgctagtatacaacatatcccgctgacctcttgatgtacacaagggcgcttcaatgttgacagaaacgaactttatttttgagttatatgaataccagcggcaccaaatgcccgtctaatttaaacagcgtttgctgaaacgtcgagtttgccaaatattgaggacgtgttttgcaagactccaggtcacggattctcgtctggagcggcgggaacctatccaaagtccaaacaccagatcactggaggcaggcggcagcgaggaataatcgaggattattttagtagttattattaaattgtacatgtgctgcaaagcctttactgcccttgaaaggtacctcagct

SEQ ID NO: 4111 - DNA, 5744 bp, Sorghum bicolor
gactttaccattcacaaagagtagattaccagtcaacacatgtaaaaccctgtgaccccttgagactataaaaggggagccagggcacacacccaagagacggctcacaacatgagaactcaaagcaagttcacgcacacaccagagtagcgagtagcgctctgtccaccacacaaagtcgagacctgggacttagccctctctcgcaacctgcttgtatacccctactacgagcacttttcaggtgcaaggcaatacagacccccaatctcacactcgacgtagggcacccttagcccgaactagtataaattctctgtgttccacttgcatcaccattcgggttaggaagacacgcagactcatcactcgttagtgtctagacgacgagtctagacgccgacaacatgaacacggatgaatatttttaagagaatgtacctgacaattagttatcaagagtcaagttggccaataacgagaaataattaatcacaaatgtagacattaatgctaagttagagacttgaatccagtcaatagatttcaacgcaaaaaaaaatggtaaaactaaactacacagaaatacaagtagttttaatagcacaaatctaggtcgaaattttgtgtgtatatactttcgtagaaaatagtcaccaccaactaaactgctcgttgctcgctcagccaggcttgaaaagcacacctaggcccgtccacgcagcccaacccattttagagttcgaactgctccgctgagagcccaaagcggtaaagccccaaacacatacagtagctccgctcggttcgtctcgtctcgtctccttccgcagctccttctcgctgacgtcacgccgttcgcctccgacgccgccgacaacccatggagcccacggagccgtcgcgtggcaccaagcgccctctcaccgccaccgcaggcgacgacgacgacgacggccggtaagactgcccgacctctctctcccttcctttccccactcgtcgacttctcctggttagggttttggtctcacgccccagcagggctcatgttgattttgtgtcgctcgccgcgctcgcagggagcgcaagccgcggttccctaaggggaagaaggccaagtaccgcgacgccggtgcggagggaggcccctccggcaacgccgtggacctcgacagcatgctgaacccggagcttgcggcggagcggcgggcacggcagcgccacggccagctcaaggagggcgacgacgccaagggaggtgccgctgacgtcaagggcttcgaagtccgctacaacgtatgctctgcttctcagcttgcaacctttttcctgtttattaatgttgacagcaaatgaatgctaggtacaaattgttgagctgaattttgattctcaacaggatggtgttaactttgttgatgatggtatccggatagagccgtttaacttggagcgagaaagggaagaagggtattttgatgagaatgggaactttgtggagtatgcaagaggcaatgagattaaggtaatgaatgttttttgtttagcactgtcaacactatataagttaccattggtgacgcaaaacacgttttttcttgtaggatgcctggttggatagcgtggaagttgacccaacgtatgctgcaaaggttcagaagaaaggcaaagagaaagtagaggagtttgaggacctctcttctgatgacattgggaggctaaaaaggcagatagctaacttgcttgaaccaggagaaacggtgtgtttttgttgcatcatttgcatattattatgcagccctttcttgtcctttaccgttcaacaatttatagcatttagtttgtgtgtcaactttactgacttactattattgtgtttgggcttagctagtgaatgatgcttaatttactcaatggattcccatatatccaaatatctaaacttacaacattcagatctttgaatcttaaatattttcttcgacaactgccagataatgcaagctttgaaaaggttgaagggtacatccaaggataaacgtggaaagatggctgaggggactaaacgtatatttgatgaattgactgaagctgccatgaagctaatggagaacggcgactatagtatgcttttcattcttgttaaaattcttatgtcactatttgatatttctttttgtacttacatttgtcatttcagtgtcaatgtgacttattccttgctgtgcatgttttggtgtagatgtttactcagatgatcgtgagacctttgaccgtgaggcaggttagttgttttctttcttactaacatatggaaaatttcatttcatgaccacctaatttcactttaatggtactggtttcatcagagtgaactgattgcacagaaaggatcactgtattttgtttccttgacatcacttgagtaaaaaaatgcaaaatacataggttttacattatcaaggttatctctactttttccccgatggaaacagagtcactctgttgctgttgtgaatgcatgaggttcactaccatcgcttgattgcatgtttaatgttgtcatgtatccctgaagttagcaccactatggcactatgcataacttgatctatgtttatcctgagacatcaactaacctacctaggcatgcacattacattacttcccagcttagtcatttccttaaaattgtcatttcaagaaatttgcctgacttttacccttctcttttgcctttgcagctgggtatgaacgtttggcacgtgctcgacttggtttgccagaagttgatggtgtctctgaagacccaaagtataaccagacaccattgtcagtactggaaattgaccaaccatcatctgtactggaaatggaacttggtccctcaactgccaatatatctacagccactgctgcaatcaacgatgatgacagtaacctggacatgtttggtgatgatgacaacgatgatgccaatcgcagttctgatgccaatactgtaggttcaggtttgaatcctggaacctcagatgtgaagagtaagttcacatctctggctcttttttccttttttgtggaaacctgttgcacatttccccatatttctggcaactgctgtgttttctttattcacaaatattctttttccttcttcctgcagaagccgataatggaagcgtggactcagactatgtctatgatccatcttcagggtaggctatagttgtttctatgctgctttcctagatttttatgagttttttttttttgaaaaaaagaacagccacactgactgttctaatgtctgtatagattgcatgtgttgactgtgtgtttcaataccttttttcatgcagttactactatagcagcagcacaggctattactatgaccctaactctggatattatggttatgcatctacgggaacctggtaaaaattttccccaattcatccttgatttacatttaatagttatttctttttcagtgtcaatcatctctttagaatttagaatgcaacatcattttggctgcatgatttcatttttctttagtttacttagctgtgaattacacaacatgaaccgtctaggggactatgtgctgtttactaactattttataaagaagctaaaatgtgtcattgccagtaatgtgcagggaagaaatatgttctttagtgctctcaggttggttatttaattttgatttgcagcagaacatgattataactttgagagccaagatgatagtaggctgtagctgtccaacattcattagcagaacttattgttgattgccttataaattcttaggatttgtatcccagtatcccctttcactggcaaaccctttcggactagccagtgaccactgaccactgcttgttgaagcattttaacacaagggtccctgttaaaccttccttgatgtttcttttcaactattccaacaataaattttagcaggcattgggttagatgaccaagttagtagattgagcgatgttatgtattctctggagtctggacatcacttgcaatagcattaatcccttgtagccgattgaggctgcaggtgtgtgggttttgcactgagcctgtttgcttgtctcaaaagccatggagtactgtttgctgatttgttgtgagagaaaaacactgctgaatgtatgctttgttccgcatgcacaataactgaatccttgtattagctctttgctgttgcttttttgttagaaaagttgttgaatctataggctttggtttctgtgcttatgtctacaatgtgtgcaggtattcatacgatgagcaaactggaacatacaaagaaattcaggatgaacaaaccagcacggccaaagaagagctgggagatgccatcaaggagtaaccaagttgctactactcttcttgttcttgattgccaatggaactgaggtagttcagactgcccagtgttctttaaagcgagttgtagcttcagtttttcattcagtagatggcgctttgggccgactcactaacagttggcttggtaaatgttatgtggagaaggagagtgagaggaaaccagtcagatcatactgtagggtgtaaactaaaggaagtgatcgactgcaactgtacaattgcaatttttttttgctcgctgcggaggcgtgtttactaactattcccgttgtttctgtagaaatatgtcacacgaaaaagatacattacgtcattactacatcaatcattttggtatccttttgtttgtcttactttttctgccagtcaatagtgttttttttcttataataaatcagcgaacagtatttttcaactttgacttttcagatcagtgaataggctcgagaacattactatgtttggtctgattatgtctaaactcagcagcgtgtggattggtaaactgaatcgggcagctcgtgatcgatggagtagtcaaaggccggggaggcagtcaggttcggaggttggagacgcatcatcatcatggtcattcaatctggaaaatctaatacagtactctttccgaaaaggttggaacaaaaaaaggtatctctttcagaaacctctttagatggacaacgccttctgggaacacggttagggcttgtttcgacgcgaaaaatttttcatgtaaaattaaatgatgcctgtaaatttcatgaaatgtttttgtgaaatttctgtgtactaaataagcctatgaatattttttacgctatacattggcatctgtttttatgttaaaacttttttttaaagggatccagcctgtattcaggagctcaataccacacacaacaacacgagccagctgccgtaatcgtagattacttggatgactgcctctagcgtagtgcatatatacaagttgtagttgtgtagcatcctccggatcaacggtcaaactcaggttgtgttcacacgtacgtgaccagtcagcgaatccgatggagggcgtcccgtccggccggatcctgttcatgcgtgcattgaaacccaaaagctatgcatgttgtacagcaactcgtacgtgtgcacacgcggcgtattatacgattacgaacgtcatgttttgcacacgcgcatactatacgattacgaacgtcacagcttgacatagatgaaaacagaacctatacacgatcgatcaggttctgtcgtatgtacacgtgtaggagcacacaccgtacaggatcgacccgaccgagcggctcatc

SEQ ID NO: 4112 - DNA, 5652 bp, Sorghum bicolor
tgagaatgctaattttttattatttttatacgtcatttcgctagctatttgtaaagtgctattgagagccaatagaattgctcttagctagctatttgataaccattgcggatgatgttaggcttgtttagtttatccaaaaactaaaaacttttcaagattactcgtcacaaatcaaatcttacagtacatgtatagaatattaaatatagttgaaaacaaaaattaattatacaatttatctgtaaatcgcgagatgaatcttttaagactagttagtctatgattaagggcctgtttagatgcagccaaacaaccaaaacttttggagaaatgagcactttttggaagaatggatctaaacaggggcttgtaaacttggctgtaaagatttggaatttaagactttggagccccaaaactgtgtaaatttgcttggggacccgtgtcatgtgtcttgcagaccaaaaaaattttggggaggcttttaacccccccttgaaattaaaattttccccccaaaattttggggattaaaagttttgggtttaaaagggcccctaaataaaattttaccaaaaatttttgggaaggaaatcccttttaccattggcccccggaattgtttttaaaaaaagggcccggtttttaagggggaaaagggggggccaaaaagggggaaaataaagggggagggggggggttttttttttttggggggcttcgcggttccccctttttttttgtttttcccccccggggcggaaaaccgtttgtttcccccccccctgggggttcttttttgacgttcctttgggccggggggttattgtttttggggaagcaaagccccaaggggcaaattcccccccccccccccccccccaaaggccttgtttagtttcaaaatttttagcaaaatgagcactgtagtaatttcatttgtatttaacaaatattgttcaatcatggactatctaggctcaaaagattcgtctcgtcaattccgactaaactgtataattagtttttatttttaatttttatctatatttaatactctatacgtacgtctaaagattcgatgtgacggggaacctgaaaaattttgtaaaattttttttaactaaacaaggcctccgcgaagccatctcgctgtgatctccttcttccctccctccctccctcactgtttttcctctagtatttcctgccgccgggtgattgattccagcggctcaaccccagttcaatcatcaatcatagagagcagggtgttgtgtgcccggccgcccgcggcgtgtgcgaagaaagggagggaaaagggcgaccttttccggggcagccagattccattccttgcgcaggagtactagtacggctaccctcccacttctacttcctcctagtaggctgccgtggaatcagctagaagagcaaggcaaagcagcaggggtgcgggcgagaactcacaactagcagcaccacaccagcagcctccctcccctccttccctgcctttttccccactcccagccatccatattcttccttccttccttccttcctcgtgaaggcgtcgagctttgtgttcttgctttcctctgctagacaggaagaatccctgcgtgttcgttcttgccttcgcttcatccaggagctgcttggagagagcttccctttgccggcgtcctcactcagtcactcaccgacggtcccagtggactgaggcgaaacttctcggagccggaacagggatggccgccgcgccgccgcctaaggccgacgagctccagccgttcccgcccaaggagcagctgcccggcgtcgccttctgcatcaccagcccgccgccatggcgtacgtgcttcttttctagtgctctactctagtctcggggagtgtattttttgtctgtcttgcttgtctcgccgttcaaatgttgtctgcgcttgtcctcttgccttcttttgctgcctgcactgcatgcatgcttccgtcttttctctgatgctgagcttggttttcattttcacctttcgagacatatacttacatctctgctctgctcatcctttcttcatgtaaactactcctattagcttttactagctgggattgttactcctcttgttctttctctgtcgatctttgccggtgtttgctccaaaccgatgtgttggtgtagttaaaagtgcgcagtatcgctttcttcatagtatttttttcctcctgctatgatttggttcttgatttccggaagaaagtagctttccttgatcaagtagtgtctaggatttactactcatagtaaggttgctttcacttgaatctgccgtgaaaactaaagaaaaggtgtgcggttgcacatctttttctgtaaattaaatattgtgcaagtcccgaagcatggaaatggcacctagtaccggtatggtcaggcatgattaacgcttctctgaccctttggttgttgggatcctctgtgcagccgaggccattttactaggattccagcatttcatcgtcatgctgggcaccactgtcattatacccagctcgctcgttcctcagatgggaggcggaaatgtaagcctctgaattttgttatgaatcaagtagtagttgtattgaagtttgcactgaatcatcctagtaacgcccataaggaacacctgaatgatattttacgctctctgccaggaagagaaagcccgggtggttcagacgatattgttcgtggctggcataaacaccctgttccaaacattcttcgggacacgccttccggttgtgatgggtggctcatacatcttcgtcggacccaccatctccatcatcttggctggacggtacagcaatgaagcagaccctcacgaggtacctcatatagtagtttcttctgctcaaatcccctgtttcttcaagaataattgacaagctttttactgctcacatgaagaaattcttgcggacgatgaggggaacgcaaggtgctctcctaattgcgtcgacaattcagatcatacttgggttcagtgggctctggcgcaatgtagtcaagttagtgtcaaacttttttttccccatgcctgtattttagggggtagtaccatgtttattttgtagcctgtaaaattgacttataatcactttgcttcgcagattattgagtccgctggcagctgttcctctagtatcacttgtcggatttgggctttatgagcttggctttccaggggttagtttgtttgctccatctttttgtctccatgtttcttctaccttcactggggagtggccaaaacttgtgcatgtttgtaggtagcgaaatgtgttgaaattggccttccagaagttttcctgttggttgtattttctcaggtatactgatatatcgtggttattgcacggctatctattatgcagtatgtcatgtactaattctgtttgatccttttcacagtatttgtctcaagttctggatttcgggaagtctgtctttagccggttcagtgttcttttcactgtctctattgtgtggctgtatgcttacattctcaccatcggtggtgcttacaagaattctccaccgaagacacaggtgcattgccgtgttgatcgttcaggccttatttcaggagcgccttggtaagatatctggaccaatataatcttagtttaaattactatattggtgacattcctcatgaaggttatggaacaactgttgtaggataagtgttccatacccctttcagtggggtgctccaacatttgacgctggagaagcttttgcaatgatgatgacttcattcattgctcttgtagaggtttgtttccaatactcaactggaaatggaagtgaaaactgcattagaccaacatatatgatatcaatttatgagtagtgtacaaatttgataagttttaatcctgtagtcaactggcgccttcattggtgcttcaagatatgcaagtgcaactatgattcctccatcaattattagtcggggcgtgggatggcaggtaaggattcaaatattgtactgtgggctcagtgatctgagtttataccatggtgttggtaacattgttaaatgtgaaacatccttgtcagggcattggcctcttgcttgattcattttttgggacagccaccgggacatcagtttcagtgtatgtataattccattgaaaaaaaagttgtcaatccttgtttgttcagaacaaaaatgttttgctaatatgcattatcaattttttttgtgcttacagagagaatatcggattgcttgcattgacacgtattggcagccggagagtagtacaaatatctgcagggttcatgattttcttctctgtccttggtaacttgctttactgacctctattagatattgcaacgcagttttctgttatgttcatgtgtatttccctggtgctgtgataggttgatcattgatgatatttgttttgccaaaccaggaaaatttggagctttgtttgcatcgattccactgcccatatttgctggcatgtactgtctcttcttcgcatatgttggtaagtccatttccctgaaaaaacgaagttgtctgacagtttccacttcgtaatttttagcttcttattctgcatcacactcaatgaatgcttccattttcaggtggtgttggcctgagcttacttcaattctgcaatctaaacagctttaggaccaagttcatcatggggtttgctttcttcatgggcttatcagttcctcagtacttcaatgagtatacagctgttgcaagttatggtccagtgcacactggcgccagatgggtatgatcaagaaagcctagctacactttttccttgatagcctgagcttcgacaatctaacggtctgtaacaaattaatcaatctttggtttggctctgacagttcaatgacatgataaacgtgccattctcgtcaaagccgttcgtcgctgggttggtagcctacatcctggacaacacccttcagataaaggaaagcgcggtgaggaaggacagaggcaaccactggtgggaaaagttcaggagcttcaagaaagacgcgaggagccaagagttctactcgttgccgttcaatctgaacaaattcttcccttcggtctgatctcaatggcgctgctaaatgaattctggaaccaaaccgttgttcatatgtgaacataattctgctggtctggccagtggaagcttcttgtcaccaatgttggtcaattttgtgtattttcggacgagatggagtaattggacagtagaattattaggactgaagtatattacgttcttttttgtgatctacatggatcagcgtctgataatctggttgtagtttcttttgtcaagctggcaatgtacatcagtattacaacttatgtagctttcatagccaaggtagaatgataattgatgtgttaaagttgttaatttgtgccgtagaagtaaatagcggagtgttcatttaccaccttttgctacttctgtaacttaaaacatctggaggagtattctactccctgtgctacagctgctgatcattactttgttaaggtccatagtaataattgtctaggtgtatgggtaaaattctttatatttaggatggaggtt

SEQ ID NO: 4113 - DNA, 7752 bp, Sorghum bicolor
  misc_feature (965)..(1064): n is a, c, g, or t
cggacaacacttggatcataggatttgtagtaacatgttaatcagaatagtcatataatcatctttaattggtctattcttaagctccttcaatagacatagcctcgtgtaaataaagctattaaaacggatcaattcaagtggttgcacctatgatattacaagctttctaaagatataacatgatggaagaaaaaaagaatactcacatcaactctaagattcaaccttgtgtcaaaccttccgcttgagggcctctcacagtcgcaagtctcgtccttgattcaaccttgtgtcaatttagttatttatgtgatttgataattggactgtttgacggctcatcacagcactaatagccattgtacaatattttatctatcgggatgtagcgacaacactgctttaagagggtgtttgcttggaggtgttaaaatttaacaggtacgatagcatttttgttttatatgacaattagtgtctaatcataaactaattagtcttaaaagattcattttgtgaattattctccagttatttttttatttttgtaaataatatatatatatatatatatatatatatatatatatatatatatatatatatatatatatatatatatatatatatatatatatatatatatatatatatatatatatatatatatatatatatatatatatatatatatatatatatatatatatatatatatatatatatatatatatatatataaaaatatatatatatatacatataaaaataaaaaaagatatatacaaagacatacatacaaggacacacacacacacgaacacacacacgcacacgcgcgcgcgcccgctcaaacgctcgatcaataactcgggcgcgctcacgctcacactctctctcacacaaaatatctaaacacctctctatatatatctctaacacactctctctctctctctctnnnnnnnnnnnnnnnnnnnnnnnnnnnnnnnnnnnnnnnnnnnnnnnnnnnnnnnnnnnnnnnnnnnnnnnnnnnnnnnnnnnnnnnnnnnnnnnnnnnntatatatatatatatatatatagtattctatgcatgtgtctaaacattcaatatgatgaatgttaaaaaaataatccgaaaccaaacagtgcctaaaattacatcgaatctttagacacatgcatgaaacattaaatataaatgaaaacaaaaactaattacacagtttacctgtaatttgcaagacgaatcttttgagtctaattagtctatgattggacaatatttgtcacatacaaacgaaaatgctaccgtgtccattttccaaaaaaaattggaactaagggggtgtttagttcccattttttctcaaaaatttttaggttttgatccatcattttgcaaaatggaactaaacaccatgcaaaaaaattggcaaaaagatagttattctctattttggaaaacccaaaatgagcctcaagagtctaggcttcatgacaacaataaattctgcattttggatgtaactaaacatgactttggaaattttggtatttttgtatttcatcactctaaagtagttgtcattttgtattttgaattctacggcggaactaaacaccccctaaacaaggccttaacaaaatttctgctcttctctgtgaatctttgtagattcagatcaacttattaaagtgtcaactgattgattacctggtaggctggaacccatttctgacgcgttcactcccgattaatcaacgcgtccacacgcacttccgcgctaaagccgaaccactacactctggaatgctccctcgctaacggtcgcgaggggcattcccgtccttctgctgccccgcaaacccccaaaatttcaaaaccccgcactcgagagcgggcgtctccattccccattcgatccctcctcgattcgatccatcttgcgccgcccccgacgacgaggacgcccgcggagccatagaaccagccatgcgacgggacgacgccggcggcggaaccgggttccacgacttgtttgactcggtgcgtcgctccatctccttccggcccaccgccgccgccgccgccccggaagcccccgcgggcccatgcggcgcgggggccggggggatcggcgtgcggatcagctcttgcctccggaagtcgcgggggatggggctgctaggtctcatcaccaaaagcccctcgccgccacgccgtatgctgccgcctgtgcccgacgagtcgggcggtggcagcggaggagggagtgggggcgaaggcggaggtggaggtggagaggagaacccgccgatccggtggcggaagggggagctcatcggggccggtgcgttcgggcaggtctacctcgggatgaacctggactcgggcgagctcctcgctgtcaaacaggtgagggggttcggcgcgcgggactattatgtatttaccgtttaaagttttggtggcattcggatcagtgacttgctcctgtgactcattgcaggttttgatcggcaggagcaacgcgacaagggagaaggcccaagtgagtagcacttttgttactctgccagggaattagagtcttgatgaggcttttgtgagttttctgatacgatgtgccttttgtgcttaggctcatattaaagagcttgaagaagaagtgaagctgctcaagaacctgtctcaccccaacatcgttgtgagtggatgcaattttttgctttcattaagtaattgctaagttgttgtttgatttactctgtttggtcgaaaagaggtatcttgggactgttcgggaggaagatacgctaaacattttgctggaatttgtccctggagggtctattcagtcacttttggggaagctcggttcattcccagagcctgtaagtagtcatcaaactgtctgaattgcaatcctggtgagttcatagtggaagaggaacttatccattatatctgttgatcaggtcattaagaaatacactaagcaaattttgcaaggattggagtatctgcatagcaatgcaataatacatagagatataaaggtatgtatgctgatgtcttaatacatataatggcagatctttggccttgcttgttcagttgcaatgcttattctaatgaacctggaaatttgccaaatttcagggtgcaaacattcttgttgataataaaggttgcatcaagcttgctgattttggggcatctaagcaagtggcaaagttggtaagatcaaaataatatgctcagtgtgcttttaaggtcaagtgtaatcgaggaaagttgcaaacttgggcaataagactgggttagtcagaagggcaacttagagtattccatctgatcaataatgaaagtgcaaatcacatgcaagctagcttcagggtgtcacctgttatttttcccctttgccaaactagttgcaatcaaatacagtagagatgaaaacatgtgtttggaggggaaaaggtatacccagtgctaaaagctcctgacaagtgaggaggggaaagatgaagcaagcatggaaattcgagaatactgtaggacgtaacaatctcatggaaccatatgactgtaggcctgtagcaaggcccagaaaacaaagtgtggatgctcataacttctattcttgtagttgcaatgccgaggctccagatttcatctctagccttccctgaacttggttgtgacaaaagtgcttcttgttgttattaatttattatcagtggcaatgttaaattactgaaaataggcagtcaggtttgctgctgatgtggtatattttcaaaatagcaaatgatacccatctgatcatcatatttctacttgtcttctggccacaattatgccctctggtgtagtagtttgtcacaacaattagtatttgccaatactcatcctcacttctcgtatcatttgtgtattaacatgatttcctgctgcatcttttttatttgaagatatgatggccactatgtttttttctcaaggtattcctaatttcctatgtcaatgcacttacaacgatatgccattctttgtcaggctactgtgacagcagccaaaacaatgaaaggcacaccgtattggatggcacctgaagtcattgttgggagtgggcatagcttgtatgtctagaaactcttccactaccttgtttatcgcttttccagatttaaataaggcgtattttttgttttgctacaatgatatatcagcaatagtatcttatttagaattaagaatgttcaggcctcacttatatcttggaaacataatacattttctgtaaagaaagtcatcaagctgatttgaaaatatgctactatcagtactactttaagttatgtgttatttatagttttccaggacagaataaaaacattgctggtaaggattatatatgttaatgtcctgcctgaactacatggattgtcccagtacgagttgaatatcacttccaatcaaatttgctaaatgactagttatgcgacttctattgtccaaatacagaaaagtggcaggaaacagcaacagtattattaatttaagacttatcagtcccctactgttttgattcattgtcacagatgtatgacctttaccaaggaagaaagtaatgtgctgtaatttgaaatagaaaactacttcagaatcatttgttttatttttctcttatttggcccgcccaccctcactattccattctctcagctctgcggatatatggagtgtagggtgcacagtaattgaaatggccaccggcaaaccaccatggagccagcagtatcaagaggtaagttacatcacataaaccctaagaaaattcaagaaaactcttatcatgcactaagattttttttcaggttgctcttctatttcatgttggaaccacaaagtcgcatccacctatacctgaacatctatcaccagaggccaaagattttctgctgaagtgcctgcagaagtatgcctattactgttatacctttcacttaactaatatctcctccaaaagtatttggaaacttcctgcaaatgaatacccaattttctaatgttttgtctggtaccttgattctcttatcttttagggaaccagagctgaggtctactgcaccggacttattaagggtatatttgcaccaattctgaatcatagcaagtttatgctgattgtgcctggtaattttaacttcttgaaacaatttttttgcagcatccttttgtcactggaaaattggatgacctgcagccactcaatcatgctgcagacaaggtttgatatagcatgtctgatgttgcttccttctctttttctggacttccattcacttttgtaacttaataacttcatctaaacaatgacacaggactcttgtaatgagattcctgcagatgatatgccaaatggcttgtaagtgaactctgtatttcatgtgctcacttgattcttcaccatctattcttttttttttttgcatctgtagctttaagaattatttaactgcttccaggggtttgaatcattcttccaactggtccactatgaactccaataaatcatcaaaaatcaagcctttatgggagggtagctgtgatgatgatgtcatgtgtgagtttgctgacaaggatgactatgcagcagttggatctgtaagaatttttctccaaccattggcctttcaaagtattgcttcaacatttgttgtgatgtgcatatggagtctttttttttcccccactgccttcctgtatgcttttttgttgtaaaaaccaccccactgtacaactgctaatgtagtctttattaaagctagcttcttctaaaagtacaatcatgagatttttaagagcttccactgtcacagatgcaaaacttaagcatggtcacattggttttttgtttgcaaaatttcttcaccatgcatgatgagtaagcacaatcaaagcaccagaaaaacttgactgcacaagcattgatcatggtggctccatgttggcaaaaagccaaaaacagccaaaattgctacacacatgtatagtagggtgtttttttgtgacgaagtgaactagggggtgggcatttgcaacaaaatatcttatggggtagtatctcaaaatacaaatgggctggttttgggaattttccataattttgctgtgaatcaactatgttacatccttgttgactttccacactgtcaattccagagctataatcctatgtcagaaccatttgatgactgggaaaacaagtttgacataagcccagagcaaaattctcatcaaccaatggaatttggtgaattggccaaacatgctgaaagcagcataactgagaatgattttacgttccctgttgagggaagttgcgaagatgatgatgtacttacagagtcaaaaataaaggcatttcttgaggagaaggtaattattagtatttattagattgcacaaattcagctgtagattgcacaaattcagttgttcacagctagtgcttaaatgctgtttgccgattttcttggcaggcccttgacctgaaaaagctacaaacacctttgtatgaggagttctacaacactgtgcatggagggagctgtcagggagctgatcaaactcccaagggaaaactcccaattagtccaaaattgccccctcgaggaaagtcacctccaagtaagacatgtggaggtgcatgcgatactttgactaacacagctcccgagagctgcagcaagcaatttccaagaagtagtgtggtggagagcagccgaattttgagagaaattgcttctcctcaactcaatgagtttgtggataaactccatcttgatgcccaagatagcccaaggtttgtttgctatgccattgttttggaactgaaagtttattccgcaaaatcctgaccaatactgaagctagtctctcgtttattttgtgccaaggctgtgcatgatctaattggaagtatttctgttaacagcatcagcttcaccgaaaggcagaggaagtggaaagaagagctggaccaggaacttgagcgggagagaggtaaacagaagttttcattatctatgcactattgataattctccaccaatgctgatacaaaaagttattatatgaattctcctacagtgatgagattagctggctgtggtaaaacaccatctccgaatagaggttccaacgtgaaaaaggagtgtcatgctgaccattgaacagacagcagcattcatcatctctttatttcatcccacagaagacacaacagctgaatagtaactacacagtgccagagattggcggcaacagcagtacagcctgcagcgccttaccattcgcggtattagccaagctatgactgcagaaccatcttgtacaagtggcaaatttacgttgaagtggactggtacagggggcactcatcacgctcatatcaggatcattgtcgctgctgcctagaggccgtcgtggtgacagtttcctgattttaacttttaaggccacatttatcattctttttgatgcagtgctgtaagtccggcttcggttatatatggtttatattgagaaaaaagtgttgtaaaaatttttgtgtttgtaagcccaagattggcgtggggcttggttttgtatggagcttcttttgtgaaagtgtgtaataagatagcaatgtgagttacgggtcattctgcatttctgcttgctgaatgaatct

SEQ ID NO: 4114 - DNA, 3397 bp, Sorghum bicolor
ctctttatagtgcggcaaatcctaaactcaaggtcaaaagtatataaccaatttaaccacttgagtcttcaatgtcttcatatgccacttcttctcaatatcacttcatcaaggatgcaattaactttgtctcatcttctttgagtaaatatagcttgagcatgtgacttgaatcatttcaacatatgtgagttcaatccatgacttcaagtcacttccattaaagattttgatcctcaacacaatatgactcctcatagcttaattagtacctcgactcaatgcaagtactctcttcttcaccttagccatggtacctcggtctacaagccattgcttgaccttcaccttcgcttagtccctcgaagccttttccttgctatcctcactctatcaagccatactcaagtcacatcatgttaagcatccattgaaaaattgtttcttcaatattgtgattcttgcttgaatatcttcttgatatgagcgttaacattaatcaagcttcagtttacaccaacacacaactttggtcttcatttgaacaatgtgtgaaataccatcaagtttgctttcttgttgaccctttgatacacttagcaaacttgttagacccttaattgtgttgtcattcaattcaccaaaacccactaaagggctagatgcacttacagttcaacccgagatgattaaatacaaagtgagtgtttttactctgctccttggtcattatgccgaacactaaaccgatggagataaatgaacagagggagtattttgttagaaagaccagtcttttaataatttatttggagacataaatattatatgtattttttacaaattaaatgaaactcgctgtatccacaccaataacaatagttatttggcaacggatctagtgcaaactcatctcccatataaactgtgtaaactttaatctggatcgcaggatgttgatccaagggagacgcatgagagaggtggaaggagggatttgtaaaagtgtgattaagagcgggcagttaagtgcaaaattatccaatctctctgcaccccttggatgaacattctgtggtccagattagagtttatacagtttgcatgggagatgagtttgcactagatccgttccctattatttttgggacctagaaagtaaaagtcaaaaccgatactcgctcgaaataggccttgtttagttctcgaagggaaatatttcgcaacgctgtagcactttcgtttgtttgtggtaattattgtctaatcatggactaactaggctgaaaagatttatctcgtcaatttcgaccaaaatgtgcaattagtttttatttccgtctatatttaatactccatgcatgcgtctaaagatttgatgtgacgaagaattttgaaaaattttgggtttttaggtgggagtataaacaaggccctagcatgaaaaagcgagagcactggcccgaggcctacggccagagaagcaaatgctgattcctgacccgactaggctagaggtgaggtgcggcatcaggcaagggttgggacttgggaacaacctgggcttggctgccgctattttcaacctttctcacaagtaacgaggttcgattccccaatggtggcgatgcgaagcccttcgatgacacgcgggcccactggaccgtcgccgttactccacccacccgttggcgcgtagccgcgcagcgcaggctgccgccctggaaagaggctctcccctgccagccgcgaatccgccatacaggtacagcagaccaaccattgccaagccactactcgtcccgagaccaggtcaggttcgcccgcagaaacgacccggtttgggcccctgggtttccccggtgtcgctcgcccccgcctgcgcgcgctccacgtgcttcccaacgcccctcgcgcggcgcgcagcccgacgccaacgacgacgattgcaccgaaataatgaccccaaaaatccatccgaaattccaattcccatccacctgagctcaatcggaaccagcccaactgattccgtcgacccgcgcgtagacttttgcgcttgatctgatatagatatacagattctcaaatctcacgtcgtcgcccgatctgccgcgccgcgttccctgccgccgtgccgtgtcctggccatgacggcggtggagctcaggatcgggccgctggactggctgatggatgaggaggtggacgaggacgagagcccgggggtgggagatgaggatggcacggacgaggactgggctctggatatggagaagaaggggaggagaaagcggaagaggtccacgcctccgagacgctcgggacccaagcggccgcggcgctccgctccggcggtggcgcccgagccggcttcgcccgcgcgttcaccgtcggagccgtgcctgggggggacacccgagccttcgccagaagagggcttcaatgctgctgtgacggcgacggagggagtcaaggaggaagacgggttgaggaaggaggaaggggagaacgtggctccgagtccgagcaccagtggcagaggcggcggcggcggcgggaggaagccgggggctaggaggtcgtgccaccggtgcaagacggtcaggcctccggaggagacgatcaggtgcaagcgttgtgacgtgaggatctactgcgtccgctgcgtcacgaacaggtaatgcgcccccttcgatgccacaaccgcgcactgttgtgttctgttctttccaggaagaaaaacgtcaggaaactttgtgattctctgcaggtacacgacgatgtcagtggatgatgttaaggagcagtgcccctcctgccgtggactctgcaactgtacctcatgcctcaacaaggataagcagcagcttcgacccgaggtgaccgccttctgagttcaccactctatctagtacataaatacatctgcagctcagcatgatttgaagcaattgtgtttctgaatttcctgtggtttcgtgtttagagagcgttgttctttgttttcttgttccattctgttagattgccgtaatgaactctgtcacaggttgaggattcttttttttttaaaaaaaaaaattaccagacgtggctgagttctgagaatgtttttttcttttttctcctcccctcgtagagcttgggtttgaggaaatgcaatagcaatggatcatctacaaggacaaagaggtccacttctgcaggtgtgaaatcaccccaggctcgtaatgcagaaccatgtatatcagatttgacgacgaataggatgaataatgtgtctgccatgtcggctgaggtggacacatcagacatgagcgctgaggaggttgatcctgaaacaaaacgcaaatatgccagctacctgttgcactacctgttgccatgtttgaca

SEQ ID NO: 4115 - DNA, 6879 bp, Sorghum bicolor
cgttgggcgtgctgtctctccttcgtctcacataggcggacctttcggcttggcatgggtggacctccccgacaccggcacacctctcaggtgcgaggtagcaagctatccgagtttgtctatggcaaagagaacataagagaggatatacatgtcattctctactagaatacatttgggtggtctgttttagatattgttgttggagaaaatataaaaaaataggaattatcagaatatatggctatctaaatatataaattggtttcttgttttaagtaacaattgctggagatgctctaaccgatattgacaagtcctcaagctaggagccatcttcaaggttggaggaagatgttttggatggatcatagcttgattaattcgattgctatatgttgtcaaaacactcgagtgatgtttatatttatgaaaaaaaccaatgaataaagtaaatgctcgtaaaaaaatgactaaagtaaatccaaactcatgaaatattgcttactcaagtggattcaaaatggtggtatactcttgggcaagaataaacttcaactatctagcatatttataggccctatttggcataactccttcactagtaactccgtttttttttcctagaaaacaacttcattggcataactccttcactagtaaccccgtttttttagaaaacaacttcaggagtaactttttaggtgaagtcaagctgtttgaaaaagttatttaacaaaatagctccatcaacaactttatgcatggataagagcgagaaatgagagagagagagttaggataaacaatttttttagctttatcataactttttgtgagaggagaagaaaaaaaactttattttttaaaatgaggatatggccaaaaaaataacactgttatgagttgtgctaaatagatccataattaattagaaattttcacgatataattggctttggcttcctttattttcatttgattgaaaccgaatgcaccaacgccgagtcgccgagcaaaggcgacctgacacctggcacgctcccagtcacaagccggcctacgcaatcgggcactcaccccttctgcgctctcgtctgtcagctttcattgccgcgcggccgcgcccacgacctgctcgacgaatcgccgcttccgccccccgccgcgatgccgacgcccctcgccccggcgctgctgctactgcccgcctctcccgcaccgcgcttgccgcggccgcggcccggtccctcacggtgtgcgcggccttccatggtcagggaggccgcgctccacgccctgccacggcgcctcgagctctggccgccgcgcctcgcggcggtcgagagcaaaccgcccccgccgcccttagagccgcccgagccgggcgaggagagcgccgtctcaggtgggggcagctcagccgcctgctggattgttggttgctcgcgctgttggcgctgatggattgacacgggcgttcatttcgtcgtgataggcttcgatgccagggccgggggaggtgacggtggtggtgacggaggtggcggcggtgatcttgggtggttgaaggcgttcccgcacgtgctcaccgcgtccatggcaaattttctcttcggttaccacattgggtgcgtgcagtgcagtgtgctgctttaatttatcttcaactaaagctaattgattctgcatcggtgcctccgtttaggagttatatcaattgatcactagtgcttattccaccactgcatggcattacattagagaatggatgactgctccctaaatccattttgtttgagaacattttaagtgccacctgcactactagatggatatgccaattgtaataatgagaaaatggacttggattatcatagtttataggtatattgctctttagtgggctgtgccatgcaatgtattctacattttatgttgcacatatgcttgttaaagcattgaacttaagtcttggtgcatgatatggttgcagggtcatgaatggcccaatagaggacattgcaacagagcttggttttcaaggaaatccgttcctccaaggtcttgtggtgagcatattcattgttggtgccttttttgggagcttaggctcatctgcattagtagataagtttggctgcaaaaggactcttcagatcgtcagtattccattgattattggagctctccttaggtatttacttccactttaccgtgttctatattcctaaagtcctgactttgcatagtttctgctgaccagtgtagtatttacttcctctcaacagcatttctatttcatgcattacaatttgttgtatattaagctatcacatggttttttccttaaggaaaagctatgatacagtgcgcaggctgattctttggatgagatgcttttgggaagattccttgttggcatcgggattggcgtaaacactgttcttgttccattgtacatctctgaggtgatttcttttattatttcacaattggtcatcgcatttatattctatctaatctatggatattttcctaatactcttgtcatgattttgatagctctatatccattcaacccttttatacgctttttctaggttgctccaacaaaatataggggcactttgggaactctgtgtcaaattggaacatgtctaggcataattgctgcactttctttggggataccttctgagagtgatccacattggtgaggcatctcttgttggcatttctgcatcttaatgatgtaagtcatcatttgtataaatttatttctgttgcactacatgataatagaaaaaaaataacagatgtacttatcaaggcagatgcatcaatcctttattcataactcctcatcgaatagaagaatagaaccaagatatgataaggaaagttagaaataaatttcaggagcatggatgattatgcaactgtatagtattaagccttgagtttgtcatgttaattttatggtctttaaaaaaatcagtcaggggtgatggtatatcacagtaaaaaagatggaattatgggagatggcaattttttatgtgatgcaaactgtgacacctgatatatatatgtacagaatatgccacggaatagcatgtgcatggcctcctttattctgctttcagaatgcaccagcatataaaatttccccacgctaggattatacttcacgaaactgctggcatgggcaccataattttttttcttgaagtggaatggttacacaaagttcgcaaaatgatcacaagggtttatgcactggggcctgtttgcttcgacgactgaggatcttgcctagcctaggcagcgattctaggcgtccaattttttaacgcttggggtcggatgcgctgcctggaggttaatatcgatctaaaccaatcattttttttctatatacatacaacatgctaatggttaaacaacttattagcaatgcaagaaccactacaaaatgctagtaaatcggccacattcaagggattccttgtcgaggactgtgaccatgtgctagggtgtatgtacgactcgctcagaacaaatggttatcaattaagtggaggaaatagtaatgaaaataaaaaggtttatgctatttttcttaaaagaacaaattaaagggtcagctacttagctaactttcataatgaactttaacttacccactacatcactctgaactagttactatccagatgcattgtctagttaacagattattcatgtgttactgaaaattttatgtttctgtctgtaggtggcgaacaatgctttatgctgcatgtgtacctggggttcttattgttgctgggatgcaatttgctgttgagagtccgcgttggcttgccaaggtactcctttaagattcaattgatagggtcccattttgttgtgcaagacctttagcatcagaaagctctatcttgtaggttggaaggttcgatgatgccaaaaaggttgtagagagcctttgggaaccttctgaagttgagaagtccatggaagagatcaaagccgttgtggtaaatgatgattcacggggcagctggtcagaccttctggtggaaccacataacagaggtacttctttttattaggatgtaaccttttcttttggctggtgtaaaggaaccaaatgaaatgcttgtgaactacattggcagagtgcatgtttgggtgtgtgtatgtccatacatttgcattcatgcacgcttggttgttggattacacctgagacattcttctgattctttcacacttcaaggcctcataatggatggcctgttatttgggcactaagtttacttctcgacttttgctgtgatgagttattgctgatgttctgtcatagtatttgaaacatgcatgtttagcaccaccaccacaataccttcatgttcctgaagtttttggtcagttgtatattaattttctttatgctgtcaagagcttattgtctaatgtatatgcagttgcattgattggagggtcccttttctttctgcaacagtttgctggaataaatggtgttctttacttttcatcgttgacattccgtgatgttggcattacaagtggtgctttagcaagtttatatgttggaataaccaactttggaggtgagtaaacttggttattcatgttgtgctctatagcgacttgttctcaaactcatgtaccattcttactttttaggggcactagttgcttcaaatttgatggacaagcaagggcgaaagaaacttttgataggaagctaccttggaatggtatgtgctatggagccttttgtatggtaattagaagaacttttaatacttaattaactaattatccttcttatcgaagtttctgcattctctgctgtcatgggagagtataaggaagtgcctggtttctgtccatattgttatcgagacggagtcatgaatgcgtgtgtttcttgtgcatgtcgatgggctcttgtccttgagtacagtttaatttattatatcctgttatttctgcaggcttttgcaatgttccttatagtatatggtattagcttcccgcttgatgaaggagttgcccacagcctttcaatcgctggaactcttttgtacgtactttcactttctattgtctgtaacaaactgcttaaggttaaatcagctcaatatgatatgttgtttctcagatatttcaagtttgagaactgaacacatgttgcaatatgataacttgagagatctttactaaagacattattttttatgttgagtgtgatagcagttctgtttagttcttttcgagattttcaattgttgttcttcattagcagaaggcttgcttagaaatttggtggaaattacatctgtggatttctcaatgtatacaaatcatttacttacctcatgaacaatgtgaaatattttctagcacattctctgcttcatgatatgataaatgaatttgattcatatagttattggtcttccaccttgttagtgtgtaatgaaaccactaattcagaatatttactagaaattcgagttgtgaaatttgtgtttataaattgattataattttaaaaagattgttagttgtgagatttatttttcatttgcaggtacatttttacttttgcacttggtgctggaccagttaccggtatcattataccagagctcagcagtgctcggacacgctcaaaagttatgggcttcagttttactgtgcattgggtatgcagtttccgaagtatcaaaacactacttttgtagtttgtatgcacactccacattctcactggatataaaaacgtaatttatcactgcctacacctttaatctaacttacatattgcatcgttttcagatatgtaactttctggttggactatattttctggagcttgtgaacaagtttggggttggagcagtctatgcaggttttggtgcggtctccctgctgacagcagtctttgcctacaatttcatagttgaaacaaaaggacgttcgcttgaggaaattgagatgtccttgaacactgctacccctggcaagcaagagtagaacatctcaattatatggacaaactgaactactgtggggaggaatttaagagcagaggcccatccaatgtagcttactatctattgaactaacatgtgtaatgtacttgttgtaggctagtggctatgtcaaagcattttcccataatcccatcaatcttcagcagcagcaatttgttaacatcaactcctatagttatacccatgtatataatgcatagcataatcaaattcagcttattttttggtagcatgagaattgttgtacaacattaaaaagggtgaagaaaatgccccttttcattttttttgggtacatctgctgtatattttacacctttttagtatgtaaataaagggaacaaatgtttttaataatttctgatgttgcttgattggtgaattgggaatattcacgccctttcttctggcatttctcatcgttgctctggcataacgtctgtggttctaagagattgtgccacatcccaaaatttcagtgagcattgagcataccaacaagatgcaatctctatcatcaatcacaagcatggaaggcaagcactcaagctgtgtatctttttgctgaatattcggcagagaagaaataaacgtcaaccaatccaggacagtgctttcagttcagaccctctttgatcaatggttttgaagcttcaccacacatgaaactcatggctgtggcacaccctgcctcagatactgttgctcctgttttgtggtctcaaactcgagaagccaaaaatttcctggtcaaatcagattattttctccatgtcttttg

SEQ ID NO: 4116 - DNA, 5224 bp, Sorghum bicolor
accactacgacggcctctacttccggggcgcgcttgccgccgccggcttcaccgtccagtggcgctcctcgttgtcaccactaagcaggttgggggttttcaggttctcctaaacctgcgctgcggctctggttcggatgttcaaagccgcccctttttttcgcgcagttaggcgatgcgctgggtttccgcgtcctgtactcgatctcctgcgctgcattttttttttctcgggtgtttcttttagggttgtttttttgggataaattccggggccgtgttcttttagtgccggtaaatcttttgggttccgcgaatttgggcgcggctgggtgtagaacgaacatgctgcgccctcgccatttctttggttttggtgtagtttggtgccgaccaatccaggcagaatgtgtctcgatcatcatcatacacacttttctttgagtaaatttcttacggttttattcttgtatatatttttttcttcttccttttctggataggatcatctgcattcaactcgatgatctttacaaaagccttaatttcccttcagcaccgggcacatggaaaaaaagagccccttttactgtgctccactcctcccttctaccatggagattcatttccctctcctatttgattgtggaatctttactgtagtcttactctgtagttgagtagttttaggatatggagcgtactgctagttgcattatggtattgaggatatatcatttgctctgtggagattaaaaatgtcaatggggcccgcgacccgcgacccgatgggtatttactctattagtgtaccaatatggagtgaaaccagtacccacgggtacacaaatagagcaaacccttcacccattgggtgcgcgggtatggggacgttctagtagtccccgtacccatttacccatgggtgaaaaatacccggcccaaaactaaagaagcccaccagccaccagtccaccggcagctcatacactgaaaccctatgtagtgctagcaaagtacttctctctactacatgatttgtatggatcatgaactattatggtgctatgactagtggttgcagtagaaattattatgttgctatttgctaggtatatggtgaggtggctatgtgacgatgcttgtgaattgctactacgtgattggtgcttgtgaattgctgatgtttggcgggtatgggtgacccgccgggtctaatttacccacctggatatgggtctggggaaattcccccacccatgactgtatatggggatacccgtggtgtcatattgttatcacggggatgggtctggagagttcatacccgatggggatttacccattgccaactctagtggagatcacgaaatgttgggtgaggggaaaacttcattacctgtttggaacgcgggaattccacaggaatcgttcatcttgcttatgaatttatggtacctctgtgtaaaagggcagcgaatgatacctttggtttattttcttttaccttggtacttcagtcacgcatgatcgaattgtttatatgctacaaaaaaaagtttctgatcagtgacaatattcatctgcaaactgttttcttaaatggatgggcaacactttgaaatttaatgggcagtaaaagcttctaacttgaattaaatatcactaaaagacaaaataggaattttggtgataccttcaatggttgctatgcttattgatttattttgatgctcggataacagatatacttgccaagaaaagatcatacttgaaaagtttatatccaatattggcatcctccattttattgttttagctaaatgcatccttctttatcgattcagttttaaactgaattctagaaacactgctttggttatctatgcaggtcttttggatcttgcaccttttcaaaacaacaaaataccatatcactctccgagtcatttctcaagtatcgctcatgtactgaccggaagaatgcattgcttcatgaaatgatccatgcaatcatatacgtgaagtttcataggaaggactggtaacatcttcggctcttaattaagacttatgtccttaaattgctgttagctctaccctgcttgctagctgcttagcttttctgttaatcatgtcagctataatcatggtcctgctttccgtgcttggatggaagccattaactcatgccgcaaacaggattgccaggttagtctttcctgtatggaaacctactcatgcactgtaaaggaccaccatgttatgttttctgtctgaaaacctgtaagccgttatgccctgttggtgatttctctttttcttgtgcttcagagaccagatggtgggtacaatatcaccactcgtcatgatttcatcccagaagagcaccatagcttcaagggtgtgctgtggaaggtacttctatgatctgctcattgtgctatctctcttttttggattaaggtttctttttggcagtattttatcataatgtggcatgctctattactactttccagtgcgggtcttgtggtgatacacttctgaggcccataaaccagggtcctccatctaatgcctgctgcattgagaacgatgacatcagtgcatcctgtgggaactttctttgctactggcacaagtaagagtgtttactataacaaataaaagcttatcatatttggacagagcccgttgtaccacaggcacaataaaattagagatcaagtcatttgagtcttgttaaaaggtttatccgacatgaaggtcactagcgaataactaatcagtgccttcagaactagatattgaatttgttctcaaaatttaaccttaaactacgccaaaataattgaccttaacttatcactaaatttactttccgctgttgcgctattttggaatagactcaattactacacttaagattatttccagataatattaatcagcatatatttccattggtgtatgcaaggagctgtgttactgattgtattatttttggcagccacaagaacgaatgttctggtacgtatgaaaaaacgatgttgaaatttgaagcaccatctcaaaagaaagttacagaaggtatatgtcccacttttcatatgtattatgcatttacatttgtaaacattgatctatgcaataatgattatggaagctaaatgtggctgtccaaatacagttatacacttatacttttacacataaactgagctaggtgcatgattgtttttattctcgatgcaacaaaatttttctgccgtgataattttttcttcatgagggtttcatgcttgacattttcctcaatcaaccaagcagaccgtaataaaagcttgacatattagaattcattgtttaacattatgttgttctgtgtactgtggtaaccccaccgtcagtggacagtgacatttgatgcttatcattctagtaaagacatgttaccatatcaactcacacaatattaccttccaggtgctcagttgcttctgactttaccatcagaaatatccaagtcaaaaggagccattcaagaatctggttcatctatattgcagttgccatggtatactaaagccacaaaaccaaatgctgaagaaaagcatctttgtctagggagtggcagcaacgggaaacctcagggaagtagctcctcgaagaaagcagacaagaggtgcaggcctgaaatggttgggaaaacacttgttatgcatgctgcaccccaaggaaaaccaaatcaaaaccatggattggttgcaacggtgaagcgtgagcctgtgtccgtgggaggctacaatgatgcaaaatcacaggggagagatacatcaaagagagctggcaagcgccataagcctgatgatcttcaggaatccagtgttctcccttctgcacccctgggaacaccaaaactgaagcatgcattggttgcaacagagagtaacaaagtctcctcagcagagtgttgcaacggtgcaaaatcaccaaaaaccattacgtcaaagaaagcaggagagcagcatgagctccagattgctcagaaagcctgttctcagccagctaaccctcagaaaagactgaagcaagaccgggttgcaccggaaaagaaagaactttcccatttgatgggctgcagcaacgagaagttattggatatgagctcctcaatgaaggcatacaggcagcatgagcccgaagacattaaggaagccactgttctgccaactgtccctggaatcaaacccatggcatcagagaagcagcgaaagggaaaatgcaaaaggaagcctgtgaaggaaaaggagaggaagcctgtgaaggaaaaggagtatgctgtgatgagtgcatggctgaacttctatgaatcagataggtcaagtggatcgcccgagccccttgtaaacaaaagaacagagcggaggaggagagaaagagaaagagcaaagatgctgacttattcacggtcaaagaagattagaagtgagccatcagtcaactctaggacatatgcctctgccagtagccacagaatcgagatggcaccacaagatagatcgatgcaacagtcccggccaccatctccatgctcagaccatgcagttggtactactgctaaccaggtggtggtgactccagcaactggagatcagtcgcagccatctgtgccatgcctggatgcccctgagatgatagtaatttctgatgatgagtgaccctcttcgatgatgataactagcatattttggatggttgttgggctcattgctacaggcagtgcgttgtatggatgagcagccaaactcactagatgtggcgagtctgccatagtatattggaagtgacgtagtgtgctagttcttactatagagtagtgtctgacgatcccacgaagtctcttaaattgctgagagccatacaacatatctgtaatattttttttatgtcgtcgaactctttcgtggacagacacgagactgtaggtgctacagcttgaacttgatttattaaacaaaaaacttgaattttaatgacctgcgcctttgctgcctgtgcttctgttggtgattcagtcagcatctttggctctaaagcctagtgtggatatgcatgtggtaccacatgaaacatctgcttgatgtctaacctgtgtggctgctgcatcgttgcatagttgataattacttgctgctggaatgtgacgcacatgtcaatg

SEQ ID NO: 4117 - DNA, 3307 bp, Sorghum bicolor
caccatcaaccacgttgaagatagtgcctaatcagaaaataaatgagggtacatgtgttttttatgttctttcttaatttgttttagaattcctagggatgtactgtattacaagatagaggcagtatgcttagaaccctagtaaatcatgttgatccattcaaatccgactagatctctttgtagcaaactataggaaaatgtagatttaggtcattcaacattccatcctagcctcaggttgtataaggtgaggcaagggcgacctattcaatgaaccttagcaacatgtagcttagaaccctcgacaaatcatcagcgccctataaacccgagcttacgacacaagagaagcattctccactagatgtagggaaccctatacctaaaccagtatacattatttatgtcttgtgtgttatccttctgattctctgcacacaaaatgttaatttactagtcggacagaaaatcctataataactgccttcatcgtcgccacatgccaattttaggctcctctttgtttagtcaatatgtcttagatgtgttggcaccgtccaacctacctcccccatcgttcggtgggcggcgactacaaccactgtcaatccgattaggtgacctctttgttctaagtcagagaagcatggaacttcgtccaaaaaatccaaccctaatatcgacgagctccttcgtttctaacgatggtggcggcggatgaggtctccgtcttttttgttctctttttatgtccatcctccatatagcttaattattcacgtgagattaaggattcacttagggttttttacccaagcttacaacgcaagagaagcattcactacctttcgccggccggacaccttttaagttttaaccgtggaccaaacaaaggcttgggacaggagagtaccacatatataactacacatagtagagaagttgagcgggcatgtacgtgatatatacgatcgtcgtgtaccatcgtaggtactgctccgcgatgcaggagaccacccagatatacatatgtttttcaacacgcattgcctggctgaccacgtgtccctacagtgcaccccctgtagccgccctagctatggccttgtttagttcacaccgaaatccaaaaagttttcaagagtccccgtcacatcgaatcttgtagcacttgcatgagacattaaatatagatataaataaaaactaattacacagtttaggtgtaaatcacgagacgaatcttttgattctagttagtctataattaaataatatttgtcacaaacaaacgaaagtgctacggtgtcgaaatctgaaattttttcggaactaaacaaggcctatctatctgcatcgatcgaccccaataatgccttcatcattcccttcctaactcctctacataccgcgcacaccaacgccacgcagctacctctaggtctctctcctagcccaaagcttctgcagtgacgcaacagtagctggtcgtcagcgacgccattgctctgaatgctgtgtctgtgtggctcaccctctctccctgcgaagtcactgcgtgccataaacaaacaaaccaacacacacacacacacacacacacacacacacacacgatatgtcctagcaaacacaacacctaaaagcttcactctcacatctttctgcttcctgtccacacacacacacacaggcccctttcaccatctctagctttttcatcgatctgtttttttcgaccttggctttccttccccttttaaagctttgatgcacacaccacaccggccactcgaaatggacacactccacctgttgatgtgaagatctgtttcatttccagtctagtcgatctcacatgtgagaggaaccgatccagcaactgaagaattgaagaagatgatgatgaagaagcagtagcagtggcagtagcgctagaactagctagatctcctcccttgctagctagaagcttgtacaaacagtgcaccacacagatgttgccttaccctaaccctcaccatttcggcgtctcccaagaacccccacacccaaaccctaccagcttccccatgcttccgccgggcgcgcatctggatcagcagcactacgtggaccatcacttcttccccggccacggccacttcaactccgagacactggaggcggtgctgaggccgacgcgcgctgctccagagtgcgaggccgcagtggcggcggcggcgcagcagggtggaagacgaaacggtgtgcccgccggcggcggccagggccagggccacgcccgggcgcggaagcggccgttccggacggacaggcacagcaagatccggacggcgcagggcgtgcgcgaccgccggatgcggttgtccctcgacgtcgcgcgcgacttcttcgcgctgcaggaccggctcggcttcgataaggccagcaagacggtggactggctgctcacccagtccaagccggccatcgaacgcctcgccgccaccgatctctcccagcgaagcgtcggcggcggcagcgacgacgcagctttgtcacccccgacgtcaggggcggcggctgatggaccaggtaagaggggaggagttgccgagaagttgagctctagaagtggtggatcggcgtccatggagatggagcacacctgcgacctggaccgcctcgtgtccgcggcaccggtgcttcgggagtactactacggcctcagcgagatgatgagcaacgacaatggaggggacggcgacgacgatggtgagtacgaggaagacggtgatttcctggacggtatgcaatattagtatgtagaagcagcttgcatggtttctctacgtagtagagtacactagtagctagctctttctttatctggcaagcacttcttcactatcgttagttcctagtacttcctagtattcatgtgaactcctttaagttaatgctactggcaaatgctgtgacagatgttactcttgtgctccgcttttgattttcaatttgagcattcttttggggttttatgcactagctaggaaagaatgttgcttgtttgactggatgacttcatgagtagtgtctatatgtagacactctaccttgtttagttcgcaaaatttttcaagatttccatcacatcgaatcttgcggcacatgcatggagcattaaatatacatgaaaataaaaactatttgcacagttcatctgtaaaccgcgagatgaatcttttgagcctagttactctataattggacaatgtttgtcaaataaaaacgaaagtgctacagtgtcgtttttcacaag

SEQ ID NO: 4118 - DNA, 4492 bp, Sorghum bicolor
ggggtttttttttttccggaaaaaagttgtatgcaaacatgatgtacaccacctgccgtgcagcacagaccagatgcaagccacctgtctctacctcaaccagacaaatagctcttgataaggtctctccgtgaaaagggtgcaaggctctatgacaccactacactacctgcatgcaggatcaggtggtgactgaatatcacgaggcggaataagaacatcaggatacgtggacggcatccggtccatgctgcatggtaagtagtgtacatcacgtttgcatataattgttttcatggtttttcccactcccgatgatttaccaacgattttgattaaggatagccggacaaatatcatcgtatttttagtgtgataaaatatacataattatatatttaaagaattttttaaaaatatattacactatttcttatcaaaattattattttttaaaaaaaaattaggtgaaattgatatttttatgctataaataccaatatctatacatgtattttaaataaatcattgtgctgggggcactgcccttgctagccccctggtcccgccagtgatcacagataactaacaacgcacacactctatccgtataaatatacgcacacaaatcttatccctataagcatctccgaaaactgagccgataagttctcgagatcaacaacatcaccacagatgtcttgttgtcgacaaaaacatcatctaccattaaaagcacaacgcgttaaatcctgagaaaaatttactcatatgtagagtctaacctaggacataaaatggcactaatgctcttgtaaccactagactacaggccctctctcactcgtgatgattcacttctaatgctcttgtaaccactagaccgccctccatctgcacaacgtcgtattccctgaccaaaggttcaaactgacttcagacttgatagctgcgcaacgagctaccaacgttgtgctcagtggttttccaaaaatttagagaaatcgacactgtagcacattcatttgtatttgacaaatattgtctaattatggactaactaggatcgaaatatttgtgtcgtcaattccgaccaaactgtgtaattaatttttattttcgtctgtatttaatactctatgaatgcgtctaaagattcgatgcgatgaaaaatgtgaaaaattttgtaaaattttctagaaactaaacaaggccctactttgtgattctgacgacttcgcactgctacagaaccaatcctgagatgatctgacaaagccggtcatgtgaattgaaacacacatcgatgacggagctagcaagcgcgtgatgagagcagagaagccagagacccggacccggagcagagacgagagatccaactacactgtactgtaccacgccaagcaacttttttctgttgccgagcgagttgacatatcaagcgacctgcgagccgtgctgccgtgtgctcgagcgtggagagggcgtcggtcagatgagatggctcttgcgaggagcaggagcctggcactctgccggcgcaacaattaccgatggcaagcgctgccgggcatggccaagcgtgacctgacacctccaggtttgccggcagctgcagccgcaagcaaagcaacgttgccaggactgtggcgctgcacgctgcaccctggctccgcacttccgcaggcgcagcagcgaggcgaccgctccatttcgctccttttcctgttgtttttttcagaagaagggcagaggcggattcactgcagcaaggccttctggtcagttccctttcggcccgtcactttaacgggccggcaaagctagcctgctgccatgagcccggcatccaccggctcggcgggcgagaatattcgggcggcacgagagaacagtctgccccgcctgggcaaggccaagggaagatcccctcggaatcggcatcctgcgctcccatttcttggcgtctcccgacgcggcgctcacgccaatgcctatttatcggcctccttgccggccgatcgggcgcgcggccagccaggcagcgacgaccggcggcggcgaggcgggcggagaccacgcgcggcgaggtgggtttctactaccattcacgttcttctctcgtagctaaccgcctgcgaccttgcggtgcgtctccatctataatcctcctggcatagaccatttgttagtttactttgaacaaatggaggacctttgtttatcaaaaggatacagctgaagagtgaagattagtttgagaggtgaacgagcgtagttgttgctcaaaggaaatcaactgcatcttatctgcagggctcaagagcataagtggattgcagcgtttcgtcgccttacataggattaggacagatgggagccctgaatggtagaaacccttctaccgttttggatggcctctatggggtgcagcttggtgaccgtccatcgcagccggcacaaactgaggatgaagctctccggaccacgaccaccgttgtagagtcatcagcttgcgaacaccacaagagtggtacaacgcaacaaagattgctgatccggtgagcaatttgaagtagttaaccactagtcaacatacacaagctcagccttgtaaaaaaaaaacacaagctcagcatatgtgcactaaccactgactgatgccttcttgtaactgcagaagagtatggcagcagataccctcttgcttgaagcccatccactgcaccattacatgtacggtaacttccatcagtagaaaatcttgccatctgctaatccaatatggcgatatgccgatatctacatactactagtaaacaattctgttttgagcaggtgacaagcatgctggtgagactattgcgaatgtcgtcacctctctgcccttcattgttcttggactgcagactccaaggcaaggcacatctcgcgatcctgaaataagatgcgcctatgctttgtttgctgacagctgagagtatagacactctaataacaggtcggcaaatgatgctgcaggaagaatttgaacaccgctatctacgcgaattcgctggttggggtgggagtagcttcaagcttgtatcattcttccaaaggagaaatccgaaagtttctgcgctgggccgactacactatgattgctaccaccacacttgtaagtcatcatatccttgcactgcggataagtaccattgttagactgccgggattcacacgtcatgggaaccatgtatttcttgcagtgtttgtcgagagcacttagcaatgagaacccaagattactaatgacagcatcagcattgctcctgccgttccagccattgatggtttcagctgtccacactggactgatggaggcaagtaatccaaatgatccaatgtatctgctctagattaaagagaacacttcaagatccatggaacagtttgtttggaaatctaactgtcctaataaacgccaggtttcctttgcaagaagagcatcaattgaaccagagctcaggatggcacataacctgcacaaaatgtcatctctgctgggaggtgcgctgttcattgccgacgattgcttccccgagactccctatatccacgctgcatggcatcttgctgctgcgattggcattggcacttgcaacaagcttcttgaatgacagttgaaatggtccttcactcctgctgatatcaacaagtagttgatttcagtattattacgaggttagagtgcatacaggcaacttgtcgacatttaaaatagcaaacactgtaggtctatattggataggagattggaagtctatcagattgatatcagatactgttttttttttctttaggtgaactaggtgtctaggttggcttgtgtatgtatttctgctaggatttgtttaggattttcaccattgttgtgacagtgaggtgacctgcaacaacaagagttgtagatggaactataatataatataactgtttccaccaaattttaccctgaaaatgctacaaaagaatgtaaaacaatggatacgtgttaacctggaaaggaacaagagtgcattagtatcacaggcaatctgaaggcggtgaagatttgttgaagactaacccatttgcatctatgccagtgctctgactaacaagagtgcattagtatcacccgacaacaaataattgcagttctacttcaagtacggcggtataaagtatgcagtcttgtgaaagatgtttgcttttgagtcatggatcaaaccagtcgggcttgtgctaccaccatgctggactcattctcattcacccagcttctgcctgcaggtttctcagcattcagtgcagccactctttccctcaccatccgagcctgctcccactgtccaacagcagcatacatgttggacagcagcactaggtgcccagccgctcgttctggctgcagttcaactaatctatcattcactttagctgcgagctcaaggttgccgtcccttct

SEQ ID NO: 4119 - DNA, 4497 bp, Sorghum bicolor
tgccggttgaaaaccaaataaagttaaccaaatagtgccaaaatcttcaccaaatagatcacaaaaatttcagttaactgactttttcagttagatgtctcgttcggttcgattatttggttttggcgaatttttgcctgcccaacgattctcatttttgcactgcgtcattgaatcaacggaagacccgtttcagtgtttcacacatgaatcacctccgtttctttgtctcacatgctagccgttgtatttttaattatataatcctttttagcgcaacaagctaaagtggattgtattcgttgctgtaagcccacaaaagattcataattttttgaaatatattttcattttataattttaataagaaaaaacaaatatcttttcacgaatgggaacctagcgtacgaaccaaataatctcacaggatgattttttctgagaaaatctaggtttaagatgtttttaaaagaatatgaatttctgtttgtttgagtttatcaatcgaatcagctgttcggtaatgtttttctctcgtaacaaactaaccaacagtactttctgttatggcttatcagccaaccgaatagaggacgcacaacctagttgacgttgatgagaattgacatggcagacctccgcgatgcggcacacatggactggctctgggtccatgtttcacgtaccatcctccttcgcacccaatcacacttgtgcacatacgacgactaattcaataatttgccgggaggtcctcagctacagctggcctggagatgtgcagtctaatgcgaagccgcgaagggttagctaaagacggttagatcgggcgtgtttacaagggaaaagccacaccccagatggaaccagtccacagccggtgaggtctttgagtcccgttgcgttgtccaatttctattggccacaatgcaggtatgtatgtgcgcttcagtgcatatgcttttgtgtaccatataggctctctgtctctgctcatcatctctcgcaattcataccctaaagcaagtcaaataaagcaacggacgcgcattcacccttccttttccgttcgattgagctgtcaagtctgctagacatttaacaatattttttttctttcgtaacaaatcagtaaataatacttttaaccataacttttcaaacaacacaacataaatccctggctgccacgcgtgagccgtgtcccaaaacgggtccgagggagagaggacttcgcattagcgtgcacgcgacgcgtctccgtctccatgccgtcgctaaacccaaaaggaattagcacgtcccaaaacccccccacgaacctgcgctcgctgatcccgaatccccatccatcatcatcagctttgggccttcggcccgcccgccgcgtcggcagccgtccacctcctcgcttcccgcaacgctctccgatcgcgcccggtcgatcgccgccgcgcgggactgcgcaagcggcgggcggacccgcggacgcgtgcgctgcgccgccgacgcgcgccttagacacttgacggagcccgccgctgggagcaagcacgcggagggaggggcgcccctattttgctggtacgaacgcgagaatccccttctgcgtgccgttatgtgtaaaattaatctgtggtctcgatcggggggtttttgggttcatcactccgggtcggtgtggtaggtgccggtacctgtgccctgcgtgcgtgcgtccaaattggtgtgcacaccaagtatctgacggtgtgcctgagaggagctatagcccgctcgcctttgcccttgtagcttcagatattagtggttttatacttctaactcgtgattttgatgggatcgtgttttttttttggtctccatggctgttgtggttctatacttatcgttcgtttgatctggaggaccatgcatgctcacgccttcaattcccttggaacacaggcctcggctgagtgttgattcagttcaatcgagagagcagcacagctacagcaatgttggaccacctgatttccatactaatggatgcagttggagtgttgccagctaaggatctgcaggtgccggccgaagaggcttttgggttctcaactcactcagcgacggtctgtgtggtttgcaaactggccatcccatcgttggaagcctcatggaaacctgacagctgtggccatgccatctgcattccctgcttctggcaatatgtacctgagatggaggccactgatgggctgtctaggtgtgcagtgccttcttgtcaatctttgtgcaagcccgagaccactcaggggatgatcaatgtgggtcatggcaccttgatctcagttgcagccataaacagtggcaaagggaaagaaccgttggatggagtgcttgaggagctaggccaatgctctcgtggtgtggatccagtgcccagcagtgacttctactgtgccatatgcatggagaccgtgcatgtcggagagctcttccccgtacccgggtgcacacacctcttctgtgtcagctgcatgagccagtacatcgctgctaaggttgagaataatgtgttctccattggatgccctgaaccgggttgcaatgatggtgtgctggacccagaggtgtgccgtgacatgatctcgttgcagctgttccagaggtggggcgatgcactctgtgactcagcactgggggcattcgggttccactgccccttcaaggactgctcggcattgctggtcaatgaacgtagccctgacgaggcggtaataaggcaaaccgagtgcccacactgctcacggatgttttgtgcacagtgcaaggtggcatggcactccggcgtaacatgtgaagatttccagcagctcaggaatgatgaacagggccgagatgacccactgcttaagaaggtcgtcgtgcatgagaacaagtgccagacgtcccagcagctcaggaaggatgaacagggccaagatgactcgctgcttatgaaggccgtgcatgagaataagtggcagaggtccctccggtgtttggtagctacatgtaaatctttgtggaaggcaaatcggatgatcgatgtgggtcatagcaccttggtctcaactgaagacatggacagacagaaacagaaagacatggataatatgcttcaggagctaggccaatgctgccctggtgggtatgcgattgccagcagtgaattctactgcaccatatgcatggagtcagtggacgtcagggagctcttccccgtttctgggtgcacacacctcttctgcatcaactgcgtgagccagtacatcactgcaaaggtcgaggatagtgtgttgtccattggctgccctgaaccgggatgtaaggatggtgcattggacccagaagtgtgccgcgacgtgatcccgctgcagctgttccagaggtggggagctgctctctgtgactcggcgctaggtgcattcaagttctactgcccctttaacgactgctcggcattgctggttgacgaacgccgccacggtgaggcagcgataacacaagctgagtgcccacactgctgccggatgttctgtgcacagtgcaaggtggcatggcatgacggtgtcacctgcgcagagttccagcggcttggcaaggatgagcggagcaggaatgacctgctgctgaggaaggtcgcggagcgaagcaactggcagaggtgccccaagtgcaaaatgtacgtcgagaggaccgagggctgcgtgtacatcgtctgcaggtactgtattttactctttgcaggaagaaaaatacatgtgcaacgagcacatatgagcgagattcttttttgttgttctaatttacaggtgtggacatcgcttctgctatctctgcgcatccccaatgtcacaaggcatccatcgttgcagtaggtgcaagaggacctggtgaatgacctgaagctgcaaaactctacgtgttgacatgagggaagttctcaactacatactaaattccaggctactgtgacttggttaacgttggcttgtgcaattattatttggcaaatcagtatcaatggagctctgttggttaacataaaatatttacgatggaacatatataatgcaggtagcagtgtattataacgtaaaaaaaaatgaaatgtcagaaacttgcatagtgtagatacttatgagagctgatgactttcttatgaagaaacaactactacctcagtgagaactagatgtgttcctcttatattgaattgctgagcatgtgaatgatcttcatatatgaacttacaattccaatagataactttatgatcgatggatccctctaactttgatttacatgcacgtatggttctgttctgtcatgcctaaaatgtagttctactgagttgattataagtattcttcttgaaagaggagaaacgggtgaatatgtactgggaagtttcttagcttctgctgcactagctcctaaacttcgggaaagcagggcatttcaagaaaagta

SEQ ID NO: 4120 - DNA, 15905 bp, Sorghum bicolor
gataccgtatccgtatccgaatacttaaatcatatatttatgatgtcgacatccagttatatcttatccgacatgattgacattatccgtattcgaatccgaatccgaccagaaatatgaaaacaaatatgatatcggtgatatccgtccgtatccgatccgttttcatcccacacaacaccacaacatcagggaggtaactgttttttttcatctatgggtctctttcggctctagaggccagggcctaaaaaattttctaattttttttattctccgccacatcaaatctcatgcatgaagtattaaatataaataaattattacacaatttatctataatttgtgagataaatattgtgaacctagttagtctatgattggacatatttatcaaatataaacgaaagtgctatagtatttattttttaaaaaaatttggagctaaacaaggttggggaattgaagggagagtggaatggagcgctagtgaagaatcccatttggcaaaaaaatgtgccaaataactcttgacgatgttggagaagatgtgtcaaataaggtcttaacgaggtggcacatttaaaaaatgatggtgtgacacaacaattacgaggagggagagaaaattagcttttatcatggcgtctcgttcgtttgagcttatcagccgaatctatcagtcattcagcggtgtttttctctcacaacaaatcggctaatagtacaaagcgacctattcgcttgagcttatttatttggtgaatctaccagctattcagtagtgtttttcttttataacaaatcatcgaatgatacgccatgaattttcaactaagtaaacagaccgacacatcgcacaacattttccaatgcattgaaaattgagtggaactctagagtgtttttttttcattccccgtatgttagaaaccgaggcattgtttagaagtgaatttttttttattttaacactgtagcactttcgtttttatttgacaaacattaccaatcatagagtaactaggcttaaaagattcgtttcgtgatttacagacaaactatgtaattagtttttgtttttatctacatttactacttcatgcatttgccgcaagattcgatgtgacagaaaattttgaaaagtttttgatttttagtgtgaactaaacaaggggccgagtgaaactctacttgaagcatttcatataataaaatcatgtaatatttgaatatataagcctataaaccgtaaaataaaattgttgttttgttttatgtcactcatacctcactattttttttgaaaaataatgtaataaaacctagaacctagaacgcgggtggcattttgggcatttggcactcgcgagtgcgacacatcccttgtttacttccaaaattttttgcgaatagtagcacttttgtttgtatttgacaaatattgttcaattatggattaactaggctcaaaagattcgtctcatcaatttcaaccaaactgtgcaattagtttttatttttatctatatttaatactccatgcatatatctaaagattcggaccctctttggtttcccttgctaaattttagctagctaaattttagtcactttagtagctaaagtaccaaatacattgactaaaaggtgctaaaatagtttaatctcattagtcatccaagaaaagctaaaataattttagctagctaaagtagtttagtaagggaaaccaaataagccctcgatgtgacagacaatctaaaaaaatttacaaaatttttaaaactaaacaaggccccaagcgcgtgcgggtgcgggtgtgagccagccattcgttcggcggcccgaaatcggacggcttcgggacgcaaagcaaacacgcccatcagcgggaaaaccaaaaatcgaaaccccacctcaccggagtaccggacaccggccaaaccccacctctgcccccctcctccccggagctccaggacctgcggcgaccgtctatggagcggatccacgtagcggtgcgctcgcggccgctccccccggaggacgtgcggagcagcccatggaggatctcgggcaacgccatcgctcactccgcgcagtcctccacccgcttcgagttcggtaagaagcctccggcatccgccctttcgctccccattatagcttcgccttcgggtcgcttgggattgcggggtcccctgacttgttgcgctcgcccctcgttctcgcagacaggatattcggcgaggagtgccgcactgccgaggtctacgagacccgcaccaagcaaatcgtcgactccgtggtgcgagggttcaatggtaatcacggttcttctttcactctggttgttggtaccatttccttgggcaaacaagttgggtccgtttgcatttcaaaggtatactgtgtgtctgtgtcaggctatttggtttacttgtgtcagcacccgcttgctatattcttaatgggcattttatcgcggactatgtgtgcggataatcagtggagaggcaacacgcccctggaattaagtgcttcggcactgtaatgagcacgttgatgcactgttatgtgctgatgatggttgatgagaggacgtagctcagatgaagtacgtgcttattttgtaggatatggtacttccagcactgtaatcagtggttgtcagcatgccccaaaccagcaacacccctgggattaagtgttcaatgatcagtttgatgaggacccttcccttgcctttatttaacacggagccgacaagttatcaccaatcaaactgaggcagcaatagcgggaggagaccacttgtttcgaacccttataagttataagtagaacaaagaccaatcttgccaatttgccattgatatgatgcctctaccagtttgcacctgtgttccataacctacttgcactaggtaggacgcaatccacatattctccacgatttcgtcaagagcagaccattatttcaagtttgaattacattgtcatgttggattttaatttataatagtattatgactacattttcatgaacctagattttttctaatggaagaactgaggttggttctagtctagtaggattgtagctgtcactagtcattatatctaggagccatgggaaaggctctggttttcactcactctagcattctttgttcagcaagtccaaggctctttttttatgctctgactgtatgttcttattaatccctttatttctttccttttttgtgtgtgattgtatctggtttaattagttggtttcttagttcttcgcacaaatgagttttctcaatcattcaggcaatttgatttcgctgagtgtatatgcattggaatgaattaatctcgttcatatttgacaggcactgtttttgcatatggtcaaactaacagtgggaagactttcacaatgagaggatcggctaatgagcctggaataataccgcttgcagttcatgacttattccagcgtattcaagaggttaattacatgaatctcaatgttcaatatcattctttattatgcttactttggcatacactatgggattcaagcaagagatatgttaactgctgcatgctgatacagtgttcatttagttccttcttaatctgtttattgtatgatctactatggaaaatattttgaatgtactgttcctttttggtattaggattcgcttaatgtgttttacaaaggttgtgtagcatagtcctgggctcctggccacctattctttattcatcttacgttctgcattattatattgaaccttggctagggtttttactaacatgctgtgtattctatttgactcacttgttttagctattgtgcagcatatggacagagaatttctcgtgaggatgtcctatatggaaatttacaatgaagatattaatgaccttcttgtgccagaacatcgaaaattacagattcatgagagcattgaggtaaacaacccatcttttcatgtgatattgataactaaccatctttaaatagtattcttattgttacatgctggtacttttgattgaagaaagggatctttgttgctggtttaaaagaagaaattgttacatgcgcggaacaggtcatggatttcatgtcttttggagaatgtaagccttcttgaatgtttgctggctcagttactgtatagtttattcttaataaactgctagcacaactgcagcccaccggcatatcggggagacaaacatgaatctttacagcagtcgttctcacactatatttcgcatggtaagcttatattctgtaccattttccactggatcacatttctgattattttgctgctaaatgttcaggtaatcgagagcagagaaaaaagtgacgacaatgaagctgaagactcttgtgatgctgtacgagtatctgttttggtatgtgcaattctcccctcttaattgctgctctctcccgcagataataatttgtttttttattggaaattggaatacatgcagtttatccttaaaattttggttgtccatactgttatggatatttgagattgagttacagtatttgtagatatgtgttgaataatgctcattagttcctatgttcatatttatttgatgtcttatgcttgttcacagttaacttaagaaaagcataaaatatttgtgagtgagctgagcacaaacctaaaagtttgtctctctagtttctgccttgtatcagtgaacagggagatggatgtcttgtaaaatgttccaaaaacccagactattctggaaaatgaaccacatctatcctggatttggtacaacatcaactgaaacgaacatttctgtaaaccctgaaatttcaacttcaaatttgccttttagggaccattgtccaaaatgtcgcttatttgtgagtgagccgagtacttatccaactattgatatataagattcagattttcatttttcttctacttatgttaataatgtacatttcagaaccttgttgacttagctggctcagaacgcgctgcaaagactggtgcagagggtgtgaggcttaaggagggttctcatattaacaaaagtctcatgactcttggtacggtcataaaaaaacttagtgaaggcattgagggtcaagggtaagttattaactttttgactggcgaccctacctgttctgatatttttcattactactttagtaatgaatttcatttgcaggggacatgtgccataccgagatagtaaactgacaaggatattacagcctgctctgggtggaaattctaacacagctatcatctgcaatataacacttgcacaggtattccatatttgtttatctgctgtgtttggactattggatgctgaagtagaattgtatcacttgtcccatttctgcaaagttatatactgaattataaagtactgaagcttctttatcatatatttgtagtatgctttgcttattgatgatgtttgttgtggaaattaaattaaaaggtgtcactatcttttcttttgtacacttttcatgtccaggtaataacccaaagtagttattttgaatttctgtcttttaaatcaattgtttcattgctttgtaaagtcatgtaccatacagaagcaaaaaatcagtcactcaatgtgccattaggcacaacaaagagcaaaaattatagtcttagaactaatactttgttatttgttttttgataaactatttattttatatttttgtaggtccacgctgatgagacaaaaagcagtttgcaatttgcgagtagagcattacgtgtaacaaattatgcatgcgttaatgaggtattaacatgtttctgttgcccactagattactgtttctattcatcttgctataattgcataaatctttacactatatatgtttacagattttgacagatgctgcattattaaaacgccaaaggaaagaaatagaagagcttcgagcaaaacttagagtatgtattaaaaaaatgtttcttattagcaataatccgtactgctttagaattgaaacttacattccttctgtccttagaaatctcaaagtgatcattgggaggaagaaattctgaatctgcggaacacactactgcaggttgctttgtcaagtgtttctatttctatccagacattcatgactatgtacatcatgtaatctggtaattattttttagagtgaattggaaaaggaaagaatagctttagagttggaggaggaaaagaaagctaaagagcagcgtgacagatgcttgattcaacaggcaaagaaaattgaaaatcttagttcactggttttaaattcagacagagatgacaggagtgctgcttttagtaaggttagtatgtaacagtcgtacaaggcatatgaactatgtggttgctcattggttctttcttctagtttttctccataggtactttcttttctgctgatatcttgaagtactgtttagactttgaactttacagaaatggccataagatgtgtgcttttaaacagagggctaacaatgtttgtactcttttagtctactaatagcttttttcttcttttcttccttgaatagaacaaaagaagggtaacatggtgttctggaccaaatgcaaagcaatttggtgttgaggtatcattttaaatttgtaagaatgcttttcaatacgttcaacttggcattctaaaagtataccagcgcatcatttgtttttggatggctgcggaacatttttggtgcattgattccttatcataatttaaatgttagtcagaaaagtttcacccaaaatatttgtctagaagttttgcctcctgtgagcgcttttgcttttcatcctttctcttagggtgggtgtgtagtggtgtcattttgcagggtgtttatatggtttgctgcatacatgccaaaatattcatattctgtttactttcgtattcatatcttctgtcaaattgtgagagtattgaaatttacacataagatgtgtgttctgagtatttctatctataatacccaggatttaggaactgtccaggaaggctctacaagcagcacaattagaaatagacgggatatgggaatgccaccactttttgaagagttaatgaaagaaagtaatgatgagccttgtgctaatgcttactcatctggtgacatgtccaaagacagtgaagatgtctctcttcctgactcgcatgctttgctgcatgttaccaaccgaagaaagccaaatgcagtggtgagattttcttacttccattgttcttacggcgtaaaggcgaggcacggcgatggggggcgcctggacgcctaggcgcccgccttgctcgcctaggcacccgccttgcccgcctaggcacccattctgcaaggcgatgggggggcgcctggacgcctaggtgacgccttgagaactatggttacttcttaatgttaagttgttggccttctataaatacaagataatccaagttttttcttctctctctctcaagaatattttgcaactttttagctacagatctgactgctgagtatgtgcttttgccagaaaaaatcagatcaagagcaattcttggggagagctggtgaactattaataccccaggacccctgtgatgggaatgatgctctacatcacaaaaacactgttccttgtgtagttagtagcttatctgctcgagaatctgaagccattcttgtcatcaaacaacttcaagatcaggtactaattttccccctagtatcatcctattctggaatggaaaaacaaactgttatctaattgaatatatcccaagcagatcaagctgttggaggcagagaagagttctatccagactaatttggatgctgttcttgagctggcaactcaacagaaggtttcatttaatgaggagtatgaagaggtgagttatgttaaacagaaagtctccaacttggtgactgatgtgtactgcaaactagttccattatcatttagaagccatttatattttataagaaccaattttgtctattccatggtattatgatgtttcattttgctggagaagattaaaatcaagagttaaccttttagaaggccgtgatttatttacttctgctatctcttcaacgcttcttacacaattaccatgagttgtcctcgtcttcacccatcctgtgcaaaaggttgaatatctgaagcaaaggaatcaaatggctgttttgattcacaatttgttagtcgagtgactaagtacaatttacgtagcttagattatcatacaactcataatttgtgagttctaaaatgcaaagttaacattctctctttttttcctaatccaacagaagtacaaaacagggttttaggtaattaggctgtagttatcgaatctggttttccttatgcccaggatccaactaacccctaagattattagtttggcatcttagtcgccatctcccaacggccctaagattgttagtttggtatcttagtcgtcatcatccggatccagcagattaaacatggatacatgacactataatctatgatcaatcttatctaaactccgtatacttttctgagttgcatttacctttgcattttccattccaatatagtagagaactagagatataaaagggcatgcctagtgctgaaagctcccacacatggtggcttgaagggattttctatacagccttgcacttgcggcttgcttaattctggaaggaggttggtttgaacctaggacctccaaagacacaagtggagaaactctacactgtgctaggcccacccttagctaagaatgtctcaagtacgttgccatcacctttcttgttatctaaaactagcaaatgttcccgtgcattgcacataatacttatttgaatcggactttgtgtcatcgttggacacgagttgttctaactcgtatgagcacgggtcatgaatctaggtcacatacaggatatggagggcgagttataaacttataatgttttgccctaggatacatatgggaactcgatatctgacattctgaccttaattgcttgcttcattttattgatctaccttgcattagcattatatattatcaacaagctatgccccatacaacacattgatttaacatgtcatttttattaatgttgtatttgttcgcattccacattcaactcctaatgaggtgttgctcttgtgtgtgtcccttgcgctatatatatgctctctgggttgtgctcaatacaacattgaactcaagatgtcatgctaaaaaaatcctttagaaaattctaccttcattatttttccaagattgcaaatttgttcttcaccttgaagctgttgttacattccatatgttgttttcttatttgccgcttctgcagattgctctggctgcagaagagcaaacaaaagtcgctaatgagaacctgtccacactatctgctactgtcaaatccaaacaggtaccctgttacccttctccagttacattgtattccctcttttctttttttaaaaaagaaagaaatcatagctagcatttagtttgtttccgtcttgctgcaaccatttcatgttatagggtacacataaaacttttttttggcaacttccaggaactagcctatgaattcctcagtaatttattgatggagactcaaggaataaatgtggagttggatcagtggagaaactcagttgacagtgctctttcttttattgatgaactctgtcagaatctctgcattatggcacaaggaattcgtgtatgctttctcattttgcatgcatctccagattggactttgaataatcatgccgtttagttaagttggctgttttattcgatattcagaattgattgtcagcaatcattttattttaatccattataaatattagctcagagattcactagacatgctttaactgtggaaatgctcaatctggtttcccctagttttcacctggacactagtatcctactactgcgaagaaatatagtgtgaattgctaccatgatccttgagggttgtgaaccaagtgcattgctatgttatatttataagcttggaaaaatagtacgtgcagtctggtgaaaatgtctcatcaatggaacactctgtcatgctaattattgatcatgtaaaactatagattacaagatttgcatatgcttagtgtagtactgctactgcatttatttaactgtctgaacgtagtttccaatttcccatcttaatgcacatatataattgatgtgtaatttgggtttccataggaagtaaagcactctgctcatgaagatagtgcacggtctggttctgtgatcagggactatgagaaactgtcaacctgtttgatggacaaagtttgcaaacttgaattggagaaggtattttcaaattctttttttcctaaagtgcttaagttctaagaagttcgtttgtttccaatgttactctggtttgagcgcagaaactattggaggaacagtctcaagatcaacgaaatgagatttataagctgaaggccaatctggaaagctgtgagaaggccatagatgttcgtcactggctaagttcttttcagtgatttaattcttagtttctgtcacctgatataaaacttcattacccgtgcactaaaatattgtacttatactcaggactgtactcttcaacatgaaatggagaaggatgccattctcttagagcacctaaatctccagaaggaagtatcaatcttgtcatcatcttctttgatgaaagaaaaggaatctatccgaaaggaacttgatagaactaaaacaaagttaagagagaccgagaacaaacttaagaattccattcaggagaaaataaaacttcaggttaccaacaggcaacatgccattgttattatataaattttattgccacttaaaagccagctgtttctgatgtataattgatacatgttcttttaacagagtgagaaagcagaggcacacaaagaaattaagaaattgcaaagccagagaactttgcttgaacgtgatttacggaaacgcgattcagctagtgttgacaaaaggcatgagctgaattccatgccacaggaactttctggagcttttgagcacatgcaggtatgtgttattctttgcaaatcccacatttttctaggaactactgggctgtttgcagcagtttggtgtacatattggtgtctttgtctggcatcgctattgttaaggatagtcaagggtattagtgtaagctccctgtgtctagggtttccttcctatgtctcctatgtactctatatattgcccctcttttgggcctcaatcgtatcaatccagttcagtctccctttatttgtaacatgggagattacactaatacccttgactacccttagcagctatcagttacaggtccattttcatatatcactatagatgtttaagacttgtaatttttcctttgagatcatctctgttggacaacctagcaatagtttggctcgtagagcctctagttgattggacgccgacctggggtcgaacccaggcactcacattttgtgtggataattccccaagggtttggtaccccctctccctttctctgccttaaagagagggggagcacagaatccataaagagatagacctttatgaccaagaatctcatttcacttttttttattttaatattcaggaggactaccaaaatcttgagatgcatgcttttgatatggatgtggaaatttcttctttacaagaagctctagtcacttcaattgctgaaaaggacgaagcattgtctaaagtagagcttatgacatctgaactagaagatcttgcgaataaattgaactcaacggaatcagaaagaaactcctttagcaatgagattgcactcttggtataaataacatgtctttgcaaatatatttgatcttattggttcttgtgcatccatttttttctacccatttttttcaatctttttgtaatgcagaccaaaaagttagatgcatccgaatctacccttaaaagtttggagacttctctcaattctgtatcaagggaaaaggaagttttgggaatggtaagactgtacttttatccatttatatgttatgtgaaataatttcattttctaaaatgaatgcagcaatttactgatgcccttttggacatggaatctgaaagatcaatttggacagcaaaggagaaagaatacctagaagctaatcatagattgaacatctgccttgatgagaaccacaaactttcagaagatttgataaaggtacttttgatagggttgcatgttttagttcccctaatgtatgcatataccatgttgatttgcctatcttggcattgcccggaagctttccatacaggccttccatgttatttttaactaataatagcattgccaatatggtctacggaggggctttgtgtttaatatatgtattctatactattttgccactgataatccaaagaacttatgtattaagtgatatattgtaatacactactaggtgaggcaagagctagggtgttgtagagaacagtgcaaaactctagaggataaactggcgctttccgtggagagtgacatgaatgagaaaggaatgaaatgcaggtcagtcttttcattgagccttttccatcaaggcatctgtttgtctctgcgctttcagtgaggattagtaacattttatgtatgagcttgtacctaggatgtttctaatgtcttcatttcatcattttttaaaacatgaatcaaggtttctgagttttagaaagaagccctgttaatgggaggtgcttaacaatcaaggctgttccaaaagagataagaaacgactgaattcactcatcattctggttgcttgggacttgggagttgtggagtcataggaatgcttgtgtcttttagggtgctagtcattatgttaaaagagttttagctgtagtttctgatgagtgttgtggtgttgctgtgttgggctggactaaaggttctgcctctcctctgttgtttctattctcttcttaatgaagtgacaaacagttctcctgcgttgttcgagaaaaaaaaatgggaggtacttccaaatcaaaatatataaggacttggttatgcttttcatcaaaactgtacattttttattgacgtgttctgagttactgggcattattttaaatgtttcgaggtaattttagaagtcacaaacaatcagtgggtttataagaaaccttaatatgtttgcaagtcaatcaataattggttctggacaagaagtgcatatttaacataattggtctagtagaaaagagtttgtttctttagatgaaagagtgtgtttgcattgcttcactttttgtttacaatagaaatgtctcatgcatcagtggggcttgtaaagaatccagccaaattgtggagaaaggaagaacaatatctggtgctgcgtgtgaaaatgtaagttttatattatctgtttattttgctctacttttttgggggcttccaagttttcaagcattatgagacatggaatatattgggatatctctatatatggtacattaagattgtttctaaccctagacttgccttctctaagataggctacccccccccccccccccccaagcagtgtactatataatctgcataagagactcagcaatatacaaccaacaattccaccaaatctattatacaaaaccaatttgttttcccatctcctgcatgtcattgtactaagagagattcaataataaacactgaggtgctgttgttttcagtattcccaaattaatgacaattgactcgaacgtcacttattgggcttttctatactaaatgctacagttatttttccaaggagtgcaaattttgctaggtttctttgtagaattctattgactccagtttgaataggagcttcacaaacaactattgatgattactgaagagcgcaactgtttactctctgagacacagcagctgagattgttggttgctgaagcagaggttttgaaagagaattgtgacagaaaggcaagttagctttatttgttactaaccacaggttacctcagtgatactaacttgttttttctgttgctttttctctatgtagttaatacatgccaaagatacaatagatgagttgaattctaggatatctgtcatggaagtcaatatgaaaaatgtaagcactgcttaactcattgttgtctgcttcttcctccattccaaacttagggaagtttgacttagttaaaaactaaaatgtcctacattttggaacaaagggaatatcaattaaggttataaggagttttgatttcatttaggttgctttgtgtgtttatccttgcaatgcataacaataaattcatagcatgtgcaagattcaatgagatcctgtaaaaagagtgtctccatgttttattgctcttgtcacatttttataatagcgtgcaagtgtttttctacatatcttcaaatattatcttcattagccgaacataaagttctgaacacgaagatattaattttggatcaacatttgaattgttttaccgatatctttttaaaatgtagtttttcatttgtataatttctaaaagaagttaaatcacatttcccaggaatacttctcaaaagtttgcatcgcatttaacccaaagggagtgaatgcatagaaatagtgaatcgcatgcacaatcaattccacccaacagcctaagctgacgaggaaggtggccaattcaaacatggaaataggagttggctatagttaacatactccgtatttaattgtgtttggcccagaactgctaaatattgtatcgagttgcatgcacgagcagttcaacccagaagcctaaggtccgatggggatagtagccaattcattttatatttcaacaagaaagacacgcaactgtggattcctatctattaataggatgacatagttctttttttaaaaaaaaactgtgtggtatcgccaaacttcaacaacagttttctgcgtgttgtagtttcagtaactgaccagtcttgtgtaagtgcaaatttcatagcatgctcgtatttacaggatgctgcagctaataacaaagagaagacaaagcttcgcatggagattcgatgtctgcgcccacaacttgacgcccatcgtggtcggctcaaagaagcaatggatgagatgaagaccatggatgccaaataccaagaagcatccaccatgctgaagagggagctttctcagaatgctcgcgaagtcctgaggttgagagggatgcttaaagaattacagagcgcatcaaactgagcttataaatttctcatatctaatttttcaaaaaaaaaactcatgtcttttgcatagctgatagctcacgtagcagaaatgcaaatatgtttgtaggtccattagtccaatgtgcgcttgtacgcttcgggccttcctagtactgtggtaccagtaccacactggctttctttcaggtagggtgcggttgcacgcgtcagctacttctaattccaaagcgctagcgctaatgtaaagaatcctgatgtacagtactttgctaggagtacaatgctaccagtagagtcatacgtatgtgggtgcattttggttgctgtccaaagtgtacctttttctttctattgtccatagtgtaacaactagtacgataacaggaaggttgatttctggattctaagtattctacgcacaacggttaagcttgagagcctattcggttgataaaccaagactgaaagtactatttactgatttattataagagaaaaacactgctgaat

SEQ ID NO: 4121 - DNA, 8635 bp, Sorghum bicolor
ttatttttatctatatttaatactctatgcatacgtctaaagattcgatgtgacgggaaatctgaaaaattttgcaaattttttgagaactaaacaaggcctatatgaaatactgagcgacggaaatatattgtgttccctgaaaccgtggctgactagaagtggggagacacctgtgcctctgcccgtcttttttgttttctgaattttttttctgaaagattctcacaattacatgtttttagtttaattttagaatctagatctagggcttagcatcattgccgctggcaccaagctaacacagcttggtgccatccatcatggcgccaagggtgcgtacctgtacatccgaacctaggacttggtgtcaaacagtattagtttggccaaacactcagtggtggagccggccgaagaaataaggtagggcagaccgctatctacatatagcaaacttcaccaatatatcggtctaactatatacatataacatatatatgttggtttatcacgtagctattatattctaatatttatttcagcaaacaaattgtactgtttgtattggatctagatgttgctctgaatctcctagctcttgttgttctgtggatgcagtaacattactgctttcacgagtgcttggagacgagttacttccacttgcagaaatcgtactcttagtcgtagtggtatagaagctttttaaatctgcataaccatttaatttaattgctttcagaaattagaaagatcaactaatgaagccaacaatttcctaaaaatccatggcaattagcaatacctagtttcttatatcgcttctgcttatggctcaatgaagttagagttggagctgtcggcctctgcctacttgtgcctcggtcggctccaacttcatctccatctccatccataagcactcactggccaccggcaagcagctgaccggcacagccgcacgatggcactccggcactcgccgttgttcgattggcggagcacggggcggcggccggtggggcagagcggtcgctggaagccgaagcccagacgcctggaggccggagcacaggcatggccgcggagccacggatgcggccgtgcagcgcggaggcgaactgagccgagcgagagcgatgcagcgactagatggggagcgacgccgtatccgtatgtcagtcctctgcctgtttgccgtatgttgcttgggctgagcgatgggtgggcgtgggctattgggccttgtttgttagaccgcccagcagcacagactggagactgccgaacttcctctgttttgcttgactcccgtcaccatcgctctcaagtctcaaccattcgctcgagtcagtgacgagtcggagcctgcgccgccgccggagatgggttcctagatgtggtgctcgccggagaggaggtagggcggatgcccaacctcgccatataggtggctccgcctctgcaaacactgagtccatattctgaaatcaaactacaaaagatataattgtagaaaacaaaaaagtcggtgcccctgcaccctaagggccaaggcctaaccaggctaagtgatgggcctggcctgctatccagacgacccagcctgctgggcaccccatctcaaagcccagacggagtcgcccctcgcctgtgggctgtggtgggcccgagatgccgagtcgtcttcaacgtccggtccgtccttcgctcgtcaaccggggggagaagagagaggggcagttatcacttcggggattccactcccatcgtccgtctcgtgcttgcccttgcccgcccgccccgcattcccgctcgccatttggaagttgtcaccactcaccaaccaccctatccaagtatccatcgcttccctcctcggccgaccggctgtctccggcaacacgaaggacactaccacgtcctgggaggccgggaggaaccgaacgatcgactgagccatggccaacaccgccgcgacatcccggcgcacagccatgtcatcgtcgtcgtcgtcgccgccgccgctttctcttcttctctgcgtgtcgctgctgctctcctccacggtgcagcaaccgccttccacccaggcccagcaagcagcatcgcaagccctcgacccggccttcatgttcggctggctcaacaacaagcgggactacaccgccggcgacaccgcggtcatccaggccatgcccctgaacgtccgcgccgccgccgccgtccgcgcctcgctgtccttcacgttttcggtgaacggcaaggaaggcaacagcaggtacgtcacggacgtggcggccaacatcggcgacgacccccacgcctggaccatctccttcgtgcccctgcgcgccgggaacttcgccgcgctcgtcggcgagaagcggttcgtccccgccgagtggccgctcacgttcacggtcgccgcggccgccatgcacccgtccgcgtcgcgggcgtcgtggacgttccccggccgccgcgtcgtcgccgggtccagggcgttcctgtccatcttcccccgggacgccttcagcaatgccatcgcgcggggacccgacatgccggactacttcagggtgtcgggctcctacctcaacgggtcgtccgtggagctctgggattttcactacaacgggtggacggaggatggacgcatcggcgtcgagttcaggtcgagtgtcgcaggcgacttgttggtgcatgtttacggggatggtagggagctacgtgattcgcctctattgctcacagtgaatccaggtaagaggaagaatcttggtcttctccctcataagtttattttgccctagattcaaaaaaaaagtttattttgcccttgaggacatatgccatcactctcccacccattgattcgctttgagaagtgtaacaatttgttgggagactatgcgaaactgctttgagatgtgtgtttgcacacttctcaaaacgaatcccttctcccagcaaagttcttgatgtatttcagcagatactattatcattagtctaatgcttctcctaattttgcattacatagcatcaaatttattgtgcaagcatatatataacagtgattttttttctgttacaagcatagaattggaaataaagttggtgttcatcttctaatggacagatagatatgctgtaggaagatatgcatttttgtgtaaatgtcaataattcgtcgatgtattttacatatgtcaggtgtgcttaacatagcagtcagcacatgcagctggaagcatggaatcaatactttgcaggtgtcctccaagctggagatattcatatatcagagagactcctttggaaatattgttccagatatccatccattcgatgctcaagtagttgataaagcctcaaatttgaccatcccaatagtggatcttgcgatggaagcagtagctgatggagtgcagctcctatcttttaatgttgtagaggctggacagttttctctcacaattttcgatgctccactggacgaaagggtttccaacactgtgcacatgtttgatgttttcgtaggtatatgcaactatactctttagtttgcccatcaagatgctcgattcctgatcatggctgatattgctatgttgctacttttaggatattgcaatggatcaaacagttttgcaaatgggtctggtttggcaaattctagtgctggctcaacgtcatctttttctgttttcttgttggatcactacagaatcccttctccagttgaaacggcaaggatgcaagtgaagattttgggtaaaaatgccacatcttacgcagacccaatcataacacctggaagagaatcaaatggtaatgttatatgttcatttagcggtttagccttctattaaccttaaacttaaatttgttttttaaaaggatccttttataatgatgaatcctaaaattctttttggcttgaatgatgaataacttcactgagacgatacttaatgaatgagaaaattctatcaattcaggacctgctggccaccaggaggcaagtaccctattcttcagcttaattttagttggtacagataagtggcatgatcactgaaattctatatgttatcaggccattgctgggaattcaaatgtgcaaaccagtaaatttaatgtttcatatactcctcgaattgctggggaatatgaaatttgggtactgtgtgggaacatagtgctaaatggtggaaatccatatgccatgacagttttgccaggtctgattacctttcttatgtgcctttttaatcaaattttttacattcatgcaatgcatgaattcactatagtaatgcaattgtaattcttgcattctgatacgctagtgctatttcacatgtaatgtacgatgtagtatgatgatacaaatggattgtgctcaagtgaaatatcaaacaaattgaaaatgattgataattttcatgaattcaaatgagaaattcttaagtgattcgaataaaggacgaccaccttaaaacgagccaactatttatgagctcgcaagaactaactaaagagtagcttctatcttatacagattgaactctaacttcctttaccatatattacctgcctaggtgctatcaatatgtctttgtcaagtgttgtcaagtttgaccccaaagtaaaattatcagttgaaaatgaagttgttgttcgacttgttgactcattcatgaacccggtggtgtctttcaagtcaaaattgaaatttcagctgatatctgcaagcatcacaagtaccactagttttgtggcaaaagaatttgttgacaatggagatggatcatatactgctcattatgtggcaaggggacttggttcatatggcatatgtgttctttatgaggataaacagctgactccatgtccattcgacgtcaccgttcttgcaggtaatttttcagtcgatcctgaaagtttcaacacataaaaaaagaaattggtcatatgagagttttttttgaaagcaagctacatgagagagatagttaagctctagttggcagaacattaattgtctcgttaactctgatgaactatatctgtttgcagatgaatacttttcagatgttaaaaatgatactgtttcagtgtgggaggatgaatccacttccttcgatgtattgtcaaatgaccgcattgcaggaagtaaagtggaaatagctaactcatcttctgtaagttaatgccatgaaatatgtgattcttaatttttccacctcatagtgatgatctcttctctctgttatacctgttatcaacccttgcagttgcacatgccaaccatcttaactgagtttggcagtctcattgttgaacagttattacacgttgcttcgaaagcttcgaaaacaaagaaacttgcggcagcaaaacaaatactgcaactaatttcaatttataatacgatccttccagttcttttcttcttttagataatggaaagtcaattctggcctctagctacatcttggcaatgcacatagcccggtctctatgacaaatgttcagcataaaactgatgtcaaataggaaataggaagctataacatcaataaaaatatcaagcactgcaagtgcttgttaagaggagttagaagagaatatcaagcataatgtaccatagtacaaaatttcctacggagtacttattactttattttctcattacttcacattctgacttaatgttgtcccttttctctgaagccacttcatgggtcagtccagttcagcaaaacctaccgttacacacctttcgaaggattctttgggaatgactcattctcgtatacggtatgtgatgagcataacaatgtcgtcactgcaacagtcttcatatctgttctctgcagaccacctcagttcatatctttacccgacaagttgcatgttactgaagatacaatcagcccactatttgcgtaagccataatgtcttttacctaagtattgcatacttgtacttattcttcttcttcattagctataagtgtaaattttgacctccttttgttctctttctaaagtaatcaaatatgtgtatgtttttttttggcagtggatttccggggatgaaaatggtgtattcagatgcaacagaaaatatatctgttacagtgacagcagagtccgggagtgtgttctttgatccagtgcgaattaaacttcaacagctatcagatagtatactttcgattagcagcaaaggtacaggtggcaaagacctgatgttacaaggaacgatagaagtggtaaatgatgcactaaagtatctgttgtacagtgggtactaatcaagatcctgactccccctggttttgtacaagccctattttttacaaagatcttgctagtcctttgcgtatggtaaccatgcatatcaatatgtgcagaaacgaagacttccacggaaacgatgttatatctctacatgcctcgagcagaaatggtgtacgaaaaactcagttcccaaccttcgttgaaccaatcaatgatcctccggtgatacttgctccaagttcaattttcttgagtgggaaccaatcaatggaaggacataaaatatttgataagcacagggatacattccaattctccattgttgaacctgatcttcacaatttcccaggtactatatacgaatcatataccatttatatatgatatgaatatatagactgttcatggtgttgtttatgcactatacgaaaaaacatttactgatgtagactgacagattttatcttgcagagaacaagtcttcctttttcctagtgctctcgctagaagttttggagggaacgttagccaccaccttgccatccagtgccatcgccgctgcatcgatgaagactgaaggcattgacggttggcagtcgcttcagacatatgtgaccatcgcaaatcactttgtactgaaaggaactgccatcaggttccatgggagcgtccagggctgcaacaatgcaatgcagcagttgcattacaaagtaaatcctgaaacatcagattatatagcagctgttcgttttgtcacatttcttgccttttcttttttacagcagatatgtgactctctcttacagggtccaaggcatggaacaacgttgtccatcactgtgaacgacctgggaaaccatggatgctatcctgactgctcagagagaatgacgatgccacttaccactgccaagactgttcgtctagttccagtcatcaaaacaaaacatgtgaactctaggcgaactatctgtaagtaccagaactgatgatattcctaggcagaaaactgaacttccatgtagtgtggagctcattttgattctgtgcttgcggttgtggagctcattttgattctgtgcttgcggttattttcagtgtttagatggttggcagcagctgggatcgtgataatgttatgccttggctgtgttctcatgtgttgcctatgcaaatgcatgagagctttgaagagtacacgaagatacaaaatctatggtaaaattcgcacaacggagaagaccccatttcgtcagaatgtgagcgtgttattctctgaaacttccatatagcaagcagggtggtctgagcagccatcattttgatcttttgccgctttctgatagctcgtttttctgttttttgttcttctggaaaaagatgggtgcttcaccatcgcaatgcgaggaagtcggatattgccctgctactgcaactgtgcccaagctcggtgcaaaccgatcaactcttcgtcagaggtaagcagtgttattcgctgctgacttcacatgtttctgtcgtgaattttggtgtcaacacaacacagaactccaaatgctgcaatttcaagtggttcagcatgcataagcaaaaccagatagattttaacaaattaatccaaaaccatggtcagcgaagaataaaaaaattatattttctgtgttcagaaatcacatgagtcccctaattgccattgttctcgaaattccaggtctccacgttcatgcaagcaagaactggaactccagccagtctccgggaccatgagcaatagaaatgaagaaagccttcctgttacagacaaggacaaataggcgtttataatttacccgttgtctggacccaaactatcttctgctcatcccaaaaacttgtcagatgccactgaacgagttttcagtgtaatattggagtgcagcaaagagtgttgcagaatgtaaataaaatggggaaactagatgtgttgcgtgtatctgctttattgacagtcagattgttgaagtttcatgggaacacaagcatgcggcttctcagatgcttccttttcttttaaagagcagatagaagcttcatcatacaggccgagtcggtcaactactcacatgactgacatttccgtggcaagtcaggagaatgactgctaacttgctgcttggtctgctggattgatgcatcatctggtgcttcattcatataacgcaagcgaaagcaggagtccacaatcctgtcgcatgggtctcacacagaaaccataatggggtactatggcttggttctccactgaaaatacagataagagtgaactaggaggtac

SEQ ID NO: 4122 - DNA, 8425 bp, Sorghum bicolor
attgtcattgaggtcttgctcactggattctctaaagctaaattgcgtttacgaagaaattttataatgaccttgactatgagttcttcctcctttcaaattttttgttatacttttttctttagctataatcctttgtctcaggccttgtttagttcccaattttttttaagatttcccgtcacatcaaatcttacgatacatgcataaagtattaaatatagattaaaaataactaattacacaatttgtctataattcgcgagatgaatcttttgagccagttagtctattattgaacaataattgtcaaatacaaataaaagtgctacaataggcaaataaaaaaaatcgcaaaagcctcacttgttcgtctcagcgagtaaaatatagaaatcacgagcctcacggcgatacatcatcaacaagggaaccaaggctatgtttagttcacccaaaaaccaaaaagttttcaagattctccgtcacatcaaattttacggcatatgcatgaagcactaaatatagacgaaaacaaaaactaattaaacagtttgcctgtaaatcgcgagacgaatcttttgatcctaattagaccagaattgaacaatatttgacacaaacaaatgaaagtgctacaatgtcaaaatccaaaaactatttacaactgaacaaggcccaaataggacgttttgcttcggtttgtagcttgaggtcaggcgagattttttttttcaaagatggaacaaaatccgcccgaaaggtccccacactgaaaagatcgtcgtcgtccacgccctgcatagcgaatacaagtcaatggtaaagtcgctgccacctccgacgactccaatggcggaggtcgttgccgcgttgggcccttccacgagagaactaatatccagcagatagtagaaaagattccatcctgtttaatccctggatatataataaataatcgatcgacgtcgctatcgagttcttattacctccacctatctttgacatttaaaaattcgcgcgagatcgttgtcaacagccgccgcagaaaattccagcttggaccgtttcagtggccgggacgtgaagcaacgccgggcgggcggcgatctcatttcccggcgttccatactcctactggacatggcaacaaggaccaccggggttttcaattccagctgccagaacactgctgtctcgaagactttgaccgcacgacaccgtctgattcgacgcctcctctcggcgctcgagctacaccacacgcggacgcggctcccacggcaccacagccacggccggcttcaagtagttctctcgccacggccgcgcgcggcgcgcccctctcacgccgtgccgacgccatacgaaactactacccggggggctcgcattgcgtcgccgatcgaaggactagtcgacatgtgcagacgagatcccgtagctagcctcggctcccacggcacgggggcgcgcactcatcagcgctgtgtatggctgtgtagagtttcgcggcaaatgtgccaggacgcccccgccgcgcggtgaccgcgacctttgttggctggcgcgatgcgcaccggcggcggggcggccgtatgtaagcgcgtgtagtacttgggagaaacggaaactgatatcggcaaagccgtgtggcgtggcgtgttgctgcatcgatcactgcatgtagaaaggccgtgcaaccgagggcaactactagtcaccattggtgctagatgcagcgacgaccgttacccaaccgagcaaaagaatcggtttattcctcctttaggtgtccccatgaaagcggttccgtatcggcactctcgtttcgtcgtcgtcttctcgccgtcctcctcctctgcctcgtcgtcggtgcgcagcaaggcgaggggcaggcggcgggcccagctgccggtgccgccggagcgaggcggcgggtggacgtgggggtgatcctggaccggacgacatggctggggaacatcagctgggcgtgcatggagctggcactcgaggacttctacgccgacgcgagccacgccaactacagcaccagggtcacgctgcacctccgggacaccccggccgggccgagcgccgtcgacgccgcgtccgcaggtacgatacgtcccgcgcggtccgcctatactactgctcttcatttcattcattcgtgcgttcgtcgagctcgagcctaccacctgctgtgcgcttatgactaatttcagcatctgcaacaagacttgcatatgttcgttcgcaaaataaatcacaatgcgagcgaatccccggatcggagtactctgcttgctcctataatagacattttctcctttatatatatatatatatccctacctaattgtcgagctgcttgatcttgcgccgaagcttgttggaaagagctcacattatcagctagctgtatggatcatggatgtatggttgttgcaagcgtctttgacagagctgtcgtgggagaccggagacaccactccccaaccccaagcttggcagtttggcaccggcgcaccgcaccccatttgtggctgtgtacagtgtaaattgccggttggtggttaggcttaggccgcgcgcgaggcagggtgcgagggcagtgcgtagagcatctccaatatccaatagttcaaaaagaaaaaaaaaatggttggctatgcgcacctagctataaatatccacagaacacaagtgcagaaaagaatgggagttgagatagggaattgtttgctagtagtgtatttttttagtcttgctaaaataaatctagattgagagtgggttttgggaacttttggagatgttatttggaactcagatagctagcaagtagcaagccatcatcaggcaagtacggtgttaaggccttgtttagttttcaaagttttttggttttaggtaccgtagcagtttcgtttttatttgataattattatcaaataattaggctcaaaagatacatcacgtgatttaccagcaaactgtgtaatcagtttttgttttcgactatatttaatgcttcatgcatatgctgtaagattcgatgtgacggagaatcttcaaaagtttttgtttttttaaacaaggcctaagtagtagtttttttttggcagaacctttttttttgcgattttttgagcggaacctaaggccttgtttaggccttgtttagttccgaaaagtgaaaagttttcggtactgtagcactttcgtttgtttgtgacaaatattatccaattatggagtaactaggatcaaaagattcgtatcgtgatttacagctaaactgtgtaattagtttttgttttcgtctatatttaaggtttatgcatatggcacaagattcgatgtgacggggaatcttgaaaactttttggttttcagggtgaactaaacaaggcctcagttcgcaaaagatttcaagattccccgtcacatcgaatctttggtggcatgcatgaagtattaaatatagacaaaaataaaaactaattgtacagtttacctgtaatttgtgagataaatcttttgagcctagttactccgtgattggacactgtttgtcaaataaaaacgaaatgctacaaaaattttgcgaactaaacaaggcctaagtagctggtgtagttatcggttcgacccaagccaggaaggcccaatggcctatgtggcgtgtcaagcgaggaccgggacaccagctcagcccaacgcgactgcccagcccagggaattcgagcccatatcaacaacctgccaacatcccgcttctcagttttcacttttcggccggcggccggcgacacttccggcggcagaggattcgctgtcccccacgccgccggtgccctgcccctaccgatccgctcctgccgcgctcgccgtttcctttctcccggcataaggaggaggtaccccgctaccccacgaccgcatttggtgtttgtagtagtatacgtataaattgggggtttcccatggttctatggacgcctgagagttacaatgcccaatacatacattccataacgtcgctcatccttgctttcagttaggataagcccatagatgcgtactttaaaccttgtttttcccccctgaagtttccctttcgcatcctagtctcagaatccctggatctgctgcaggtttcaaactaattttgcatgttcaggtaggatgaatgaatggcaccaaacttttcgctttcaggaatcgttattcgctgacatgtgtttgggtctttgggaaatactgcaggtgttgatctactaaaaaatgtccgtgtgcaagcaatcgtcgggccacagacatctagccaagctaaatttcttgcagagcttgggaacaaggcatcagttccaatcatttccttttctgcaaatagcccgtcccggtcatccagccagaccccatactttatcaggacggcatggaacgactcctgccaagctgaagctattgcctcacttgtccataaatacaattggagggaagtcatccctatcatcgaggacaatgattccaacactagattcatccctgatctcattgatgccctgggacatgtcgatactcgtgtgcagtacaggtgcaagatccatccttctgctggagaagctgagataaagcatgctatatcaagcttaaaagtaaattggacaagcgtctttgttgtgcgcatgtcatatcagttagcccttaagtttttccagcttgcaaaggatgagggaatgatgggccagggctatgtctggattacagcatatggtttgacagatatcttcaatgtagttggttatcctgcacttgatgtgatgcaaggtgttgttgggattgagccttatgttgaagaaactgtgagactgaacaaattcagacaaagatggcatgagaaatataggttggaaaatcctggtacatcaattaatgagcccataacgtctggtctatatgcatatgatacagtatgggcaatagcattagcagcagagaagggcggatatgttaattcagactttgtgccgtctgaaacaaacaatgggtccactgatttcgacaaaataagtacttctagggctgctgaaaaatttcgtgatgcattcttgaaggttaatttcacaggcattagtgggcaatttgtcattcaggatatgcagttagtatcaacaacttacaaaattatcaatatagctggtcgggagaggagagcagttggtttttggactccaggattgaacatatccagaatttctatcgtatggccaggaggcagtgagacgacacctagaggatggcttttgccagtgaataaaaaactcaaaataggagtacctgtgaaacctgggtttagcagttttataagatctgaagatggtacccccaaggggttctgcattgatgtatttgaggaagtcattggtaaacttccctacaaagttcccaagcattatgtggaatttggaaatggaaaaggagaaagtaatggaacttatgatgaactcgtctacaaagtttatcttaaggtatgtatggacctattttcttgcattttattccttgttacagtcaaactggaggtgttgaacttgtagttaaaaactggccaggtatgtgcatttattacatgatcaaaagtgatctgaacttggcaatttgttgtccttgttgctcttcgtgagtgcacagaattggaagcatgtgatttgtctacagattgtccaccatgttaatgtctaaggtagcttacggatggaaaccattgcaaaggggtggatccagcatgtaaccattggtgtcgaatgacatcaatgaaccgtcgctaacactattaagcttttaatttagatagcaagtagcacttgtaatatgttgttggctttcctgtttaatagaagtggcatcagtagcaacattttattgtccccaaatgatttgcagtttattctgtgcaaaatggtttatgtttttccaaagtagatcaaccagttttatgttaattcctggcaggaattcgatgcggtagtaggtgacataacaattttggccaaccgttctctatatgtggactacactcttccttatactgagtcaggggtacgcatgctggttccagttcgggaccagagacagaagactgcatggacattcctagaaccattaacagctgatctatggttaggaactggagcctttattgtcttcacaggttttatagtttggtttatcgagcacagaacgaatcaggaattcagaggaccgccagccagtcagattggatcagtcttctacttctccttctcaacacttgtatttgctcatagggagaggattgtgaacaatttatcaagaattgcagtagttctttggctttttgtggtgctaatattgcagcagagttatactgcaagcttaagctcaattctcacggtagaacagcttcaaccaacagtcaccaatatagatgaagttatcagacgaggggattatgttggctacctcaatgattctttcatgcctgagcttttgaaaaggttgaaaattaatgaaacaaaaatgaaggccttcagctctcctgaggagtacaatgacgccctatcaactagaaaagttgccgtcattgttgatgaaataccatacctcaaagtgtttctctcaaagtattgccacaagtacactatggttgggccaacttacaaatttgatggatttggttatgtaagtgactcttctttacttctctgcagttgtctgttttcagtaatcagtacagcttagcgatcaaattgcatctactttgttgcagaactctgctattgtactagatcatagttttctaaaaatctgatgccatgagagaaacttttgatattcgagctgggattcctaaatcttccagatataaaaatggcaaaggatgagatgaatgatcagatttgtcttcttgtggaaatgaaactcaacaagcatatactttatggaaatgtggtgccatgttattggcttccagttgggggtggtgctggtggtggtggtggggggggggcataaaaggcttacattacatgtttctactttctagaagtataaatagcacaaacaaatttactttaccagattctcatgcaattttctctttattgtgtggtgctagttcagtatgttttcaactaggtgaaaattatgatcaatttaattgtcctcatcattatacagggtttgtgcaagtggttgatataactggcccactgttacatgcctttataaatgattaataacttacatggcattttaaagcatttatatattaattattggcatgttttatgactctcatctctctattcctgcaggcgtttcctcgaggttctccacttacacctgaaatttcaaggggaatactggaactagcatcaaatggcagaatggatgaactggagaaacagttgtatggtgatacgtcgtgcccagacaaagatgactcccaaacttcaagcagtcttacgttgcatagctttcttgggctgttcataatcactgggacaacttcattactggcactgattttgcatgtaattatttccctttatgatcatcggagtcattggatcaatggcagcggtcagatatcatggcatgaattgcttgctgttctcttcaagatttttcatgagcgtgataatagctctaatactccggataatgaggagcctgaaatggaagatatagatcctccaacagctgagagtccatggagcatgtctaatcacatcatcgagaatgttgattcagacactgatacaggaagcacaccagatggagaaggaactccgggcagggaagtttcgaatcaggatcttggtccaccatcatttgcatacatgcattctgagggggcaatggagtaactagcattcttttatcttgcaccgctagcaccaagaactctatggtcatatcgcatacagttccgtgagattgatttagatgtatcgcctgcctctagtttcatcttgaatacaagtgtgttaacatgtactgctggttgttgtcatggctagtttaactagaaaatttaacatagtaaaatctttgttgacagaggtgccgatatatatctcctgatactcaccagcaattgctaagtaccacatgtactgttgcggtttccaagtgaacattatctgaacataaaattcattacccgtagactgtccaggtttttagtcactcttgagcaattgatcaaatactgtcactgagtcaaagctttgttgatggttattaagaggcatccgatatacaaacgcctaagcctaaccaaagaagagatagcatttcataaacaagcagtttcaccaggcttttactcagtgcagaacttcacaatactaagttgatgttccaa

SEQ ID NO: 4123 - DNA, 3314 bp, Sorghum bicolor
gtggcgctccatttcgcgctcgccgaagcggcggaggcaggcccgcacggccatggcgtaggcacggcgccgctagaggagctcctgcaccgattgctcgtgacactaccacgcggcgcggtggtcgtcggagacctcgtagtcggcctcgcctctgcccctggcggaggaagtggcggcggcgggacggtgatggggattggcaggtggacggggacggggagcggagccatgggaggagtgggggccgggggccacaattttttttaaaaaagttgcttttcctcaatttggtaatattgcaacggaagaaaaatatcaaataaccttagaaagtgatgacataatgttacatatctatttatatttatcctttttataaaatttaaagtccataatttattttattaataaccataacatctatggtattagatagttaatatttacaataatatgtagcttaaggacatatttatttaataataaaaatagaaaatagttaaatcttatctcactctaatattacctcttaatatgcctcagtattatattaaaacatgagaaatttgatgctagcattattttttaatttagattaagattgctatgaaatatgaatcaagcatcacattaaataggctaccattaaatttttataataattggagcaagataactataattttaattttacagtaaaaagcataggcaagcattttcaaaaaaaagtgtactaaaatttatgatattttttgtttaccgcatggatctacatatgtggagctgaacaaaatttgttttataatttttagatttttgtatgaattattatgtatttattaattttcagtcgatttaaaaaataaaagaaaagtaaattggagattttacattgggaacctagaaaattttttattttttttctctcttccatcgtaacgattctgggctgattgggcctacagagaggagagcgaaagcgaagtaatatgagattttacattaggaaccctagaatattttttattttgtttttccccttctagaaaagttggatggaggaggccatcggtaaaccgaacacggacaagatcaggggcaaaagaaaatatttggcaaactaaaattttggctctttatagataggtatagatttgggttaagaacagtagtcggacattccactttgttaagttctttttttacataacaagaatagaatcacgctctgtaggctcgtcagaccgtacctttctaaggaagtcgctttgggtagttcagttggcgagaaaagccttcctacctttgcaggtccatcgggccgactacaacccgtggctcaatcccggttcttgcggtgtcttggcaacattcttgttggaagataccagaaggttgctccacgggtaatcttgacacgtatgtaaagtgatgaggaacattgaacgaacattggcatgtaaagctctataaattggtgttatccataacaactcgcagaacatcacaaaattgcacgtcaagggattgggtcagaaacaaatcgtctccgtgtacaacgaagtggtgagtcatgagccatgttgatctgatatatacatagcacacacgacatcacaaacaagtcatactacattacagagttagtttcaactttcaagtaaaaacaaagtaggccggagagaggacaataatccttgacgtgtaaagtgaatttacaaagccatatatcaatttatatctaattcgtttcatgtagatatcaacaacctgtaaaaggcaacaaattgagccacgcaaaattacaagtgagtccaaataaaccctcacatgctacataaaagtgaatgatgagtcatgtatatctggcaagaaactgtagaagctacagtcatcggtagcaaagaaacacaagaaaatgtgctaataaaagctataaataaccctcgtacgcctatgcacatctccatcaccaccactggtcttcattcagcctattaacttatatctatctactccagagcagacaagaactcgacaccatgaaggtgttgctcgttgccctcgctctcctggctctcgcggcgagcgccgcctccacgcttacaaccggcggctgcggctgccagacacctcatctaccaccaccgccggttcatctgccgccgccggtgcatctgccaccgccggtgcacctgccgccgccggttcacgtgccaccgccgccaccacaatgccacccacaccctactctaccgccccacccacatccatgcgctacatacccaccgcatccaagcccgtgccacccagggcatcccggatcctgcggtgttggcggcggccccgtcaccccgccgatcctgggccagtgcatcgagttcctgaggcatcagtgcagcccggcggcgacgccctactgctcgccacagtgccaggcgttgcggcagcagtgctgtcagcagctcaggcaggtggagccgctgcaccggtaccaggcgatcttcggcgtggtcctgcagtccatccagcagcagcagccgcaaggccagtcgtcaccgctcccggcgctgatggcggcgcaaatagcacagcaactgacggcgatgtgcggtctaggagtggggcagccaagtccctgcgcttcttgcagcccttttgccggtggtgtccactattaaagaaactatctatactgtaataatgttgtatagccgccggatagctagctagtttagtcattcagcggcgatgggtaataataaagtgtcatccatccatcaccatgggtggcaacgtgagcaatgacctgattgaacaaattgaaatgaaaagaagaaatatgttatatgtcaacgagatttcctcataatgccactgacaacgtgtgtccaagaaatgtatcagtgatacgtatattcacaatttttttatgacttatactcacaatttgtttttttactacttatactcacaatttgttgtgggtaccataacaatttcgatcgaatatatatcagaaagttgacgaaagtaagctcactcaaaaagttaaatgggctgcggaagctgcgtcaggcccaagttttggctattctatccggtatccacgattttgatggctgagggacatatgttcgcttaagcttagctgtcactcacacaacaaatcagccaacggtactttctgccaagacttatcagccaaacgaacaaaacagtctgctgatgctctcaaaaaaaacatacttgctggcgaaagggtcccactagattcaataaggacctaaataggatttctatcatgtctt

SEQ ID NO: 4124 - DNA, 3973 bp, Sorghum bicolor
gggagggagggaggaaagaaaaaccctagcttgataccatgttagaacattgtaattctcattactgggctaaccctagatagggtagccatatagttccatacatgggcctcatgtgcctagcctcatgggcctagattactcatactccaacagtaacactatagtcaacccaacaacagagctcactaagcccctaacaccatcaaaagagcccaagcgcccctgcatctctcgatagttgaaatttctccatggccttctgcagatttttgcatacttcgagtacctccattgaacacacaattgttccagtgtttccataacagccttgcctcaagaaatcaagaatcattagtgacttgaagttatttgtcaactatttgtttaatctcttggaatgaccttttgcaacatttttctcccgtgatcgggaatatagcctgtgtttcattaagagtaagagagttacacgacacagctacgagagagccctcgtaacacaggttacaaaccaccaagctagtggtgagtgacctggaacaaagcaaatgaacaagaaaaaagaaggaaagaaagagcgactgccctcaactcccaaaacctaccaactgaacctacaagaataggatacatcaacgcactggtttcctacaaattggacaatgccgtggtggcaaaacatccacccagagaagacagacgagcatcccgcagaaacagcggcaaagcatctgccagtgaaaaccaagcgaccacagtggccaagaaacattgaccttttccaacaatcactgaaagctgtttcatcactccaaggtgagatgcctggtaagccaatcatccggaataattactttgcatatagtgcccaggaaagttactttgctgtgtaatgtgtattatccagatggtgaaagtctccagaatgctcgtcctgtaggtcaggttttttaagacaacctgtgataaaggacctctaatattctgaagctatttgttgtcaagcatagcttcctgcacagttgcctattgatgattcatttggaaatgcaagtgatgttgttaggagctagatccgcaatatcctttccgtgcagtcacagacatctatcactccagagtaaagtggcaccaataatgacgccagcatctaattgataagaggtccttgacatctaaatttgagccactgcatggaactattcaagccacgttgggattttgagttgtaacgaatataaactgtttcagtgcagaatcatttgaacccattttgttgaaagaaagtacttttttcttgatattgagaaaatgccttcaaaggatgcaaaaaaaaacagataatggacacaggtgagtggttgttttgcattcattgcatagttgagctatcatggcatccagtatcaccaaatggttgatggctaattgttctggtttggatcagagccttgcagatcagcatattggcttaacattgtagcgagattgactaggcaacccatgatcatgtgtgtaaccttgcttcatactgtgcatatgtagaatgtaaatgttctctgatattttactgcaaccattattgtcatgtgttttgtttgtccaatgttttgttctatcagccaaaaagggaaaatgaaatacttaaattgcaattggccacaggtatgatgtgttcacggtcagttgatctattgtgagtcgatgggggcgaaaattcaggatcagttgttttggttcagaattgaccatagcaaacgcatcatgccttcataacacttgtttggaatgagaaagtgttaatttgtatctaggaacatatgtgatgctactcaacacttattttccaagcttacaacaaacaatttgcatttagagctgatttcagcctaaaatgtgaaatgctaccttgtgctctttcctactggcctttggaagttactctctcttaatagtatatttgttttatgcagatagggcccctttttagtcaactgatgcctatgatggaggcctcacctgtttactcggtggccagaaatgcatcaggtgattgttgggttacaacatagcttctcatgttatttgtcatttatctatttattaaatttgttttggctgaaagagccatagcaaacttatgctttatcacaagttttccattatggatccattgagcaagctatctgatcacaccgtctagcgttgatggtttgctcttaattatagtttgtagcttctggagttcagtgcttcatgatatcgtgttgctgctgccacatgtaataacatataactttctgacatggtaaaagtgtgcactgttgtctgctgacatttgtaaaatgaaagaacgaaacaaggatatgaacttttgcttgacatgcttcatgtactgttttaaaaacatgtgatgtcatgactttaggagatgcatggaaggctctgtttgatttagctggagggtttttacgtgagtatgatcaagaagctatggtatctttgagcaaatttgtcgatcagttaccatcggtaatgaatcaggtacttgtatgaacttatgctcgtctatttctatttcttttagattagaaaggagccgtctagttttttcatttaactgtcttccaacacatccatgtcctgtgctagactcctagtgaccttcaggctttcagtgcatccgtgccatgatggtagctgtttcccatattatttgcaggttacagaaggcgtgtctgaattcaaaccaacaccacctgaaaaccgtgaattctgcaagaattcctacagcgtacccaatacattattggtactgacaaacttgcatctttctgatccaacctctgttctggaccttctgattagtgtttcatttatttatttttgtcttgtaggtcaaattcagcgtagatgctattgatgatacagacatagttgaagatgtcctgagaccccgcattgactcaatcggtggacaaataaagaaagtaatactatcaggaacacatctaactccatgtatacaggtgacgtgccatacttttcactcaccattgtatggacaaaatgggtatttaaaggaattctgaaacatatgtgcaagtgcagcaccttgtttcattcaccaccggtaatagtctctagtctctacttgttgaccacactagaatcgaagtaagcaagctgatgttattttagggtttcacaaccatttagtctgctcgaaatcactgcttcacactaaggagaatatagtgctcttatcttgtttaccatttcagaaaattcttattcatatgtttcagctcagtcaggcactcatctttgctgtgttacaggatgtcaaatggcaagttggttcagaatacactccagcagatgccattgcacaaggattgaaatcattggctctcagtgaaacaagagtcctctcaagaactattgctgattggtttacatccctttaaattttgagttactcaatacatctgttggagttcagagttacaaaggtatgcactactattgcaagagttcataattattgatccagtttacatatacaaaattccaaagttttgttaatttgcttggtgagtagatctgggacaaaccaatccccatcactcatccagttgtgtcttggaaattgctttacctaagtcaaatcttggagaaatctatgtacatccaactaactttgatgcatttgcatacaatcaggaatgcctttatcagctctcaacttcccattttgctgatgcagtctacaattgtaacgagatgtaaggatacaatgtattatgtatggtacataagagcagtgcatttgggcttgtgctgagttggtcatgctcacccacaggccctagccgtactgcaaatatctgatcaagattggggggtttagggcctacttggattgtagttgcaggctatacaaagcatcaaacccaaagtccaagaa

SEQ ID NO: 4125 - DNA, 9607 bp, Sorghum bicolor
aaaaaaactggtgcgacattctagtacgagtacatcatagtatgtacacacaacgaacgtcttatgtagcaccaaagtacatacggagtatgaacccattgctgtatccttttagcaccaaatacacatatattccacttttttaaacactttaaaacggaggaattatagagaagcagaaaatggtgtctaaggatacggggatctccgatcgtggcgagcttgaaaaagcaagcggatccaaacaataaaaaaatattagtataacatttttgtttttatttgataaacattgtccaatcatagagtaactagatttaaaagatttattttataatttatagataaactatataattagtatttgtttttagctagatttaatactctatgtatatgccgtaaattttgatgtgattgaaaattttgaatttattttaggaagcctcggtgtcgccactgagtttatccagtagtatctcaatggaagtgccgtatgggacacgagtacacgacccgtgcgctggagctatcagaacgtactactgttactttttgctttgagctgactgtagcatccaactcggacggacctgaagctcttcctcttccttgtgtgattgcgtcctacggccgtctttatccataataaatgtccgcgaattttgttttagacgatgctaatattggacacgcgggcgccggagatcaggcatatacttcctgcctcgcacgccacgtccgtgtacaagttcaaaaaaaaaaaggaaaaagaaaaagagacgtgaatcactacggctgactcgtcacactgtcgttctcagatcagtgttcttgctacgtctgtcgtctccttttttgtttggcaccacgacatgtatagaacgctaggtgtttgattagagttgttaaaggttttgtttagtttctaaaaaattttaagatttttcgtcacatcgaatcttacgatacatgcatagaagattaaatatagatgaaaacaaaaactaattgcatagattgtctgtaaatcgcaagatgaattttttgaacttagttagtcaatgattgagtagtatgtcaaataaaaacgaaagtgctatagtgtccaaaaacctaaaattttggaaactaaaaatttaatatgtattgtagtattttcgtttttttataattagtgtttaattataaactaattaggtttaaaaattcatctcataaattacttataaatagtttatatttaatatttcgtgcatatatctaaatattcgatttgatggaaattaaagtttaactcgcttaatcaaacaagccttaggagatataaaagctgcttgttctaaatacaaaatcctggttcaaaagttttgggatttggttccagaggacaacaaatgcgcgcaaaatgtaccggctgctacttctttcatgcgtgcagcgtcaggccgtcagccgtccgtgaatgccaaggcattgtttagttgactccgaaatccaaagacttttcaagattttccgtcacatttaattttttggcacatgtatgaagtattaaatatagacaaaaacaaaaactaattatacagtttgtctgtaaatcgcgagacaaatcttttgattctaattagttcatgattcgacaatatttatcaaataaaaacgaaaatactacattagtgaaatctgaattttttttcgaactaaacaaggcccaagacacagaacgtgcacacgcaaagctggcgttcaatgatacgtataatgataaaattatatttgttgtattttttaaacctacaaacacgccacgcccatgcccacgcccacgctttcgtctcgtctcgtcccgtgaacaaacaacaacagtacagcagcagcacccaccgcaccaccattcctccgcgcccagcctccttcgtctccttccctcccggagcagttcacagtccccactccacctcctcctacaaatacacctcactacttcaccacgcctctgctcccctgccttccgcttccctccctatcccccccacccccccgcatcgtacggaacctgccaacgccgccggcgccatgggggccttcgcgaaggaggagcaccagttcctcgccgagctcggcctcgcgcagcgcaacccgggcgcgttcgtatgcggcgcgtggggcggctcgggccccgccgtcacctccaccagcccgaccaacaaccaggtgcgtgcgtccccgcccggtccgatctgctcggtttcgccgcttcacctgcttcgtgtttggttgtttttttttggtggattttgatcgaatgtttttttttgttgggtgcgtggctgtttgtgtactaggtcatcgcggaggtcgtggaggcgtccgtgcaggactatgaggagggcatgcgcgcctgcttcgatgccgccaagacatggatggcggtgagttcctctgacttgcagttctcatagtgatagtagctcgcacggatgatggaatgctggcattgtggtttagtagttgctactgcctgtggattttaactgcgtggaaatggatttttttcactcccgttgggttggaatttggagacgttacttcaaacatctgcaattgttggtcctttatgtgtctgatgagtttctggggaagtttgcgttccagtttgtgatatgctgaggtgatatgggttctcaatttgatccgggaacacggatctctagtgtaggtctgcatctgtgaactagaatttatactgcaatttcagacttcatgcatgtttgggttcggccttgtaccattttcgtttgtatttggtaaggactaataactgctcaaaagattcgtctcgcaagttacaacaaccaaaccgtacaattaattatttatttatctatatttaatgctccgtgcatgtgttgtaagatttagactgatttccaaataaactttaatgtcacagtgaatcttgaaaaattttggaaactacaccaggcttttggaatctatatgtttcttttttaatgttacatggtacaaaacactgcaagttcattgatgggactgggtagcattgctaaaaacttattccatccatcaattgatttgattccaaaatcttactcctatcaatgtgctcataaatcataatgtcactgccaacgtgtccagtttcctgctccgaagcgaggagagattgttaggcaaatcggtgacgcactgagagcaaagctccatcaccttggcaggcttgtgtcacttgagatggggaaaattcttcctgaagggatcggtgaggttcaggtaggattatacttgcttgattgcttctagtgcattgtctacaatctgcacatcatttattgtgctcacgaaaagtaccattgacttcacacttcacagcgcatctttgcgtttctgttttgtgatgttaattgatatatgctacattatcgtctatgtggtttcgttactgtttccttacctggtagaactgcaacttttcctaaaaacatgtcattctcatatgtgcagcactattgaataggtcagttggtactatatcaccagatcatatgtctaagatgttaacctgtagtgaagatagctgaatgatagtattttagttggatgatttgataagcttgctaaatcagcctgattaatcatagctaaatcgtgacgttgcagtgcataaattgatcaccatgccgataagcccctaaccgtgtttaatcagatgacttgataacctcgctgaatgatcatatgagttgaagtgaaatctggttttgattcctatgtgcatgatgcattggtgtgtcctattttttgtaggaaatcatcgacatgtgtgattatgctgtggggctaagtcgccaactaaatggatccattataccatctgaacgtaagacctttcttcctttagttatatcttttttcatgccggttgaaaactacatcatctgcaatgaaactgttgatttgaatatttgatcatgctggttgcaacttgcaactgattcagattatctatgactgtttaggagccagaatgggtcttgtaattgccggaaaatatatttgaataagattctgacggtctagctttgtatgtttgtgtattgtagcgaacatgctactaatctacaacaccatcgttcatgttaaattatttccttatcactactgtagtgctctacaataagtcaataacacatcattctagttttctgttttgaaagaaactcagttttcccaattccctgaaatgtcgcgctgatattactaactgaaattacaattttcacagtaaaggagcataataagtaacaaatcccttagaaaacaaggttttggagtaatggagtgttacctttctgatgattggttgcagaaggtagagtcccagttgtcagttagaggcttttgcattagtcttgggtggctccatatcatcttttctttaactcctggatacaaagcatatgtgcagcgtgatgatgatattcagtgatctgtaagactgtaacagtgcgctttgtcttttttttttttgcaggaccaaaccatatgatgatggaggtattttttaacaaatagtttctcatgtggtatatcctactcttagatatcagcatgtagcatgctaatgtctatgcttatctgagtaggtgtggaatccccttggagttgtgggtgttataacggcatttaattttccttgcgctgtgcttggtaagtctctgacagctcatatatttggcgcattgcatttctatgctataaaaatcaacatagtgcatcagctctctctttactttgcattttaagactcttcatttagggaatgttagccaaaaaaaaaaagtttacaactctgggtggtgggtgcagggagtttttagctgaaaagtctagcagctgacaattagtggtgtaacctggtatttagctgcacccataggatgccttttaatccaactttcacgagttcttacaccctgctcatttatagtgctatgaaattgctgtcaacatttaccatataaccatgctatcttaatagccatgaataccttaataatctctcgtgtcatgtaggttggaatgcttgcattgctttggtctgtggaaactgtgttgtctggtaagaatggtttacttttctgataaaattgtactgctgatatatgtgtgtatagaaaatgttgccattaaattccgaaattgagttggctccctgattattcatctattagtctgtccctgctcatggaaatttactggtcttgcccttcaaacagagcaaatttaactttctatgactgtcatatggcatgttaccttctacgaactgttgtgggttgtgaattgtgatgggttgtcctattcatctcatcatctggagttcaagcaatttgcactcaggaagaactttgacaatgtgtgctgcccaacttgtgacatccttgtaggcttttagtaaatatatgttgcagacataggtagactggggagataatcttggttctcaagtcttaaaagtgaaaacaatgtccatcttcttacaccaaaaatactcatatatgaatataatctatccagcatactcacgagttctgttttagtggcaacaaacttggtcagcaccacagggaggctgtttctctgtctaatgttctgattcttacaggaaaggtgccccaacgactccactgatcactattgcaatgactaaaatagtggctagcgtattggagaagaacaatttgccaggcgcaattttcacatccttttgtggtggcactgaaattggtcaagcaattgccgttgacactaggatacctttggtttcattcactggaagtacaagggtaaaacttttttgttctgatattttgtagatcctgtaacaacaacatgtttttccctagatctattttcttgtatgaacagtttttttcccctagatctactttcttgtacgaacagtactataagacagccttgtgtgtgttgcccccccgggggaggggggagctaacattgtgctgtgctaaatatgcaacactggtttctcgatgcaggctggtctgatggttcaacaacaagttaatgcaagatttggtaaatgccttcttgaacttagcggaaacaatgccatcattgttatggatgacgcagatatccagctagctgtgcgttctgtcttgtttgctgctgtcggtacagcaggacaacgctgcactacatgccgtaggctggtatggtgttttttaatttctccttttcgtattgtggttcgttttcaattgtttaattgtatttcccatcttattacagattcttcatgaaagcatatatcaaactttccttgatcaacttgttgaggtatacaaacaagtccgaattggggatccgttggagaagggcaccttactgggaccactgcacactcctgcttcaaaagagaactttttgaaaggcgttcaaaccattaaatctcaggtgaaggttaaaaatagtgttatggttcctacaattatttcgacctccatcacaatctcaactcaatataagtatactgccttactggtgttgaaagttaaatgtacccctctggtcacaaaaaaatgttgtcttggacaagatttggtcaaactgtaaaaactacaaatatcattaacttttaaattatttagcttagtaacatgtaagttatctgtgtcgatatgtattcgaaatattttcaaccataaatttggaggattttaagagtatattctagactaaaagaaattaatggtcaaaagatatgcactgaactcaaatgtgacaagtatttttgcccggaggaagtattactttatgtaagccatgaaatataatttgacctgttttattcagggagggaaaatcctttttggaggatctgccattgaatcagaaggaaacttcgtgcaaccaacaattgtggaaattacaccttctgcagcagttgtgaaagaagaactctttggtcctgtcctttatgttatgaaatttcaggtagcatatagttcaatattttgtttttttgtattctttttacctgttctaatttctgtaattgagaaccactgtctctaataatcacgaggtttgtatttccctacagagcttgaaggaagcaattgaaatcaataactctgttcctcaaggattgagcagttctatatttacaaagaggccagaaattatttttaagtggctcgggtaagtttgtgcgcaacatgatggagaatttaattgacatttgaagaaaggatatctctgtatttgtggaaagcaaatgaggcttgtagcattagatgcccatgcggtggtactacaccggtagcatcctagtttttgcttaattgaatggtagttatcttggtttacaaggtataacatgagaaagtctggttcactatttttcttctttttggttggtatctttacacagcacactaatgcaccggttcccttctctagtacaaaaattcatgtttttttgcatgccagcatcatatattcagtctgataatacccagtaaagcagtaagctcagccggagttcccatacatggcataaacatttaaccatactcctctgctgcaaaataaatcatatatatatatatattgaaatttgaatattcttaaaaagaaaactcccatcttttgtggtccttccagttatattttttgattgccaataaaacagtctcattgttccttctcttattatgcaggccccatggtagtgattgtggtatagtgaatgtgaacatacctactaacggtgctgaaatcggtggagcatttggtggagaaaaggcaactggtggtggacgagaagcagggagtgattcctggaagcagtacatgaggagggcgacttggtaagagtacacacgttttagctatgattggatttgaaatggtattataataatcattattagagcagtgcataacaagggtcgctaagaaatacataggccctgtttggcacaagctcagattcactagtgaagttgtttttttagaaaagagcttcatgagcaactttctaagtaattgtttggcaaaacagcttcaccaacagcttcatgcatggatgaatgaaagaaatgagggggagagctaggaagctacttttttcagcttcatctcaactcatgtctttgtgagagagaaagaaaaatagcttcacccatgaagctgttttgaaaaatagtgtttggtaaaataaaaaaaaaaacagctcacaacagcttcagttgtgagctgtgccaaaccgacccatagttgcataatttgatattataacatattggcatgccaattgccacatgtcacactgagtcttaagattgttgagtaggtattgtgaggatggttatttagatgtcattattataccagctatagccatgtaagttcttgcttataggacaggttggagacccagccctagtctacggtttggttgtttgggtccagccttttattgtgcgctttgccaactggaagtctgcaacatatctttagtatgtagtgaaatagtgaatatacgtgcagagaattacatgagttgcaagtaccctttgttctgattgccgcaaccttctgtgggttggtatttgtaatgattcgttacagttttctgtctcaaggacaattttcagttcaaaaattcttcgcttgttggctctggtttttcccctgggccttggctttactaacacccattccacccatttgcagtacaatcaactatggaagcgagctacctctagcccagggaatcaattttggttaatcctgcaggaatgttgccctgcaaccgcatttgagatctctgcatagactcgagcagtgtttgtcggcgtcagtcgtcaaacctaaattgcaggggcatgtgtacataaaataagatgtttgttgctcgtgggcagagacgtctactaagctgtctctgtctcttctaaaagagtaaatcttcccatgtaaccttcaacagttaataagtaaacattctcattcagaattattggtacactatgcagtgtaatttttcagccttgtgatctggagcattattccttttgaacaacaaacacatgaaagaaaaacgctgcaagatagcaccagaaagactaactatgatatattttcatgttctgcaaaacaatcctcactagataaggtaacgaataaattttgacaaaaaggcacctgagggtggtgcattcatgccctaatcacaagttcatatacattgctattattttccctgttgatgcgctttagtgcctcaaaacttcttctgcttcctaaaaagtctattcttttaaaagctacaagtcctttctctactgattcaacagttgaatacaaagatcgaagtcgatcggcatgccgggaatctgtatgcaaggccatgtctatctcgttggttgacatgttctcctatgaaaaaaaaagacaattgtctgtcgttaatattttacaatataaaaagagtccaaaatgatatgcatttatccttgtgtgtgtgtgtgtgatgagtgtggagtag

SEQ ID NO: 4126 - DNA, 7177 bp, Sorghum bicolor
ccgcggttttccgtgtcgagagatcctactattccttgatttcattgatatttcttcccactaataagataatcatgaccctttagataatctttcgtcctcctgaacatcactagagatgatggttgacgtgttgttttatggttcataacgacatgaataataagagtctaattgatatggtttcttttgtttcagattctctaactctacatttggattcttgaaattaaattcattcaaataattataatttaggtacaaattaattaagctaatatgattatatatgaaatatatttgtatattgttgttagccatacaaggaagatatttttaggttgcatttctattgtggagaagtgagttttgaataaagcaaaaatatagcatggtgatttatagaatcaatttccatcttccaccctataaatttaagatagtcttatttgtgagtttggaaaagttgtggaatgttgaactccaaaccaaatatcctaatccactaagtagattttaattccttcaaaataaagggatcgaaacgcctcctaagagaattgattttatgagaataattatgttaatttcctaagataaaatacacgtgattttgagcttgaagtaaatcgaaaaggttactttttccaacttcgtagtttattaaaagaatcattttagggaattagcatagaatgactttttttacaaaatactattccctctattctaaattatgaaacattttctagacatctagaagaaatatttaagccctgtttggatcataatgctaatagtttgctggtaatagttagctcattggattcaaacaagtctagctaatagttgagctaagtgttagttgaatacccaactaacaataatttcactagttgaaccaaactagttaatagcagctaatattgactatgaactattagctaactaactattagcaggtaatggatccaaacaggacctaatagcagccagccagcacaagctacaccctatggtcctgtttagatccataagttaatagtacaacctatgatccttagctagctaattactactaacagccaatggatctaaacaaaggtctactccctctgtcccttttaattgtcgctgttggtgtgcgtgccacaagtttaactcaatttgtagaaaatacatgcaacatttgtatctctaaataaatttgttaaaaaactagattcaaatatctttctaatgatactaattatgtattataaatattaatattttttaatatataattgtcggtagttgtttttcgggaagcgtaagcgacaattaaaaagggacggagggagtaagtagcagcccccattgtgtaacagctggccaacacaagcctccagcagcaaatagctgatgccatgtgctctgcagatgcagccaagccgccgtatgtttgcatgcaccgcccacaaaaggccagattaaaggtttgttgcttcgaaaaaagattcctctgcacgcggaaacacacaagtttgttagtaaatccgccggacgcgcctactgaatttcgctcgcaatgctcgtgaactgatgcaacgaggacaagcaaaagccacctatgaatccttaccgacttggctcgtgctaaacccctcatcgatgcaacgatatcgtcagttcatcacgtccacagctacgcaacgcaagaaacctttatctacaattgcgatccttcttccattcatcccgtcccgcgagataagaggagcaccaccagcccgaggcaaaaaccttcccaaattctgaaaaaccccgacgttttcggatgctgcacgttgctacgcatcgcaagttcgcaacaccggattacagttctcggcttgtgatttctgaaaacccccgaagttttcggattaagcgcggtattaaagctttcgttttcttttttttcctaattaaacgagttattatatattttgaggagaaaaagatagcggcatcttgacatggatctgcgtgccccaccaaccaattatcccaaaacttttttatcttccattatcctatggcgtcgtcgtcctgacgcgggggcggcgaagaggaggccggagtcatcatcatcgtcgtcaataaacaatcgcgccagccggaggctctccctctccctctccctctcccgtccaatcgcatcgcccgcacgagcctcatcatcagtccacgaccatcaccatcaccaccaccactcgctgcagcggcccactggactcggccgcgactccgtcgtcgcgagatccagcgccgtcgtcgcgccgcctacgccgacgccgctgccgccgccgacgctgctgccggagatgccgagcccgacgatccggaggctggacgtggcctcgccggtgccggcggacatcgacatcgccaacgccgtcgagccgctcccgatcgccgacatcgcggcggagctcggcctccggcccgaccactacgacctctacggcaagtacaaggccaaggtgcgtacgttcctgattggtccctccctcctgggtcctggcggcccggtgcgtgcggttcggtcggatcttgaggcgaccttcctctctcatgttttcgcaggtcttgctgtcggttcttgatgacctcaaggcgcagcaggatggatactacgtcgtggtcggcggcatcacgccgacgcccctcggggagggcaagtccaccaccaccgtcggtctgtgtcaggctcttggcgctttccttgataaaaaggtgagatgcttactgctaattttgcttgacacagagtccgttccccgatgagacgattagcattttattatcggaccaaatttgttactagtactgaattgctgtccaagtgctgctctcagctgatgaattcagcctgaggcgtgatgacccgttttgatccatgggtcttgtaataccctgaaattgtttgatgaaattctggaccgattgtagaatgcaatcttgtttgctgccacttgtgcagtgatttttgtctttgcattggttatgctagtactaggttatctatttctctgttgcaatcaggatggagtagtatttattaagattgatgttatgcagatggtgtgattccgttgagtatgctctgtttaaacaattggaacaatctattgctagatctagatcggatttcgttactctttgaaatttaatatgacatcaagttgcatcaagatcagtacaggtactttcggtgaaaatattaattaaatatgctcttctaagttctctgtacttcatggggctgtaaaaagttccagagcttatatagtataactacatctttatgtatatgtatttgctcgcatgagttatattcactgactttctccgaacttatttgatgtgttgagtccttcaagaaaatctgtatcttcagaaaaaaaaaatcattttctttgtattatctatcatttgtactccctccttcccaaaaagaacgcacttttagtttggggataaatcaaattttctgaagtttgactaagtttaaagaaaatagtaataaacacttgtctccaaataggtttactatgaaaaatatattccgtgattaatctaatggcacttattcggtatcataaatgttagttttttttatagatttagccaaacttgaaattgtttgtctttttttaaaaaaaaacgaggagtgcactctttttgtgacagagggagtaagcaataagtataggataaaatactgtttgttttgcttatctgtcttgtgtaaacctttgagtcctttatttacattacatttcatgcaactgataagctgcgactttcttttgtgtttccattatacttctagtattaaaagacaatcatatgtttgataaaataacttcagactgttgtaactatctgctccagatcatgtggaagttgtttcatgtattaatgtattgtttttactataggttgtcacatgccttcgtcaaccatcacaagggcctacctttggaatcaagggaggtgcagctggaggtggctacagccaagttatacccatggatgagttcaatcttcatctgacaggcgatatccatgcaattacggctgcaaacaatctacttgctgctgctattgatacaaggatcttccatgaaaattctcagtcagacaaaggactgttcaacagattgtgtccggcaaacaaggaaggcaagaggcactttgctgacgtaatgttcagacgtctgacaaagttgggcatttcaaagacagaccccaatgagcttacaccagatgaaatcaggcgttttgcaaggcttgatatcgaccctgagtccattacatggagacgggtgatggatgtcaatgaccgtttcctgagaaaaatcactattggacagggccctgaagaaaaaggtatggtgagagaaacaggctttgatatatctgtagctagtgaaataatggctgtattagctcttacaacttccctcgctgacatgagagaaaggcttggaagaatggtgatagggaacagcaagtcaggtgagccgataactgctgatgatcttggggttggaggtgcgttgactgtcctaatgaaagatgctattcatcccaccctcatgcaaactcttgaaggcacaccagttttagtacatgctggaccgtttgctaacattgctcatggaaattcttcaattgttgctgataagattgctttgaagttggttgggaagggtggctttgttgttactgaggcaggttttggtgctgatattggaactgagaagttcatggacatcaaatgtaggtatagtggattggtgccacagtgtgctattattgtggccacaattagagctctcaaaatgcatggaggggggcctgaggtggtggctggaaagcctctggatcatgcatatgtgagcgaaaatgtggcccttgttgaagctggatgtgtaaatctggctaaacatatatcaaacacgaggagttatggagttaatgttgtagttgcaatcaacaaatttgcatcagatactgaagcagaaatgaatgtggtgcgtagtgcatcaatggctgctggtgcttttgacgctgtcgtctgcacgcaccatgcccatggtggtaaaggagcggttagttttctttctctatcaattttttaaatttggtcaccaattataggttagtggtaaaatttaagctcataatctgttctggggttgatattgtactccctctattccaaattataagacattttgacttttttatatacatacttttgctacgcacttagatatacactatgtctactctagatgcatagtaaatcaatgtatttagactagaaaagccaaaaacgtcttataatttggaacgtaaaaaataccttttgtagcaacatagcacatttgattgtttcctaaacagggacatatttatagctcttattgtttatgaaatatgttactgtatttgttatagttatcctttctagtatcccttctagttcaccgttgcgtagaaagttattcattttttttctcacatgaactctttatttatttcttcagtactagaacaagagcagtgtgaataacataattgtaagaatttaacctgatcctattactaccatttaacttatttctaggtcgagcttggacttgctgtccaacgagcatgtgaaagccagacagaacctctgaagtttttgtatcctttggaatctagcataaaggagaagattgagtcaattgctaagttttatggtgccagtggtgttgaatactccgagcaggtattttcttgtaaccatgctgtgcgtttgatgtttttggtccttgttgcatcacctatacaagataaaaacactcacccaccaagattaccaggcacctagtttaagattttaatcatgtcaattgccatctgagaggctgagttacattcctggaaagcataatctgaaacaaaactaaaaatcttctacaaaacttcccccaatgctttctgcatctagaaagattatacacacggtgcacaaaggattaaacgtggcttcactctgctgactttttcttgacctcccaacaggctgagaagcagattgagatgtacaccaagcaagggttctccaacctccccatctgcatggcgaagacccaatactcattctcacacgtcccatccatgaagggcgcgccgacgggctttgttctaccaataagagatgtgagggccagtatcggagctgggttcatctacccgctcgtgggcaccatgagcacgatgcctgggcttcccacaaggccctgcttctacgagatcgatgtagacactgccaccgggaaggtcatgggcctgtcatgaatggaattcaacttctgatggtgtcgtgcatataccagatttattgcacattcgttggagcgtcatattgtgtagtcggggcagtcctggagttgaataatggtagtgatagtgataataatagccgttcctggcttcctgctgttgcagtgccgcttcttgttacttgcttttgtaatccggagctgtaaatgttgtcgaaccgttctgtttagactcccatgcctcacatgcagcgttcagttaattgtagttgtattttcgaagatttgtctttgaactgcttgatcagtgattgatgaagtctgcctgttcggccaaatctgcacgccatgtgctttttgtttatgggaaattgcgccaggtgttctttggcccaaggacataggactctgccagcagtgcggcccataaacaaataaagtaggcagccagatcgagttcatgccacggcccagcatttctactttagtccaggtctcccgtgcagaccttctattcctggcaggcctcttggtccatctcattagtttgggcctctgcatacataattgtagacagaaatttttatttttgctgaaacaaaaaaaacacagaaatcttaattccacaaaaaaaccaaaatctaggcattatataaagctgcatcatatttaggtcagtttcagtggaaagttttataacgttgtttccaaggttgccaagtcatatgaaatgaaatgaaactaggatgaagcacccactctcaatggagagtttcattctatggtttcatagacatttaatttcaaga

SEQ ID NO: 4127 - DNA, 3559 bp, Sorghum bicolor
gaaaaatcataataaatcacaaaaaatttataaaatagaaaatctaattttgttgaactccgcataagtagatctacacaatgaatatataatatggtatgctttagtacaaagtttttgctataaaggttttgtctttttattttttatttatttcggctaaatatttgaaaattatagtaaattacaaaaaaatcataaaatataaaatctaatttcgttagactccacatgattgtacctacacagtaaacctttggccacacaactattaaaatcagacaacttcaatcttcaacacgtttcaaaggtagtctcactgtatatatttttctaaaaattaatgtagttagatctttaaaaaaactgtaactaattatttaaataaaaatataaaaccaatacacattttttttctaaaaaatattatgtgtctattgtatttagagttattcggatcttatagttgtttctatttctagcgttttattgctcgtagtcacgacctttatttattcaaaattatcatattgtgttatattagatgatagactaggatatcaacaaaaaggatccaattgattatgtgtacagatgatctcaaaggtgacgccaacctcgtagatgccatgctcccatatatacatcctatttaggcattctatgcgctagtgcttcactttattttttatggtttcactaggtaacagattttcaataaacacaggtatacatcatgcaatcgactaatagttcaatcaacaacataataccactgcccttcggaagttaagcaaattccgtcgttgttggttagcagacgactgccacttggttttgcttgtaaacgagaatcagaccatcatagtacctgtagaaaaccatgcaagtggaacccttcccattcccaggttagcccagtaataatcagtatgatggcgaaccagactttgcatacgaacttgcatcggatcgcagatttggatgggagccgcgacagcaggacgctgaggccttgtttagttttcaaaaaaattctttttatacatcaaatctttagacatatacatagagcattaaatataaataaaaaactaatcacacagcctgtatataatttgcaacacaaatcttttaaacttgattaatttataattggacactaatatagtagctaaatctaaaaaattttgtgaactaaacaagctcagatcatcagggatgcagggaagggccggcgaaccttcaacacggctggattacacgcatggccggccttccttggcagaggaactggaacatcgtcttcgtgatctttggccgccataaaagcaagacaggaacgccacggtgagtcatcgacacatagccaaaccgtcccgccagatttggcttcttgccgaactccgacgatagcgtgcgcaacagggatggcgaagccgttggcgagtctgctggggctcgatttcttgtgccatagctaaaaaaagcgatgccgggtctggtgccgtgtgtgcttgtctgctggagatatactctaacgatcaatcctttggccatgatgaattttcatacattttcagtgagtgaaatgtagcagccaacaacagcagaattcctactctgttcagtgacggcgatgaattacttacttgtcgttttggccgattgcttgagcccccagtcatgcatgcatgcatgcatggatcggtgaacgacgtacggcacaagcgaccgctctcctccgcacatcacggctcgtatacgtcgtctccttctcaaggttactccaccgccgagccgatgaggcgagctggacgtgtgcttcacatgcaccgcccagatcaagtcaggcacagtcaccagctgatgatgaagctcgcagctcggtcaccgtcaccacccagataacggtgaaacgtaaatgagtgagcatcgaagcgtacgctcactccatcactacaaacggcaaggctcacgggcagcctgtgcgcgcatcaatgatgttcttggcgtcgctcgccataagaagccaaccgcgccacactgcccctctaccctacatccctatactgtctgctctgatctgctacgacacacagctgctgtccctgcacccgtaccccgatccagcgatcgcatcgcatcgcattcgcatcatgggcctctgcctgtccgtggcactctggaaggagaagctctacggcggcagccggtcagtgcggggccgcgtcgtcgtccataaggttgccggcgtggagggtggtgactgcgagtacggcatcttgggaggcgacgccgatggcgtgctgggagtagagcagaagccgccggcggcggcggcggtggcggcggtggctccggcagcggcggccatgggcatgagaagtggcggtggagtggagggagctgccgctgccgtgtccggcggcactccggtgcggccgatatggcagaggagggtgctgatgggcgtcaagtgccagctgccgcggttcagcgggatgatactctacgacgagagcggccggccggtgtgcagtggcatcagggacagagcgcgtgaccaggtgcgtgtgcgacacctctttgcttacctaagttaacgtctgacacacgacttgaactgtacagtgtatgttcagaatgtgaaagagtgcgcgcttcttccttggttctatgcaatggatgcaatgtaacatgtgatcgtagctaacagcttatatatatgatactctgtttgtgtgttattttgaaaagtttacctgtgttcgtcgaatttagacggttttttaagacaatttagcttggcttcaatttcgtttaacctacgcatgtgagttaatgaaattgataataataataataaacttgtgtgtaggagaagcatgctgcggcgatctcagtgctaagggacctgctctagtcttcatcatcggcacgtggtggcgattctattgaggggatatgcatgtttggttactctacatgtacgtctttattaatgggttgcatgtttttttaaattagccagcttggtaataaaatcctttgtatttcgtgctatgggcgccagctttttgtatagactactatgtctatatgcatgttgtggcaaatgtctatatgtccgtttggctgaaaagttatgactgaaagtacaaagtcgctgatttattattgtaagagaaaaacactattgaatagctgacatattcggcagatcagataaagaaacatgctcaagttttgtagtgaatgcttctcctcttcctttgttgttaattataaccataatcaattctagctcttggtgttttgttgcacccgagcagaatctgtccagaattctagtcacgccattatactggaaaacatgtgagaaaatagaaaagataacatgatggaagaagcacagaactggttattggtgatgtgaggaccaattcaacaattggagagagggtaaataggagtcaatcaaagttctttttcaagaagttggcctatatcctaaaatttcacaaaaacttgtctcttctagcaacatcaagtttgc

SEQ ID NO: 4128 - DNA, 3470 bp, Sorghum bicolor
cgtacagtacgtatcgtatctagtactattcatcgcatgcgcctacttggagcttgattgggttggttaagcagcaaatgacatgtcattttcaggtatttgcattggtactatacacatgatcttgttccgcacaggtacgtacagccgcctttgggttgtatggtactcctacttcactgcccaatatgctttggcattggcaggctcatagatgtattcgtactatactcctgcatcaactgaagtagacgttggacagagctagcacaataacgcatgtactaggatggatgccttgagaacatggcaggcatgcgtctctgttcctgcttcaactcgtggtctcagagcttctctgatggaagacaatggtgaagcaaaggacagtagtaggcgaggctggttagtgcatgcaatctctactacagagctcgtatacgttgggagttatgtcaatcgatggcgcttctggcttcccatatagtacgatcagcctttgacaccgcagcactgatcccatgcgcagccaatcgcgaacagacgaaccgttcaccggaggttagcgccaatcattggccgcattcagctttgcatctgccgacatgcttgcattaaaaataagcacacgagtccatctaatctaagcggcactccaggcgaggacaatgcaggcgtgacacccacagctacctgaaaagatttcagctgcagtttcgtagctggttgtccttttcgttcctctctcgcgttcacagttcagacagccaccacgctgtcagattatcactctatctagcacagaacactagcagcatgcataatctgaaggtacagccgtacaggacaaggtacagtacaccagtcatcggacctgaatacctgattcagtctgagcgcttctcttctctatccactaccgaactgtggagtctgcaatatccatatttcttttagggccaaggaaataatttcagcatgaaatgggcctaagacacgtgttttgcacagcccacttcgtaaaccttgtctgcttcagtttcgggccttccgattcgcttttggcccgtgtttactttccgagggaaaaaatttcgcggtaccgtagcactttcgtttgtttgtaaaaattattgtccaaccatggactaattagatttaaaagattcgtctcgtaaatttcgatcaaactatgcaattagtttttatttttatctatatttaatatttcatgcatacgtctaaagattcgatgtgacggggaattttttgaaaaattttgggtttttgagtggaagtaaacaatgccctgaaatttgaagcctcaaccatggctcactctgatagtctgatcccctaaagaagaagaagaacaaaaaaaacatggctcactctggtagtctgcctgctgtaaacagaagaatactaaaacttcaactcacggtacaagttgttttcagagacgagataggatgcccggctttccctgatcccctggttccgattccgacgaaggaaaacgaaacgaggccgtgcctcgaggaaaggcgccgccgcatgcgatcgatgcaacaagcacatgcgccgccgtggtccgggaccgggagggaagcgggggagcagctaggcattttcactttcaccacgcaaagcgattcgagcctgggggagatctggtcgggcgagggcgcgacccggcctgccttggacgccacgtccaagctaggcacccgatgcggtgcatgccatcccctgcatcgtcctccgccctcccgatcacgtctcacgatcatcatctcaggcagagtataaagcccaaaatactagccttccccgttccatccccgacctactgaatctccctctctttcctcggtgccccactagctatcccgttgcctatcgatcctttgccttcctccaggaatcgcgctagctagcttccgcgttctgatcaagtttgtttggtgcgtgagcgtgactacgatcggaatcggaagatgggtaaaacatgggcgctcatcacccacctccacgctcttgcagggtaaatgcttgctgctgctgctgctgatcatctcctccggctcatccggtcctctaaacgatctttattccgcgattagtgaccttgctattgctgatgttcttcaattttctcttgtgtgtgcaggccgagtctcactctgatataccctctgtaagtgaacaaacaaagattagcaggggtgctttgctggttcatcgtattctttttttaccaatcaatggcgtaactaatacacgcgtgcaagatggtaacgtgtgtatcaggtacgcgtcgatctgcgcgatggagagcacgaccaaggtggacgacgagcagtggctggcctactggataatctactccttcatcaccctcttcgaaatggccgccgagaacgtcctctactggtaataacctatatatcacttctctatgtcctgcataataatgcagtttttggctgaaataatgcttgtcgacgctgtaaatatacacacatacttgcattcttggatcaagacggtaaattattgtacaatgtacaccatcttaatagtcataatcaaataaagattcaaagacagagagtaaagaaggccgttgctgctccttctttccttccttcgcaggataccgctgtggtatgaggcgaaactgctcttggtggcgtggctggtcctgccgcagttcaggggcgcctccttcatctacgacaagttcgtcagggagcagctgaggaagaacggggtgaggctgcacgatcaccatggccacggccacggccacgccgccgatcacgtgcccgacgtcttccaggtatgtgtgtgtgtgtctttgctgattgcatcgatcgctcacgcgtggacgccggctaataagcttttctctctcgcggcgctcgtttgctgaacgcgcagaatgagcatcatggcgtgcactgagaggagagctcccctggagaatctacgttgttcatcggagaagaaacctgaccggccagagtcattccatcttggtaatacaatggagccaccggttcgtgtgtcatcacctcaactgcgcaggacggccgggtgaccgtgtctcataagctcttgtgctgtgctcactgtatcacatcgtaacaacacttgggcatcgatccagtctgtgctcgtcctaattcatggtcatgactgttcagctgagaaatttatttgtgacgaataaatttgaaaagagattgtataactgtgttgctgaaaacattccgaatgttggattattcgtgcgtgaggtatacagtacatggttgtttaattggattccaagcgatatactaaaaatagagatgcaaacaagagatttacaatcaaccaatccctctaatcatgtcctacctgaccctatattcgatctctaccaataccctaagatccacctagcttaccgaagatccacc

SEQ ID NO: 4129 - DNA, 4805 bp, Sorghum bicolor
agaggtgagacttgggccgtgccatgctggcatggtacgactctctcgtgcttcatgatgctctggattgtaacctctaggaacgcgagatacatcgtgtcgtgctggtatagcacgacaagtctttgcttcggtccaaacacaactcatgacacattggcacacatttaagtcatgccagtccaaacacaactcttaaaatatttttattagttttctttgttctcctgtgatataaaaatatattttgtatatacaatttccatataaatttcaataataactactctatttaaccagacacaaaggccctccgccctccacccactgttcaacactgttaacttttctactttttgttattttatttttttatcttttatgggttttctttttttcttctttttattctttccgttcaaaaatacctgcaacgagggcacacagcgaagcccgtgtactatgctagtttttatttttataatacactcaagaattagatgagagatggtatgtgtcatagccccaccatagctagcataggcctttttgtattttttaaccctttcaaaaaatatttcaatattaatcttctcaaaaaatatattgtattccatagcctctttagtcgcaccaatctcgctggcgcgaccaaataatatagccacaccacatgtgttggcgcgacaagatacgacacattcgacggcattttgacatggaaaagcttgtcgcgccacatgcgttggtgtgacagtagatgtcacgccatcaggaatggtgtgtcaagatcaaactttcgaaaaattataactcttcgatatgatgtcagatgaagatgatttttatataaaaactatagtttcgagttttttcatttgacgatgttaaggtgctcaaaaaaattatataaagttcagcgccatatcacgtacttttgcttattgcattataaaattaatatttttttgtatgttgtcaaatgaagacattttttctaccaaagttgtagcacttaaatagatctatatgtttgtagttttgagtttttacatttgaagttgttatgatattaaaaaaatataaaatatcagcaactttatatagtttttaccctatggagaagtcgccagaatccacaaggcttgggttggttcaacacgctcccactagccagccaaacccggataggaagagaagggttcatcacccggatgaaaaaaaaactgttaaaatgttttttatttggtccttttcactatttttgttttcctttaaattttgttatatgttttcttaacttatttttatatgtaacttatttatttattttcatacatattttagagcattttttatttttaaaattttcactaatattaaatactcctaccaatcatgaacctagaattttattcttgtaaatttggaacattgttcttttaacatagaacatgtcttatagaagcggaatattttatcttagatctagagcatcaactttgcttaatagaagaaaatgttctatctttgaaattaaaatattattatatctaggtagaattttttaaggatttattataagaaacataatattgaaatcagaatttaatttagatgcttagtttgggagctatctcttttttaaactatatattatacaaatgcttacataaacatatcttacttttcttagaatcatatcttgcgttttgttaatagtccacagaccacagccataggtccactaatgaagcagtcatcggatcaactggtcggcacgtgcctaggtgcgaccagtggaaaaaatagatatgaaatcgagatatacaaaattaaaaaaaaagagagagagaaaaaaaaatcgcaacagcaatactttatgtgaaaaatgaacggcccaggaggcccgccgcgggtgcgctctccgcgggccgaacaaccccagactgggccggctgtccgccgcatttgctttccttttcccttccgcacgaccccgcgtgccgcgttcgtatctctgcctctcccccctctcgcgctccgacgactggtgtggccgccgccgccgccccaaagccaggtgctgaggccttcaccggcctcttcgctggcgacgagcatccaccaggtattcccacccgttctcttcccttcttgctgtgcgaagccgagcaccccaaaccctaacctaaggctatttggctatttgattgatgcctcctgacttcgaaccttttgcaaaaaaaatatcggctgtacatccatttccctttgctgggtccgcccctggtgcacacgaagcctggtttcctgttctgataacagtttgtagaattcttggttagtataaagaagattttaggaatttcagacgcaatatttattccgtatgtacatatatgcctgtgtgctgggatttgggttgacggttttatatatttatcaccgctgatgagcgatacatagatctttgcatgtttcatgtaaaatccatgtttctgcaatcatgctaaagttcttctaagttgctatgttattttgagtagtcataggacatttgagtgtttgaacttaggcaataggcatactcacatggtgagaatgcgatggaaattactctctacttaaatttgttctgtttggaatgcaattttttttccagtagctaccatgaatatcgaagttgtccatttcttctggggttactaggattatcaaagatggacctttgcaaactctgtggtgaaaataattatgcatctctgttatatacatgccaaatacatttgatttcctctgaaacttgtcctgaaccaaaacaagaggttcaaagttggcagtaacagtctccactgagtttctgatcaaaatcggacatttctgtaatttgtaagtgtttggactgtttggtaatttgatggaaaagtacatattctctgtgaatgaggtagtttaaatgttcagcttgtgttttccatgcttatagaataatgatcaggataacaaagtaaatgaatttagtccctgctaaatttattattgagctatagttttttattgttgactatgggataggtcagaataattaagcaaaatataactgtccttgtgctagcaatcatagtgtcatactatcatccaggtttccttcttagttgcaatatggacaatgtgaatttcttttaatagacttcatggcatctaatttactattacatcttacagtcctttcaggatgaccaagtatacgaggaacaaaaaatgttcatctcatcaacttagatcatcacatcactggaaaccccacagtagttccagattcaaaaaagtttccagcaaggagataccatttgcagctatagagaaatgtgcatggacagatgcaacttgtccagtttgcatggaatttccacacaacgctgttcttctactttgttcatcacatggcaatggctgtcgtccatatatttgtgcttccggctaccagcactcaaattgtcttaatcagcttgtagagtcatgcagaaaagtagcctccgaggacctagatgcaatagagcttgcgtgtcccctttgccgtggtgaggtcaagggatataccttggttgagcctgctcggaagaagctgaatcacaagaggaggagctgcatggaagatggctgttcatacatgggcacatacagagagctctgcaagcatgtccaaaagaagcacccttctgcaaacccacgagctgtggaccccttacatgcttacagatggaagcggcttctatttcgaagttcattgcaagatatgatttgttcaactacttcagaggttatgcgaaggttattttctctcatccttcagtttgacgagattatggctgcttcgcgagagggtggtgatcgtcatggtgctaccaatgataatttgctgccaagcgctaatgcagaatccactgatccatgatctctggacctctcgctgaaatgtgagagtctgtgttgatcctgcaggcaatcttcatgaatccctgacttggcccccctgccgattcacaatttctgacccgacaaaggaatactactcttcatctgttctcaggggatgctcaatggtcatcttgaaacgaaacatactgctaagctttgatggatttttcaagaacagtgataatggctggttgaatggcatggggctttgttcatactcatttagcctctagcgtgtcatgtgatgcactattcttgtgcaccctcccattgtttgtcataactgtttcttatggaatgcaatgtgtccctgttcagaaaacgaaatcttgccttttctgcgtttactgtttacttcttgttgcaaggcaaatgttgggtattattacttgaatattcatggaacatctgtagcttcgtacttccaaagaacatggtttcgttgagctctggagcttgaattatagattacttatattgtgattccaagttcgtaccgaacaagatagtttcttctaacttttcctgcatgtggatctcattggcataccagtttgatgaagtgaaactgcgtaatgcacagaatttcaaaccaaccagttacattagattgacaatgttaatttttgcggaaaggcttattttatcacataagtagagtagaggcaggcgatctagtccaatcactaggatttcggtaactcatggatttcacatggtgaatcgtttacagaagcacagctaaaacgatgtgccctatactggcatgttttggccaacctttgcgagccagtggcggcgacctcgttttgcatcagtgcatt

SEQ ID NO: 4130 - DNA, 5373 bp, Sorghum bicolor
ctaggcttcaccctgaagttccttggccgttgccactccaacaagaacgaacaaacagggggaaaggaaattccggaaacatcagtggtgcgcgtgcacaataatgctttttttcttagctattatagtatttttatttatatttggtaattattgtccaattcgttttataatttagaggtaaactgtataattagtttttatttatatttatatttaatactctatgtatatgtctaaaaatttgatattaagaaaaatcttgtaacttttgaaattttaaaggtaggctttgtttagttcacctcgaaaaccaaaaagttttcaagattcctgtcacatcaaatcttgtggcacatgcatgtagcattaaatatagatgaaaacaaaaactaatcacacagtttgattgtaaatcgcgagacgaaaattttgaccctagttattctatggttggacaatatttaccacaaacaaacgaaagtgctacataacgaaatccaaatttttttcggatctaaacaaggccgtagttgaaaaaacacctcaagccaatctggcctgtgggcgatccaatctggcaggctggcagactgactggactcactcacggcagtgattccgggaatacgcgatgaattattggcagtagttggtggggaagggtagtttcgttcctgggcagaatgatgagccctgatccaaagtccgcccgccgagaaggcgaggcaggcagtgaggcgccggagccggggagacccccgggaaaaggcacgccgacgccggcagctgcacggcctttcagagagcgtccggccggccctttactccactcatcgccacctccgcttagtgcgatgcgtcgtcgggcgtcggcgctgatgcaacgcaatgcaatgcaatgcaagcagcgtcacctcggggcctcgccgccactcgcaaggaagaaaggtcacacgggccagtcgtcgtcgtcgtcggttacgagacggtttttcctcggcgcgtgtttgattcgaatttcgaatgaatgaatgcaacgcctcatcagtcgcaggatccatcagctttcagcaaagtcgctagctcttcttttaccgtcgacactgttcctgctgaatcgacgagacacgaacacgaacacgaacacgaacacgagacgacgagcttgcccgtgcgattcgcggcgattcccttccacatgcactcgcccgtccacgatccatccatcccatctctacgcacgccagtcgttgcctgcccaggacacacacgcgacagcatcaccgctgggcacgatccggggagatgatccgtgtaggctttttcggtttgtacagtacgcacacccgatcgcactagaacgatggatggcgcaagcttgggagcactcactgtcagggaaaggtagttgctagttgtaccacaggcctacaaagtacattgtcacattttgcttgtcctatagggaggtggggatagggaatcgttcatgcctggcggctggcgctggatccagctgccggcttccattcgtccagtttcgcgttccgggtttgtatttgtggagctctttcttactggctgtgtgcatataggcccgcttgtctcttctaattcagttataccttgttttggggacacaggtagtaaaagctagagaaaaactatataggagtactacttatttacaaaattacccagcaagcaggaggctagtaaccacatgaatttaacggacatttcacatcaactctgtaataataactgtctgaccgaactcggatttgtgttttctacgtactagtaccttttaatttaatggagagatgggccaaaattcgtggggccgtgggctaggcccacattactggtcgttccaaggcccccataaacccagactagccaaatccgagaatcccacagtgggacccggttgacagccccacgtacggccctccttccttcctatgccgcctccccaagcaaagggaatagacgaaagctcaaaaaaaaggcgtcgcggctccccggggtccacacacaggcggtggggtggtgcccatggcttcgtggctgttgctccctctcccctccttcccgtggcctcccccgcccccgcccggctcctcctccggccgaggcggcggtggcggcggagacggcggcgattggaggccgaacgtcgtcgcggccttcgccggcgcgcaactcggccgctccctccgtcgccgcttcgccggcctcctccgctcaccggtactgtgcctcgcctcgccttccatttagttctcacttgggatggagaccatgatactatgatagcctttacttggtctgtctgttccaaaccaaacaggccttagtctgttgttgactgagctctctcgctccttgttgattgggtggagattttttttttttgtatgcttgatcaaatagttaatgtcaagtgaaccttgcaactctaggaggtgcgacatctcgatgccttgccgaaaatgggtgacttctggttcgaaggatcagaaccgtttgcaacattcccaattcttggtgcgatagggaatgtgctctctgcaccctatgtttgcagctctgctctgttcagtgggaacgggtcagggggtagatacatcagtaacgggaagttgttgtccagacggcctcgtggaatcgattcgaagaagaggctctggactaatgtccttcttgctcttaatgtcctgtaagtcagtggtcagtttaagtttctgcgacagtagctccgatcctttggtacatttgttgtttaacacccttttgctctcaacaaagggcttatgtcgctcaggtagcatcacaaggaaagcttcttttgtggggagccaaggtttgtgtcttggttggaatttctagttcagttattatgtgctgtcaattttgttaacctaatatagttatggccattattgcgatgaaagatcaacagtctgattgatagagggcaattttggcgtttggcaacatcatctctacttcatgcagatctcacccaccttgcagtatgtttttatgttggagttgagttccattttatatttcatagaaaaaatattagctaacttcctacctgttcggtgttgccataatgatgcagttcaattgtttctctttgaattctattgggcccatggttgaaatgttaactggacctagaagatttcttgctgtttatttcagttcggcactggcaggtgttttttcttaacctcttttggattggatggtagtgccttgatcttaagttatcatgttcttaatcaattcttggacctttaataggttcactgatgagctatcgctgtagtgcgtcacctgcagttggtgcgtcaggtgccatttttggattggtatgtctacttctcctcccacttgtgctcgttacccagtgccagaatcatgttacccctatagtgtggtatagttcactagcaacgtgaaactacaaactactccatccgttccaaattatttgttataagtcaaacataactaactttgaccaagtttatagaaaaattcatcaacatctacaatatcaaattagtttcattaatttctccatgaaacatgtcttcatagtgcacttatttgaacttgtagttgtaaacatatttttttttttctgaaaaattggtgaaagttagctaagattgacataggagttatgacaaagcttaagtgaactacaacttgaaacggagggtgtaattcttaacttctaaatggctggtatgatatttctttgtaactcctcaaaattgcacaacttgactgaacaggccggatacatgattgattttgtggtttctatttctgcattccacagtttttttttccttatgtttaccacattcatattttgtgaacaaagtcttggtcttgtcctattgaaatatgaattccctgatacaactgaccatgaaagtgttcgcatcaactttatctgcatgatcaggttggcgcccatgcagtttatatgtggagacatagaagattctttgggaattctagggagagtttagaacatattgggcgtgtggttgtcctgaatatggtattgctccactttttcctgcctatttcatttcgcctttgtttaaaaaactttctttgttccatctgcaacatttttttttgttcatagggtatgggcctcctctcaaggggaatcgataactggggccatgtaagtctctcgattttctacgcagttcattttacaatatgagtgatttagctcattagttcacttgaatactgcagctgggaggcttgcttggcggagttgccatggcatggttcctaggtccggcatggcaatatcagtatgtggcaaaggatggtagagcggttttcaaagacagggctccagtcctccgactaataaaggggtagacttgtgttgttttgtatgtacttacgagagtattcgtgaaaataatgtggaagagaagcaaaagggagaatggtgaagattcagacataggccgagcaaggaagtggcagaaaaaaaaacttttaactagtttgggtatcgaaacatttcattgcagggctaattgttgaggaaacacacacgaggagcttattgctttgttcggatcgtggcaattgttaaatcttcaaagccgagacgtgttgaggcctgtcaattgtattttcaggtgttccagcccttaacacacattttgtactaaccttaggatctaccgtcaagttctgacctcggacattgactgttactaggtttcttctggtcctgtattgcacgagatgataaaatatgtaaagagtgttctcagcgaacagcgatccataagtgattaagatatttgttgtaagaacatatgtttttgccccaacaagattttaggaccagtgcaaaatactcagcttggaagaattcacagggcgtatcagcatgtacgtcaattcacaaagcacaaggtaatgtgtcactgtaagcatcattgaatcaacgccagggataaacttacacttcgtatcttctcttagctttatgtctagacagcaaagagactaaatcagcattggttaaacgctcaacgcacaatagaacaaatggaatcctgctgagaagttgtatgttgtattatggatttatatggtcaatacgttacaagaaagtaatattgcagaacgtggacccaagtaacagagtccttacattctcctctatataagctcccgacccttcggtgagaacttaaaatttgatagaggcatagggcgtagggcagccaccttcgtggcgtaataccctggttaattagcatgatatagacctatatctacagttaacctgac

SEQ ID NO: 4131 - DNA, 3973 bp, Sorghum bicolor
tagttgtgagctcgactcggtggtggtggcaacggctatgcttttatagcggtgatatcttctattgagctaacgatgcaccttgtatcatctcttggtgtctaggaaagtgtcacaaacacaacaatggacatagtaagcaggtcagatataggggctgaccaaacaccacacgccacacccgccaaagttatggtgtggtggcaaggaaagtggctaccacacctacgacgaaaaccaacacacaaatcaattgtggctatcccaatctacacgcaatccaaacgccaactagcataaccaaacaaccccataacccgaaggagaaactatttaggacatgtttggttgccactcataatttgccatgcctaaggttatgcgtttgccatacttgtggcttgccatatattgtgataaaattggattgtttggttcatcactaaggtgaagcaaaaattatgtggttattaatgtttgaatggctacatatttgataaaaaagttatagattgccatatacagttaaaattatattatgctaaactagattaaactagtagtaagtaagaaacaatagcttaaatataaattgtgctgaccatctttaaaaaaattcaaacaaatgcttatctttgaaccatggactggatatgtccagctcgatgcttttttccaaatggatagaccaactagatgatagcgacgactcttgttgaagctccttcagtctccatactcgcgctcctgagtccgtgttcatcttccctctcgccatccgctctcctgccaacgccctctcgatcgttgttcatgctcccatcacccactcgcccttctgtgtcacatgctaccgctttcgtgtccccatagccaagggtgaccttgcgatgggcttcatgtccccgcagcaaaggcatgtccgggagtcgagcatgttatggtaggagggatacggcagtgcagggctcaaacgatggcttgtccacggagtaggactgtagaaggtgtggcggcgaagcaatttgtggcagagacggaagaaacataggccacccacatttgacgcaaaaatatacggtaaatgtttctctcggttattgcaagtctaactttagagatgtttgtggcagccaactaaaagcccttatatattgcttatgatctacctatagtgttactagtacctagaaatcttttccataaaaatcatttctttagacattcattgcacgcaattactattattaacaactgcttttacacacattgtgccggtgccctcaacgacggctttggtgctaggctgctaggtaccactacactacggccttgtttagttcactctgaaaatcaaaaagttttcaagatttcccgtcacatcgaatcttgtggcacatgcatgaaatattaaatatagatgaaaataaaaactaattacacagtttagctgtaaatcacaagatgaatcttttaatcctagttagtccatgattagataatatttgtcttaaacaaacaaaaatgctacagtaccgaaaacttttcacttttcggaactaaacaatgcctaccacgccatgacgccagggctacacaaactgacaccaaacaaatcaacgcggacacccatgagcgccagagtccagagtccagacccagaattccgacaagcgacaaccaatccagggccacggcccagacccatgattctctgcttgcccgcatcattgctgcagcgccgccgccaacgcggaaaaccgatgcggaaaggaaaccctcagagctggtcgcctcccccactcgtttcaaattcgccgaatccctgcgaacggtcgccgaaatttcaaaatccaccttccaatgagcgggatcctcccccgtttcaaatttcaaacccacccactcccactcctcacgagctctcccatctatacaaacctacaacatcccgtccctttctgtgctggggcctgcctctcgtcgagggaacgccgcggatggaatgggacggcgaggtcggcatgaactccgtcccggacggcgtcgtgcagcacatcctgtcgatgctcagcaacgcccgcgacgtggccgcctgcgcctgcgtctgccgccgctggcgcgactgcgtcccctacctacccgcgctcttcttccagcggaacgccttcgacgcggccaggggcgccgcggacgacgtcatcggccggatggtggcctccgtcgcgcgcctcagggagctggtcatctactgccccttctccatggcgcgcctcccggcctggctcgccgcgcggagcgccacgctccgggtgctcgagctgcggatggacgccgccgccgacaaggtcgcggaaggtgggcacctcgactgcatcggcctggctgcgagcctggaggagctcaggctctggggagtgtctctcattgccgcgcccgcgtggggccggatggagcggctccgcgtgctggaggttgtcggtgcgccgctgcgggatagcgctgtgagagacgccatcgccgcgtgccccaacctcaccgatctgtctctgctgggctgcgactgctccggcacggtggctatcgaccttcaactgctccagcggtgccggctcgacatcgtcggcgccggcaactgctcgctcttgctcaccgcgcctcgcgtggagtccctcgagatccagggcttcagctggatcactctgcgtggtggccacagcctccgccgcctctcaattgccaagagcagcggtgagccacacgcatctcgaatcttggtcactttttagtcagtttagcattgccttgaccttgacgtgatgagaaattatgcgatgggatgatgcagggagggttcacaaggtggatactgggaatctcccagatctggatcacctctctctgcgcggtgttcagtggaactgggccgcagtgagctcggtgctgcagtgcgctagcgaagtgaagcatctagtgatgaagatagagttctgtggggacttggacgcactccagccgttcccggaagtcgatttggttgacttcttcgacagccacccgaagctccgcaaatttgagatccatggtgccatgttcgctgccctgtgtcagaaaaatagcctgaaaaatgtgagtgggctgtcgttcctatagtcgcattgaaatatggttcctaatttcattggtatgctagatagatgtgccatatagctaattcgtttggattgtgcatgcagttgaattccaggttcatcatcccttgtttggaagaggttctgatcactgtacgctccccgctcaatgctgaacagaagctgaacactctcgagtcgcttgtgaagtacagtgtgaggctgcggacgatggtcatcagaatctcacagatgaagaattgccatgaagctgctgatgagttctttgaggagatatgtaagttcaagtacatgaactacaggaaagtgcgaattgaataagtggaggtgctggttttgattcttaaagttaatttgattgagaagtagaatttttttgtttcattccagaataattttactgtcattattgatggaggatccattttcaaccttttgagtggtttgttaagtttctttttgtatcatctagtctatatattgagtactagagggagtttggaacaatttcattgagtattgtgcctgcaaattgttgttgtaaccagtctttgttgccatagcaaacatttcatctatgaacaatttcaaccatgaacatcagtgttgcttactgttcactatctttttttttgaaggatgtttcttcttattattatgaattatgacatattgatttacttatttagatctatacatttggaaactgagacactttattttgtagttgtttattttgcacaacattttgagtgcttgtgtggtcaatgtggattgggttctcatatatatattttgaaaaagacaagtattacaactcc

SEQ ID NO: 4132 - DNA, 6418 bp, Sorghum bicolor
agtcttattttcaataatgatgtgatttagaaaaaaaatagaggggtatttaggttacttttcatagtaacatatatgggtgttatattagattatttttataatggcaatgttaatttagaaacaaattagatacaatggtattgctactaacaatgaccaaacctacataaacgacttgttcgtttggctgataagacatggtagaaagtattgttggttgttttattgtgagagaaaaacaatgctaaaaagttgcttcttttttaggattagctcgtcatgtgaggatcaatgtgggtgctctaaaagtaccctctaatcagtaagaactattccatcaaatcatgctcatgctcttgaacgagctactaataatagaagacataataaaatcaatcaaaaaatttgagacccatagtttatcagaattgcttaattattttggttctctcacatttgttctacacaataaagtagcctcgtctctggaatatctgcaccattgtcatcaatctagaagagatattattattcttaaatcgaattttgaaaagacctttgataaagttgaacatgatttgattaagataatggagcataaaggttttcctgatagatggattgcttggatgaggctgattttcaactctggtatcagctgtcatgtttaatggtgtatcagggaagattgcttggatgagactgatttgagagagaacaatgtagcaagtacggtagctacacagtactttgagagagaagaataagcgtctgcagcaggcgcaaccaactattcttgcagtatgggtagaatttctagaggttattgcatgacacagatcgaggcgcccaataaccttgtgtgataatattatgaagtctcttgttcatactatggagattgattgccagcatcactcgcccattagtttgggtcaaggcactccccattcattagctatacctatgcttatccattttactttctttgagagacaaactagtcctcattgtgttaaagcgcacagcggttcaggagaaagtttgcagcatctcctgtgaatgcgattagagttccatatgatacctctttttgtgagtggtatccgctaggtcgcatggttatcctaagagatgaatctagaacactgtctgttcatttgtcttatatttttctgtcagatagtagtgttttctttcacaataaatcagcgaacaatattttcagtcatgacttttcaaacaaggccttgtttagttctaaaatattttgcaaaattgatactgtagctttttcgtttgtatttgacaaatattgtctaatcatgaactaactaggctcaaaagattcgtctcgtcaattcataccaaactgtgcaattagtttttatttttgtctatatttaatacttcatgcatgtgtctaaagattcgatgtgacggagaatctgaaaaattttgcaaaattttttggaaactaaacaaggcccaagtgaataagagttgagtgagcctcggggctctagaattgattttctctcctcttccacgtagtttcacagttgatttttataaccttcttcaaaattatagtgagatatgctgattaagcactgcattactactcttttttttcaaagctgtacctgtcatacttgaagtgaaacctaccactctgttcccatcgaggaaccaggagaactgacaccgggtcccacctaacagataagccggcagaggccccacatggcagcaacccagcaccagctgctcccgggctcgaggatatttttgtccgtatgcccaccatcccagcaactgacggaggcaaggccaccacgtggcgacacatggttggctgctcggtcgcgtgctgggagaccacgacctgtgagcgcgccacgtcctaaccactcgacggcgcactccccgctccactgcgctgcgctgcgcccccaataccctggatcccctgcgccgtcttcctctgctgcatcattcgcaatctcaggtcacggaactctacccactcgtcagcaccaagctacagctagctagtgctcgtgcctttccgacgagaggcgcatgtgactcggtagcagtcttgaggctttgagctctcctcacctggtgtccatgtctttttggtgctgagctgagactgagagacacgtaaggaggaggacgagggagggagggaggggatggagttcaagaactgggggtcgtcgtcgcagcgccggccggcggtggtggtggacgaggggcaaccgttggcgagacaggggtcagtctattcgttgacgttcgacgaattccagagcgcgctcggcggggccgccaccggcggtggcggtggcggtagcggtggcatccccaaggatttcggctccatgaacatggacgagctgctccggagcatctggaccgcggaggagacccaggccatggcctccgcctctgccgcaggagcgggcgcggggatgccgctcacgccgctgcagcggcagggatcgtcgctcacactgccccgcacgctcagcgccaagacggtcgacgaggtgtggcgcaatctcgtgcgcgacgagccgccgcaggcgcaggtggcggacggcggcggacaccaccagcagcaccgccagtcgacgctcggggagatgactctggaggagttcttggtcagagctggcgtggtcagggaaaaccccgctccagctcctccagcgccacagcccttgaccatgatgccgccgcggccggtacctgttgcccctaaaagctccgcctttttcgggaatttaccgggcgccgacgacgccgcagctgcggcagcgctggggttcgcaccggtcggcatgggggatctggccctgataccgcccagggcggcggcaggcatgggaggcagcgccatggctgtgcaaacagcggtgaatcagcagcttgattctggcgggaaggggtacagcgacctgtcgtcgccaacggagccgctgcctttttcatttgaagggatgattcgggggagaaggcatggaggcggagtggagaaagtggtggagaggcggcagaggaggatgatcaagaacagggagtccgccgcgaggtcccgagcgcgcaaacaggtctcaaccttttgtactgaattcatgcatgtcgatgtcttactaatcaagccattcgttagtgaaagacttcaatcttgttggtccgagagtaacatgttacgaaaattttatccgaattaactcagtgtgcttcttgacgcgtgacgtggtgaactatatcgattatcaattgcggttgtaattcagcagcttgattctggcgggaaggggtacagcgacctgtcgtcgccaacggagccgctgcctttttcatttgaagggatgattcgggggagaaggcatggaggcggagtggagaaagtggtggagaggcggcagaggaggatgatcaagaacagggagtccgccgcgaggtcccgagcgcgcaaacaggtctcaaccttttgtactgaattcatgcatgtcgatgtcttactaatcaagccattcgttagtgaaagacttcaatcttgttgggccgagagtaacatgttacgaaaattttatccaaattaactcagtgtgcttcttgacgcgtgacgtggtgaactatatcgattatcaattgcggttgtaatcagagtcattgtacaacaggcaacctgagctttctacttactgtgtgtttctttaaagcagacaatttttcgactttcctgtttcggtaaaagtttcttattttactgcataggcttatacaatggagttagaagctgaagttcagaaactcaaggagctgaatcaggaactggagaggaaacaggtatcttttctaattttctctgcacaccatgcctagatgtaaactcaaaacgtcttagtaatttataatggagggatacttcttcagtgcattgcctctcgagatgcatttatttttactcattctaaaatgggtggtttcagcatgcaccatgttgctggcatcaatagagttcctgtgtatcattcatatctagtctactcctgtattcttcagcgtgacagctgcggtacagtgtccatgtgttgtggcgcaccgaaactgtgcatttccaaaaacaaaaaagatgcaccctgtacatgtctggttatcaataatatgagcatctttcagtacatcatggaccatgttttgaagtgaacattaccaaagaaggaacacaggaacagtttttcagcatataaataggcttgacatccggaccacatttcacttaggttatgctgaagacttttaagaataggcacacattcttgcatcgcagactgtcctttggatgtgctcatactactgatcattcatttctttataatgcaggcagagattatggaaatgcagaagaacgaggtaactgttaattccaaacttcctatgtttgactcctgtacattatcatgacgctctttccagtttgctaaaaatttggcagagaaatattcagcctgtaagcatactacttctattactttgccaataaccaaatgaaaggatgggatgaagaaaaatccatattattcaagtatactccattagtcttgcattgtgagttgctagctgagcaaaccaatcactaaataacttggttgtaggattcagtaagggactcacacttacagagtttctttctattctgcacatttaggccttgtttacttcccagaaaattttacaaaatttttcacattccccgtcacatcgaatctttagacgtatgcatggagtattaaatatagacgaaaataaaaactatgcacagtttggtcgaaattgacgagacgaatcttttgagcctagttagtctataattggacaatatttgtcaaatacaaacgaaagtgctacagtgtcgatttcccaaaaattttcggaactaaacaaggccttagttcaacttaacttcaaatatactacattacccttgtaccctactcagcctgagttcatatcgattatgattctctgttactcaacaaattataattttctttatccaaagaaaaaatttgaataaagcttttaagacaggtggctttgatagatgtgtggcatcttaatattatgggggcttcatgacatgataggatgaatggccacccttcttttctgtttccctcctgtttttcctctctgtatagtgtgagtgttttgtaactatttggttttcggagttttccttttacctcctaaaatattttactgcagatatttgaagcagtttacattttacaaatatacaacatgttgctaccagcacgtatataattctaacttttcataataacccacctgtttttgcatttggtaatgatgattacaaattttgcccgacagacaccagaaatgttgaaggatccattcggacggaagaaacggctgtgcttgcgaagaacactgactggcccttggtgatgattgtctgaaacagccgatgacttgcagttgctacatacctgcagtggtgcttgggatctgtacataatttctcccctatagactagcgatgaacatagtcggaatgattgtactgttagctcccttccgccgcttatgtagtgcagcagtaccatagtggcggaatcgaaaactgacatgtagattatgttagtagagttgcctagctttgcatcttgccagaacatcgtattagagattggatgcttttaaaagatcggtgactgggtgtaagtagattgatgggatccaagcatggcagcgttcaggatgcagcccggcttgacgactgtatatctgatggctatagagctgtagtatatgcaaactgtcccgccgctgcttgtgtgtaatggtgaaatcagaatccattatctgtatacttagcaaatatactcacaagaacttctaataccattcataaaaactattgattcaaaattcggccatagctgaaaacattcataaaaaattagtgccctgctgtagatgtgatggcgctttttattgtgtacacaacctctatagtccatacaatatgagtgtataataaaaccatctgagtgtataataaaaccattgcatcccatctgttgagctagcaatcattctttagtgatatcacttcttccacaggtgcatctacaacatgttccctgtgagtatacgagcatgctataaaggccccatttgaatctcttataacgacacctgttcctccattctaaactttcattgatatttattaatatctttcttactattggtttttttttctatcccactctttatctgagagtcctttttaggctgctggatcgctataaatgggccgacctgacattgctccagataccgcaagcagcggaccgtc

SEQ ID NO: 4133 - DNA, 5416 bp, Sorghum bicolor
tattaaatatagatgaaaataaaaactaattacacagtttggtcgaaattgacaaagacgaatcttttgagcctagttagtctattattggacaataattaccacaaacaaacgaaagtgctacagtgtcgcgaaatatttcccatcgggaactaaacaaggccttgatgttgtaccaatatcaagcaaacttaccctcggcaataaaactactcgaaattttcaccaaaatctgatcaaacttttagagtttcgcccatgaacaacttctaaagcatttaatttatagaaacgtataatgtagatttttctttatataagtgcttttgttgtctcatacttcatccgttccaaattttaagctcttctgtccttttaggtgcagagcatttgatatgtatcttgatatgttgtatctagatgtataataaaactatatatctaaaaaaatcagaacgacatataatctaaatggatggggtagtatctatatattgaatattatataacaacatttagataaaaaaaattacacctaaatcgctatttttgcccgaatagagcgcaactgtacactacccaatgataattaacatttctaatgcactattataaacatgagaatgttgttatgtataacattgtcaaaggcctaaaatcgactaaatctccaaggacctcaagtatggatagatcacacagatcataaacacgaagctcacatagttttatactagttaagacatataagacggagtaatatactctgtgtcttgagcttgtatattagaaggtggagagtaagatgcagagatctaaacctgattacaaataatgctagatatagtataggcgactactgtctagagcttggtgaaggagagaacaagttctatggtaatttagaaggtatatatctcaacaagttctatatatggtgttcaacataaataacataggcgcagctagtgatagctttggagcaattcactgtttcttattctgtgaatccttgattatccacatctttcaaataaaagagaaaagcgataagtttccagtaatactctttggtaaacaacaatggcgttttaatttccacagatcttaacaatgtggatttccatatctcaaccgatgagcaagtaaatataggtagtgaggcatgaaatttatttttgatgagtttccagtcatactctttgataaacaacaatgggttgttttttaaatttatcaaaatgaaaataattaaaaccatgaatcataagggttgtcaaaatggaccttttatgcgtatcccatatcattttcggatgacttatcaaacaacatttttttcatatttgtggtcagtataaaagcacatatgtgatttattaaacaaaaatgtttagaaacctaaggactatgtggggacacaaggaagatctagccgattccaaaatattccctccgttccataaaggttgtaattctagttttgtcttgagttaaatattgctattttctgagtcaaaaaaatattgctattttctatcatcggttcctataaactcatgtaatttaacatctgaattatatattatgaaagtatttctagttaacctaaaaaaataaatcttatgatagtaataaagtatacaaatttgtacaaattgatggctgaaacagaaatgttttacattaaacaaaactaaaacatcatatcaaggagtgttcgcttcaattgatgcgcttttggacaagcacatgcttaattgctcaagccgagctagaacttagggggtacttagtaaggcttctccagaaagatgcggcttcggtcgtaaaaacagcttctttacaaaatatttagtaaggctctttcaaaagagccaaagtcatcatgaggagtcctaccaaagagatccttatcctccacataccggtcttgactttaacctatgctcttgagacttgccagcagcgctccttctataaataccacgcaaggcgttgcctcgacctccaccattcgaaagatccgtccatccaagatttttcttctctgtccctctctcgcgcgcgcgctctcctcacaacacacacaagacagtctcgatctcttctcctcctagccaccaacatataaagcaagctctcacacacacacagaacccacaagctcaaaccaaaactcagcggaacgacagtctgcaatcgcagcagctgatctgcttctaagcatatcagttattggatggccttcttcttcatccttgcttgcaccctcatttttctagccatcgcctactacttccagtacgcacgctggcagaaggggagaggccgctccggcggcggccatgagaagcaggcttcttcttccttgaagtcgctgcctcctggctccatgggctggccttacctcggcgagaccctccagctctactcccaggaccccaacatcttcttcgcctccaaacagaagaggtacggcgagatcttcaagacgcacctcctgggttacccctgcgtgatgctggcgagcccggaggcggcgcggttcgtcctggtgacgcaggcgcacctgttcaagccgacctaccctcggagcaaggagcgcatgatcgggccgtcggcgctcttcttccaccagggcgactaccacctccgcatccgcaagctcgtccagggcgcgctcggccccgacgcgctccgcgcgctcgtccctgaggtcgaggccgccgtgcgctccactctcgcttcctgggacggccatgtcaggagcacgttccacgccatgaagacggtaagcaagcaagcttgcatcgccaatggtgatgtccgtaatgtcgaatgaatcggatgtctgagaacctcttgttacgtttcagctgtcgtttgatgtgggcatcgtgatgatcttcggcggcggccggctggacgagcggcgcaaggcggagctaaggaagaactactccatcgtggagaaggggtacaactccttccccaacagcctaccggggacgctctattacaaggcgatgcaggtgagcacacgcaacgcaacggcatgcatttacagcacagctgatctctagtaccttctggcgtccccgtaccgtacgccttggcaacggcagtgccctgacatgcatgcatgatgtgaaaccgtggaaacactgtaggcgcggcggcggctgcagggcgtgctgagcgacatcatgcgcgagcggcgggagcgcggcgagccgggcaccgacctgctgggctgcctgatgcagtcccagggcgacgacggcgcgccgctcctgagcgacgagcaggtcgcggacaacatcatcggcgtgctgttcgcggcgcaggacacgacggccagcgtgctcacctggatcgtcaagtacctccacgaccaccccaagctcctggaggccgtccgggcggagcaggcggccgtccgcgaggccaccgacggcggtaggctgccgctgacgtgggcgcacacgaggagcatggcgctgacgcatagggtacgtacgcgcgtgctggaaaaaacgcaaacaaaacctctgacagcgtgtgttttcggatatcttgtggttactgatggcgccgttattctgttcaggtgattttggagagcttaaggatggcgagcatcatctccttcacattcagggaggccgtggccgacgtggagtacaaaggtacgcacgtgcgcgtacacgcatgcttctgcagctagcctgtcgtctgtggtcggcgtggagctacgtcaccgtagaggcgctgcttggcactcctttttttctgcacgtagcagcaactagctagcaagaggggtttaattctgactcggattcttccttgtatttcccttggcgtgttctagggttccttatccccaaggggtggaaggtgatgccgctcttcaggagcatccatcacagcccggactacttccaggatccacacaagttcgacccttctagattccaggtacagtatccggtctcgatcctcaccgttgctgtagttgacgttgatgctcgcaatacgttgctgatctcagcctcgttttttttttctgtggtcgtttgtggaacgacgacgttgcacatgatgcaggtggcgccgcggccgaacacgttcctgccatttgggaacggcgtgcacgcgtgccccgggaacgagctggccaagctcgagatgctggtcctcatccaccacctggtcaccgcctacaggtgcgttcatctcctcgcagcttctccctatatttccgcttgtacatacccttgtgcaccaggacgacacatatggctggtgccactcgatccatcgcccactgcacctctcctcctatatgagcatcatcgtcatcagcacgtgggagatatatactgatgagttttcataacgacagtttgagttgtttatatatatgttgatcgatcttacttacatacactgagatactgattggcgtgtgcatgcttttgtttaatttgcaggtgggagattgttggatccagtgatgaggtcgagtacagcccattccctgtgcccaagcatggcttgcctgtcaaactatggagggagaacagtacggtggacagaaaggggcgtcagaccgatgacgatgatgtggaggatataatagtttgacttaggcattaatttaaccaagctagctagagatgttttttctttatttcttgtttttttttctttgctcgcccttctcctcaatcaaaaatattttgaaggagaagaaacggcagcgttctcttttcgttttctttggctttccccgataatgatgagaatgtaattaagctgtctggacatcagtggtccagtatcgtcgttgctatatatagtattcatcacccgaaacagggggagcggtattgccccccttttgatctacgattttgtgttgccatcttaattaataaacatgttgaactaaacaattttggggttccaaaattaatattttgctgcacaaaacccaccattagatggtagcaaaactggatttaaaacgaatagtatgtgttgctatcaagtttaataatgtatgattgtttctgcaatttgtaaaacaatcaagttggcctgtaatagtgcgaggagctagtttgcttattatggtatttagattttttatttcaaatatttttttaatagttctctttatttatttgattataatttctttcgatgcacctttattggcatgggcttcaactctaagtaaagagctattgtaatctttctcatcttaattgttcttttttttctattattatcccatgattgcgcagtttcagcagatgccaaatcaagtagcctttggtctcatcttagtgagctctattagccatgaaacgacttttgaagtctttatctagttccttattag

SEQ ID NO: 4134 - DNA, 3284 bp, Sorghum bicolor
gacgaggagatgaagaaagttttcagcatgatagctggccaatcccacgggaagatcagcaagaaagacctgcagctgctgctggagaggttcgggaaggcggacgccgccgccgaggcccggcggatgatgtgcgtcgcggaccacaacaaggacgggtacatggacctggaggagttcatggaggtgcaccggaacggcgtgcagctcggggacatccgtcgggccttcttcgtgttcgacaggaacggggacggcaggatcagcgcggaggaggtcatgacggtgctgtgcaacctcgggcagagctgcagcctggatgactgccggaagatggtgagggaggtcgacaggaacggcgatggcttcgtggacatggacgagttcatggtcatgatgactcgcccgcggaggaagccgtgagcaccgagcttgcttagcttccgtgcacgtcgtgatgtaaatatgccatgcaattcatatcctgaataatatgatgatcagattgaaatcagctatcttctctcctgtcatctgtcactgctctttgcagttgctcgtttgctctgcacagtagaattcccgctgcaacaacagttgcttcttcatccggaagaacacagaatggtagtacacactagcgattacagtcttgtcgatgacctgacaacttgccgtgtctgacgtagagatgaatccaataaagctactgaaacaaataatcggtgcccatgaaactttaaccttttttttgacaaaaatgggggggggggggggggggggggggggttccccaccttgagatcaatataatcgagagttctccagcaaactggagttaacagagatacacgaaagaagaaaatcacgccagccgactgtttacaagagttacattagtaagacgtttacgccaaattaatggagaacttgagttaatgcccatgaaactttaccaaaagtttcaaagtcaatgcaaaggttgtaggcttgtagcgcatgcatggcaagttgaaacctaacacgggctgttatcctccttgctgagttgtcgttatgctcttttttacgttttttttgtagggttcgtttcaactttatattacattttcttattaataaatatatgtactccttatgttaaaaaaaatctaatactccattaatttgttccaaatggtaaattgtcttggcatttttagttacatatcttttaattgctatggacatagatatatactatatcttgatatatatactatctctctagaaaaatattttcttttatattaatatataatggaaaaacttttgctgttttttcttataataaaaggataaaatgactaataatttggaacggaacagagtgagcacaactttcttcaagcagcaccaagccggtaccacgagaaaaacaaagcgtgtacggttgcagagtttagacgagagggcaataatgcaaggcctttcagcatcctattccatctccttttaacaagatagcactatacagtgtacagtatgcccgattttcctctctttgcagattccaactgcacattgtgcggctgcctgtgcatggtttacccacgacaccatcaatcagcttgctggatgatgaatgcagaagctcatatcttcagcttttaattttgttctttttcagccacttgggtgcagattcttgctccattcaacgagtagtgcacgaggatctagacgcccccatctgatcggcgcgcgatacagatgccgttgtgctcttggacctggcagtggcctatttgtcgaccaccaaatctgcgtagagaataagctaagcagcaaaaggtgccaacaaagctagctaggcaggggtaagatacaatacaagccgtgataaacgttacccccagaaaaaagtgacggctgcaggtgttgtatcgcacgcaacagccttgccaaattggcttgcttatataagagcaataggtctcaacaagttgctgcacacacacacatacaggaagaaaggggtataggtcatttgcagaggagctagctttttttgtgctggtagtgttgtgagacgctcctgctgctgctgctgccgccgccgccgccgctcgaccgatcgatggcgatcaagagcatgacggtggcaccgacgacgacgcggtcgctggacgcggacatgacggtggacgagttcaaggagtggctgcggcggttcgacacggaccgggacgggcgcatcagccgcgaggagctgcggcgcgccatgcgcgccatccgcgcccggttctcggggtggaggagcaagcaagggatcagctacgccgacacggacggcgatggctacatcgacgacagcgaggtggacggcctcatcgagttcgcgcagaagaacctcggcctcaagatcgtcgcctactaatcttcgcatccggcatgagcttgctacggcgggcggcgggcgctggctcgccggcgacaactcaccagtcaccatcactctccctgctgccggctaaaataagaacggcttcatctatcgcttgtctgttaaaactgctttctttgtacttagtcaattcgatcagggcatcaagcatatgcactagctctatgtgtcgttgcgtgatctatgtacggtgtgtatggtactcatgcgtggcagcctgcctgcctcggcttgcatagcctagctcctccggccgtgccatgcatgggtgctgtggatgttaatttgctccagtgaaattgacagtataatgcttgaccatcccgtgtactcccggcaaaatattttcctattttgaggatatcattcagttacccgtgttttgctactcggttaaagttgtgtgtactagttagctccagtccatgctgcttagccttcgttgttgtcaaaaaaaaaatgctgcttagccttcgtcagaccgtgccaccgccaagttattcgggctacagttgccgtttcttacgatatggtgttccatttccacaccgcacggcgcacgagctgtaccttgccggagatgtacgcaatagctagccttacgcgttgaccactgacctgaacatttgtgatccacttcagtgtcgacgaagcccatttgtcagtggaaataatctttctttttatgacaaaagacttcctacgtcaggcgtcatattacctgaatttatataaactgaaacaagaacaaaacatgatatccaaaaaagaaatttataataaaatttgacgaagccctcacttccactacttctgttgcaattgcatgcaaccatga

SEQ ID NO: 4135 - DNA, 3488 bp, Sorghum bicolor
tatttacgaaactaaaaacataggtagataataatttataagacgattttttttaaatttaattagtttatgattgaacactgactactatagttacaaatgtgctacattatatattaaactttattcctttcaaccaaacacctcctaatccatgtccaatcattgctctcttcttatgaagacaattccataaataccataataaaatatattattttttatgacaattaaaaaggtattgtgatctttatgctatggttttagtttttcttctctttactatcattgggtcacgtctgttactcagggtctatttggatccaaaggctaattgctagctagctaaaaactagcacagatgcatttaacggcttgtttagattcattagcactaaaattagcagtacttggttgagtgtcataacaatagtaaaaaacattttttttctatcttatgcaatttataagaagtttctagagagttgcccaaactttggcaaaaaaaaacattagtatgccaattcattgacaatgaacccagtggcggatataagcctagggccaatatggccatggccctaggcgtgggaaaaaacactagagtattctctttgttttttccagctaaatatatattagcatgacttttgtccattaacatgtgacccgatgtttgtggttcatagtattggccctagtcgtgaaagttccctagctccgccactgatgaaccaattgatggttttggcttgccataattttggttaggttaggcacatagaattggaagccaaccaagcagatcctatggtattatttttcagcactacttcaacagtacttgcatcaaaggaatagtgtacaagaaattagcataagcagcagtagccaaatttcaataaaacaaacagggccacatttgttttaaaatttatagaagcttagaaatatttttgtagtttaaaatctttatcaaatatttactcttttaattaactataaaagttaaaactaccttgaaaaccacttctaacctggttggtaatttaaacgtttgtgggaattaagagggtataagatgtctactttcgaagtttgatgaaaaaaaaagatcatgacatagtttaaggagatatatatataaggcaacttctttttttttttttctttcatccttcagtgcgccaccaaaggttggaattataggcttttcctctatcggagtccaacagtcaaaagaggcccatcgatgtctgcacagtattaagtccgcatgggcccaatgggtcgaaagtgcttacgtactacgggctcaggagtatacatttgccattgtggtccgtcacagcttcgtgtcttcctcgtggaaatttcctcgccagcattctacacggcaatttctacgcttccgccgatggacatggacctctccactctctcacagtctccacatcttcgccttgtttagttcacctcgaaatctaaaaaaaattcaagatttcctgtcatatcgaatcttgcggcacatacattaagtattaaatatagacaaaaataaaaactaattatatagtttactgtaaatcacgagatgaatcttttgagcatagttagtttatgattagataatatttgtcaaataaaaacaaaaatactacagtaccgaaatccgaaatcttttcagaactaaacaagcacaaccagattttttaatttctcctagtagtgtgggattctcctagtgttttagcattcaaaatttagtataaactttttcttgtaaataccttctagtaaggattccctagtgttttgactagtggtagtgatactagaagaactccaaggccttaatatcgaattgcaagtggctttaattggttggctcggtgtcgctaagacttgggcagttgggagtagtctcgggctcttggcccatccgatctccagctagcgctgccttgtccccactccccacctgccgctgcaacctcgccatggatccgagctccgacatcatcctcgacactccgtacttccgcatctacagcgaccggcgcatcgaccgcttgatgggcaccgagaccgtgccggccggctttgatcccaccaccggcgtcacctccaaagacgtcgtcatagacagcgacgccggcctctacgtccgcctctacctcccggacatggctgctaccggtaccgggtcccgccggtcaccgcccaacgacgacgacgacaagaagctcccggtgctagtctacttccacggcggcggcttcgtcacccagtcggcagcgtctccggtctaccagcggttcctcaacgccctggccgcgaaggccggccttctcatcgtctccgtgaactaccgcctcgcgccagagcacccgctgccggcaggctacgaggactccttccgcgcgttcacgtggacaacctccgctggcaacggcggggacggggacccctggctgtcacgccacggcgacctgcgccgcgtcttcctggccggcgacagcgccggcgggaacatcgaccacaacgtcgctatgatggccgacgacgctgccgcggatcgagggtgccgtcctcctgcacgccgggttcgggggcagggagcctgtcgacggcgaggcgccggcgtctagggcgaggatggagaagctgtgggggttcgtgtgccccgatgcgacggacggcgtggacgacccgcgggtcaatcccttggtcgccgcggcggcgccgagcctgagggacctgccgtgcgagagggtgctcgtctgcgcggcggagctggactccctgctgccgagggacagggcgtactacgaggccatcaaggcaacaagagggtggcgcggcagggtggagtggttcgagtcccagggccaggaccacgtcttcttcctcttcaagcccgtctgcggtgaggccgtcgcgctcatggatcgactggccgcgttctttgctgggaaaactgaatgaaattcgtcatgtggatggatgtggctacgagtccacgaccacattgactgagacgaatggaacaaaagaagatgcagcttattgctgaatcgaataattgagctcggccctcgggggaaaaaaagaaacaaaagagaggaaataatgattgagctctgtgtgatggatagcctgtttggctgtttgcttggttgtttcgtcacattgcattttcatttcacatcttacatgattgccaatttatagttgttgtacagtttccagcacggatgatggacgtgactccattttcttttactgaacgcatatatatagccatgcaaaacaacaaccgtcgcatgcaatgccacgcacggagctagtagctccgcgagaagaaaagagtgacgtacgtacaccatgcccaatctactgaccatctttctgatcgccgtcctcgcctccgaccaggtagagcttctggccgtcattgaccatgtcgacgtcgagcaccctggccc

SEQ ID NO: 4136 - DNA, 4539 bp, Sorghum bicolor
taaaaaccagaggtttgcttgaagatggcccattgggctcctttctgaaccaatttaattgggaaggcctcatacgagagatcagacgatccaagcccattgagggtggagttttatcggaccgagaagattgggatgacttcaaacgagcaatcggagcggccctacccattgaggaagaaaatctggggcaagaagtcatcacatgtccccaaccaaggcagacaaagcatgtaatcctatttctgcagctgtttctcgaatgagaaacatctagacatctcgagcaccaagcttggttaagacccgaattgggcatcgcaggaaccgagggcgcacgaaccgaggttcgttcatctctgctagaaagaatatggtcaaaagcactattgtttggaaacttgattcttccaaagacagatattctggccggtggaacttttttgtgatcagatggtggaggaaaaaccttgcgacccagcggaatcgaatttgcacccgagagcagagagctcttaaccacatcagcgaacgaagtctgggaaacccttttaactgctgaccaagaagactcttcttcattaaggtacaaggcaagctccttttgccaattcggcccgccagcaccccataggtggaagaagagcttgaagaggtcacattcaaaggagaacgatcgtccgataaagatgcccacaggcttagagccaacacgaaacttaaaaacacgcggagcaagctgttcaacacagaatagagctgcctgtccaccaatcgtggcttggagaatcgagctcacggaaacctcagaaagatgaaacttgcatctaccaaaagcaaccaccataacaaagccggtagaagaagaccaagaacagcatattggtaaaccaagagctttccaaacatcattctgaaacttgagcccaggtgcaaaggagaggcctgggagctccattgccaacccaaagagcagatcagggtgacgaaaaggactgacctcagcacagaagaagcagagaagcagaggcaagagctccagcaagagggggcgacatgcagcccatcatggcaactgagcttcaatcacggcatccgtgcttcaatcagccttgagagaaccttcctggaacaagagcttcgggggtcccgaagatctccggtagcccccaaagggggaccctgggggaccttcctcttccggcagatgcggggtgacgcggccccgaccgagccgtgcgggcgcgaggtcgccggagctctgtgcgcgaggccgtcgggggcgggcggcgcgggtccgtcggacgccggctgccgggtggaggagcgcggggaggcgcgggacggatggcgcgcggaggagggagccgtggcgcctccggtggcccgtggccgggagcgcttccaggcacaggcggttgcgggattccgtgttttattttcaaagtggggactattcctgctcaagaattccactataaatcaaactgaaaccttctcggacactgttctcacaaacgtaatgacaatcaagaatagataaccatggataaatttataagcaactagtactacaagccaaaaaattgtttcgttcttaattgtatgcttcgttaagcttgtgaggaactcgacaaggttcagccgccgaatggcctagttaattcatcatgggcagacgaaatcttctccaggtctaaaaaatgttgatgctcatatttttatgctcagtacgttcaaacattcccggtattataccccggacggccggacctatataaacagctgccagatcttggttatcttcgcaaccacgaagctgtatcagtttataatcctcaaaaaaatatatgagggacacctccatctgcctcttttttcttctcgtctgcttggcgggatcacacgcacattcgtcacaagaggctcgcctaagagaatttatcctgtccagaaggagcagtggcaatgcgttcggtgtacatgacgagctggccttcatggccactagcatcctgaaatcagagcactctggtactgaccagaacgctcagaaggcggccgacaagattacagtgcttcccggccagccgggcggcgccgtcggcttcgaccagtacagcgggtacgtgaccgtcgacgagaagaacggccgtgcgctcttctactacttcgtggaggcgacacacgatgccgcggcaaagccattactcatgtggcttaacggaggttagagcgatagccgggctgctgcctgctggccggcacatgtcttttctgaaattaaaagtagtcaagaacagcaactcatgttgatgcctgctttgtttgatagtttctgattcttcatgtgatacattacaggccctggttgctcatcagtaggctacggagcaatgatagaaattggcccgttccgcataaacagcgacaacaaaaccctgagccgaaacgagaacgcctggaacagcggtgagactagctataacatcagtcagtgcttgcagtattcttgtttatttccgattgggtatagtaaaactttacacggtttattaagtagtaaagtaactctgattccattgggatgaaaatttgcagaggccaacgtgctcttcctggagtcacctgccggtgttggcttctcctactccaacaaatcttcagactatgataagagtggtgaccaaaggaccgcggctgatgcattcgttttcctcatcaattggctcgagaggtaccctgagtacaaagcacgcgccttttacatctccggggagagctatgccggacactacgttccgcagctcgcagcagccatccttagtcacaatataaagagtaaaagcgatatcataaatcttcaggctatattggtgagtggagactgaagacttctcaatgattagtgaatatcctgatagacatatatttcatcgcatcagttgaggcatcttaaaacaaaattttaggttggcaatccatacctggacgataacaagaacacaaaggggcaaattgactacttatggagccatggggtgatatcagatgaggtgtggaccaacattacaaagaactgcaagttcagtcctgtggatggcaacacgtgttctgatgctatggaatcatatgactctggatacattagtccgtacaacatatatgctcctgtttgcatcgacgaacccaatggaaactactaccccagcagcaatgtaagagcatctctctctctctctctctgatgaaataatgtaagagcttgtttggttacttcgcatgtgtcccaaattattttcttttcgcttatgcaggttccgggaattgatccatgcagcaactactatatcgaggcttacatgaacaatcccttggtgcagaaggctttccatgctaaaacgacaaagtggtcaggctgcacgtaagattgcttaaatgggagcagaacattcaaacaagaaattaaactctttccgcttattactaccaatcctccttatctgatgttccctgttcagagacttgcactggaaagatgctccagtgtccatgatgccgaccatcaaatggcttctgggacataggctaccggtgtggctatacaggtagcttcaacgtcacatttcttcattaacgtctaacacccgcaagtttgcaatgagagatgtaacgaagggaatacgttttcagtggagactttgatgccatctgcccactcaccgccacaaggtactccatcactgacctcttgctctcagtcatggagccatggcgcccgtggacagcaaccaaagaggtaataacaccccaaatcctgtcctggacttgtttctatcatttttttattcaaactttcacaaacttgtgtggatcctagcaggttggaggctatgttcagcagtacacgggaggtcttgtgcttatttcagtgaggggagctggtcatcaagttccttatttccagcctgagagagcactagtactgctcagatctttcttgaaaggaacgctcccaccttatgtagtagagcagtaattttttgttgagtaacccctgtaggaagctcctagtgttgatccctgttgtttgtcattaatttcaaaactgtcatggtaaaaatgacaatctatcaacgctgctgcgaacgaattcatggtacattgtagagagggagggggctgctagaagctaatgctgaaacaaatattaaaaatctacacaattgctatctagatgtgcatagatttctatgttttgctgctatcactgcaagaaattaaggaatctatgacgacatgtttatgtcataaatcctgaaaagttcatcatattgatgaaatttatgactttgttacagatcatgtgtgttataccatgttttacaatgcaaacatgttttttcatcgtagattttatgatgatccttagtgtgtcatcattaatttagatatttgatcttcatcacaattttattttaaaaagtcactaaatttcttaaggttttgttagccatctgtactgagcaagctattagt

SEQ ID NO: 4137 - DNA, 3979 bp, Sorghum bicolor
agccataaatatgtaattctatgttgtagtaatcgtgaaatgtacatttaacaactcatatactaagaattcaattaaagttatacatttgtgtaagttgttactataggtaatcttacacatttttgaattattatgacatatctatattggagtgcaattgtaatcacttcttttgttttaaaaatactaatacacaaataatgctttgaggaaaagattaacatctcgagtagtgtggaccagatgtggtcatggtcacgtgggttatgaaattgtttagtttagaaatttagcgcttcaattagtaatagttactatctccataaatcttttaaaatgttttaattttgtcctaacagattgacaaagtttataaaaaagaatacaaatattttatcaccaaatatgtatcataaagtaatcataaaatatattttcatagtatatctatctgatatagtaaatgctgacaatattctctataaatttgatcaaacaagatagtttgagttatgacaaaagttttttttttgcgaaaggagttatgacaactaaaacatcaagtttttgtgatggaccggaagtagtagactgcaagagatattaatagtcaaagcatatctatatatatttattttaattttgtatgaggtattgaaagagaaattgatggtcaaaacgtatatttaatgatttttaatctactgttaataaaatttaaaacaagcggagggaatataatgggtgcaaggacttgccgacgtagctgatggacaagagtggaacgacgtttctacacttagaggacatgcttttgatcccacatatgcataactgatacacctatactaccttcatcctagaaaaaggatgtgattctagttcagttcttataatcatctaaaatgtgactatatgtgtatagagaagagttatagattagctagttgggttttctatggtggaacctgtccacatagatttaagtgcctgacttaacatgggtacattcgtacatgtatagagaagagtcatagatctcagctagttgggtttcttgtggtggaacctgtccacctaggttcaacttcctaacttaacatgagtgctcgtatttttttggatttattttaagatttaacggcgctatactttcagcggttgacgacgtgctcgtcgacaacgaagcgtctgatccaactcgatttttcggaggtgctcataggggtaagatgtgtgtgtgcgcgcgttcatagtgctcatcgaggtaagatgtgcgtgtgtgcgttcataagagtgagtgtgtgctcgtatatacgagcgtctgggtctcgcaaaaaaaagaaatgtatcaatctatgaaacactatagatatagtataacaataattttaatcataaatatcgatacttttttataaatttagtttaaaaaattaagatggttttgttggaacgcatggaggtagtagtttattcctcccattctgagcctctccgtttcacaatatttttgcagaactcgctgttttcccagctgaagctgaatagtcccgtgtctccatcaatctgttccccctttgcccatgccggacgccccatttttggcgccgctgccaggcgaccgaattatagcctaatcacaccaaaacccgctcccttccaaaccctcccatcagccaatcttatactagccgaccgagaccgaccccctctccctttggtactctcgttgccattcccgattcccgaacgcgcagcggcgcaggcagctgcgttcacgtgtcccaccagtccagccccgtagcgccgtccagctgctacaagaagccgccaccgccacaaccaccgctccgaacggctcaccggccgggcggcggcgatcccatgggagtgacgccgaccaaacttttctcggattctagctcgagctgagtctgcgcgctgctgcatgctgcagctgctggtttcttgagaggcgagccccgcctgaagggatggcactggaggccgcccttgtgctttcccagcagcagtcctcctcccagcaaggcagtcgctttgggtgcggtgccatggcagcaggagggccttggagtagtctgttgtttagtggaatagaggaggtggtggagatgggtggcgccgccggcgccgccggcagctggaacgcggccgcgtgctcgccgccgcagctcctgcaggagctgggtgacaacacggctgccggcgcgctgcctgcggcgtccgggaggtgtgcgagtggcggcgccggtcaggatgccccggcaccggcgcccggaagaaggaagcggcgcaggatgaggccggtgaagaacgaggaggaagtggagagccagcggatgatccacattgccgtggagcgcaaccgccgcaagcagatgaacgagtacctcgcagcgctccgctccctcatgccgccggcctactcgcaacgggtaaccgacgagttccgatctccatctcccatgcacgccctccctagtcctggcaataaatcaatctagcatgatgcgatgcggccaaataattaaactgagcgtgtgtgtgtgtgtgcagggcgatcaggcgtccatcgtcggcggcgcgatcaacttcgtcaaggagctggagcagctgctccagtcgctggaggcgcagaggcgttcctcgcagcgccctgccgacgacgtcgatcccgacgacgcagggccgttcgcggacttcttcaccttcccgcagtactcgatgtgcgctgtcgtcgcgggcgcggccccagagaacaagaacgccgaccaccgtgagggcgccggcggcgccgaggaggaggcgtccgggtcgaagccatcggccgtggccgacgtcgaggcgaccatggtggagagccacgccaaccttcgggtgctgtcccggcgccggccgaggcagctgctgcggctggtgctggggctccagggccaccgcctcaccgtgctccacctcaacatgagcagcgccggccacatggtgctctactcgtttagcctcaaggtactccatccacaactttctttctacattacctcgtaaacaattacaatcacaggcagctacccgatatagtagatatacatatactccgtacatggctctcagtccaaggagtatagtactcgtacctggttcgcaataccacgcttggatgaagtccggaggcaaggtggtgcctaggtttccgtgcctgatttggatcttgcattgtccccaacagctgctccaaattcccccgtctgctttacttcattatggtttgtatgtaatggagcagatgaaggttgcaattctttgactttctgctgatggatcatccatcatatgtatggcgaatgcaggtggaggatgattgccagcttacctctgtggatgagattgcagctgcggctcatcagatcgtcgagaagatcaatgaagaacaaggctgcagcttattagaatagaatcagccgcgagctttctcgcatgcaacttttctttagctcctgtagcaagtgaagtgattccctttgtgaaaacgaataatgtactaatcatcagcttagctggtctttgaaacagtagtatgcataacccctgtctttgtccatagaaaataatgtccatggccgccaggcatgcaaggtctctccctctcggtctctgaacgagagctctggctacagaacagctgcaattccatggcgctgtgaaggggagaaggcgtgacattccctcccttgtggccttgtggcttgtggtaccttgctaccatgttctgatgttcaccacacgatctgacataactggcactagcggtgctgtttcagacctggaagaattctgtatttctgttccccttgtgaagcaccaccgccccatgccaaaacgccaaaagattctcagctcatgtattcctgtgcacatggtttgcaaattcctttcttgaatttccgttaatttc

SEQ ID NO: 4138 - DNA, 2968 bp, Sorghum bicolor
ggcgcagcacaggtgttggtaagtacgtagggaatttctagtgacagtctaaaagagtactatgctctggtttctatcactattcagtgcctaaatgtttcagagaaattcagaagtaaatcacagagatctgctgggtttagtattcagggcaatcacgttcataacccccaatttcatccgcagctgcacccccccccccccccaaccatggtctaaactacagggaacaaacttacaaataggaggatggagcacctgcacaagaatccccaaaatgtttgcatctctatctgtaaaggtaaaattcagtcattttcaatttgtcaatcgtttttttttcctcttaagtttatcccatctgactgcagctaattgaaccaaaccaggagcaaacagtagcttcatgtttcttgtctttaaaacatatgattttgttatatttctttattctataatcttattgcctaggtaccatctttattgttgataaaggttcccctacagtttcagttgatcctatattgttgtcagataaagatttgaaggggggccttgcttccattttcttttacaaaaaaaaaagaataaaggaatgtttgcagcacctcatactctgctttggctacatggttcacctatttatttatggttagaattgtcaatttgcaattgcttttgcaaattgtaccacttatggaggatgaacaatgtcttagtcagaaagttgaaagaaaggtcacaagccaagccaagccaagccaagaaaaaagggatcaaccctacgtggttgcccgttggggtgtgcacccacaccaccaaaaactgacataaggctcatatatatcctcagcttattacatgtgcatctagcaatgttcaattatcttgaaaagccaaatatcttagattaattactacaataccagcatccaaattgctaaagaaaaggaaactacaattattataaacagtaaagcgctacagtagtgcaaaaaggaacgacgtaccaatccatccatccatcctcttagctgtcgaacccctatggtagtgatataaagctgttgctaatcaaaggcacttgcagttctcgtgatcaaactcatgggtgtcgtacttgcacgggcacggtgcatacaatacaagcagatgtaataaaaactaatgtataaacgatacgcatagccgatccgcttcataatctagctagtggcctaacaatctcaacctgtttattcctacagtggctctcaagtaggtaaagctacacatctatccatacatacagcaggttcatgcaactaactcttacaactaggtaaagaatttctatcggtaaagtaatttgttgatgacagaggccaaaggccgggcatcttggggaattaatggagaatacattacaagtgaaagtgagagtttggcatgcatgaatgctatctggaatataattttacccttggacaagactactcacgcaagtcaagtcatggatgcacgcaagaggccgggtaaaagaaaaggccaatgttctcttcaaaagtagtactagggcagagctagagggatagaaggttgtttggatattgttgagcataaaagacgaaaggttgctcttcatggccatgtaccaaatcgacaaaactaaagcgaccaaattctaccaaaatgataaaaaaaaaaggcgagagaaggtggcttctctctctagctgggtaaggcttaaggggccaagcgaaactacctttggtacgctataaaaggccttcaccaaccaagtgccccctccgctcacccagagcaaaaatccaccaagaagccagcctacatcgagatcccagatcgacctcaccctcgaaggtctgcagcagtctccactgagcaagtaaacgagtgaagcacacatgctgcagcagcaccattaccatggaggagtggctagccttcactgcctctcaaatccggaccaggcattccacgctcactaccacagcaacatgatcgccatgccgcccactccgctattccaccacctctcgccttctacctttgaacaacctatccacgaagcacaggcggttgtcgctgccggcaacagtccagccggctccggcagtaccgatgatgcctacggcggcggcggccgcacggcaatggcggaggctgagcggaggcggcggaggatggtctccaacagggagtccgccaggagatcacgcatgcgcaagcagcggcagctcaccgagctgtgggcgcaggtcgtccacctccgcggggccaaccgccgcctcctcgacgagctgaaccgcgcaatgaggggctgcagtgatgtgtgctgcgagaacgcccggcttgagaaagagaagaccgatctcagtaccaagctcgagcggctcacccaggcgcagaacaccgccacgccaagctcctcctcagagccgcaacatgacaccgcgcgctactgaataaattcattcttattttcacattttagctacgatgcttgttactatactataccaaataaaatatgttttgaggtggatttattgcctcctatatgtctacaggtatattctaactacctattattgacatctctttttataaaggtggccaagacaaattttgatcagatgtactaattaacaagctgctatccaaagtaacaacagcacatagatgaaaaaacaaggaactgcccataaaccattaaggaataagaagccttatgattggtttccattgatgctttccactgaaaatgatgtggtggatggggttggaggctgctgtaaacttgctcgcttcagcggttcttcagccctccattctaaattataagacgttttggcttttaagtttttttttacttggccctaaaaaatccctttggtcggggtccatggggaaattatttttttaaaaaaagaaacaaaattttcggcccaggaaaatgttttct

SEQ ID NO: 4139 - DNA, 4879 bp, Sorghum bicolor
cgcagggctagccccaaacagggcagtgcatgctatggccttgcattgttcacggcgtggacgaagaaagcaggttggcagccgtggctaggaatctagcaagacttgttatccacgtagccggcctgtggtccttcttggtccgtcttccggggagtttgaagtcgtatcctttgcagtccttagtttacatttctcgcaagattcggctttggtttgctttccatgaccaactttaggagcgagagcacagcagcttagcgagggcgccgctaatggcaggcagctgcgctggtgctgaaacaaaggtaaagcaggaggtaagcaggcagggaataaccagtaacttgcaggccacttctggtagtgaccatcatggatggagccatggaggaggtgactgagcgagggagatagatttatcaggtcaggttcctgatgcttttttttcctttctgtcttgtgagagaaaacccaaatttaaatttaaaagcttaaggggggcaacgcaaaagcgtgtttggagtgaataaaagtattgcatgggcgggggcgctttaactaatctaaagctagattcgagcttgtgcgcgccccgaggctaacgaatagtttttaacttgtttatttgctgcaaggaaagattgagattaggggaatctgaaccctgaaaccgcatctctttcaggctttcagctggccgaaggttgctgcactaaccaaaaaagcttataacgatctactgaaaccctgcctttgatttttctcaaactcactctgcttctgcttctaagctgtagtaataactgaattcataaccaagagccagagagggcctaatagaagactggagaagggtgcatgaaatgtgaaggaagaaagggggtgaaatgaaatgaaagtaggcttgctttgccgtgggggtaagtagagagctaatgcctcgatcggcaccccctgctaatgttgaccaccattttcttcaacaaaactaatcatgccgatcatgaagggcgtgtaaataattggccgtgccgaccattaaaaaaaacccagcagtcaaataatgattcgggtagggagggcgaggcaggggcataatttacagccaggcgccttgaggaaagcgagcggttgcgcccataaacaattgcccgtgagagttggcactgtcagggatgccggcatggtatggtaatgccattgcagtgtattgctggtgatgtgtgcttgctgtgaagaagaacctgatcgatcagccccggagcccccttcctctttacgcttgctgtgagagagagagggtagtactcgtaggaagtaagtaaacaaaagcaaaggtaaacagcatgattaaagggctgttaagaaagataaagcgaggcggaagcgagacacttaaaaataaggtccatcaaggttaaacaacgccggccatggtggtggtgattaggaggagtaaagcggctgcctgcaactcctgcagctaatcctcgccgtggctggctcaccatgcatggtggtagtggtatcactactggtgaaactacaacagctactgaacaactgctagtagacctataaatctgacaagcctttgcctacaagcccctctctccctctctctctctctctctctctctctctctcgtatatagtctatgctctccccactttcgtagctagctcttcttcctatgcccctcgccggaacagatagcatcagaatctccagtggctggctaggcatctttccttttcctgccataggccgtgacgagagcttcttgcttgcgtgcttgctccggctatcatattgcctgcctatgaagctctctggccaatggacggaggagcagagctacttcttcctcgctagcctttctcgtctctgattcgtccattgaccttcggtgagctcggccacttctgcgctcccggcccccgcgacttgtcgcgtctactcttgtgtgactgctactacaagcaacctgcaagcgatggacatgaacgagagcggcgagaaagggatggagggcaacgcgtcgtccggcgccgccggcatcccggtggagtggcagacccaattcagcgccgccgccttctcgtgcgcgccgccgcagcagcagcaggttccaatgatggactccgccttcgcgtccgccgccggcctgtgggcgtccacctcccaggccatggcgctctccgacgtcggcgccatgtcggccgcgcggggcggtggcggcttcttggcgccggtccccggtttcctccctcagggcctcggccatttccccgtcgactccggcttcatcgagcgcgccgcgcgggcgtcctgcttcggcggcggcggcggggtgatgggtgctaccgctggctacggcacagctgatcatcagaccatgaacaacgcgttcagtggctcctcagaggcgctgttggatcaccagaggaaggacggcaacgacaagggcgagccggagctcggccggaacggccacgacggggtgctgagctcggaggctgctgctggggactgctcgtccaaggggacctcggactccaagaagaggagaaggcctaacgaggtgagctacctagcgctcttcttgcttgctgcttgcttgtgtctgcagcttttccactgccgtttcaaaaacctgtcgaaggatcgatctagctaagttaaaatggatggatacatctgtgcgtgttctgatgaaaggtgatgggaggcgatcaggttcagtcggccaacctgcccgcggactcggcaaacgagagcgtgcacagcaaggacaaaggcgaggagagcagcccggcaacgaccaccggacccggaaagtcgaaagggaagggggcgaaagagacctccgagtctcagaaggaagactacattcatgtccgagctcggcgcggacaggcaaccaacagccacagcctagcagaaagggtacggatttgatcaaagggtgacacccccaatgtttaccgttagtttgctgtggaaccttggatcgctctgaaattgacatgactggtcctgaaaactctggttgttgttgcatcttttctgcagttgaggagggagaagattagcgagaggatgaagcttctgcaggaccttgttcctggctgcagcaaagtaggtctatctagcacaaaagaaaaaagggaacttgtgtgtttttatgttgattttcattgcaaatgaacattttttatcctttgaaatccaggtcactgggaaagcggtaatgcttgacgagatcatcaactatgttcagtccctgcaaagacaagttgaggtaataactaacatctcacaatacactatacgttaaaatatgcacaactttgtctgaatccaggcttagctacggaccaagttgtcatttggaagagaggaagtagaacatcgctagatactgagacctgaatatgaatacaattttctacaaccctcattacatactgatggcaagcatcaaaatattgaattgatcttgcagttcttatcgatgaagctcgcaacagtaaacccaaggcttgacctcaatatagaagggcttctatcgaaagatgtatgaggcttcttgcaatctcattcttttttgttcattagttatacgtataagaatctaacaagaaaacccactcttgtcatcagcttcttcgcttccctggtgttccttcttcttcccttggattttccccagaaatgatgcacccacaattacagctatcgcaaccaggcctgattcaggggggcgctgctggcatggccaatccggacgtattcaggagaatcatgcaggcacaattgagtgcaaaagacgggtctcaggttagcatatctattctgtatgattgaacagatcctagtacagtactgttttttaagtatcaacacagcacactaatcactcgagtcttcaggtagcagttgacaacttgacatagcttaagctatcctgtagcaacataaaattttctcaaacatatacttcaagttttcttataataccatgatcttcatagccaactaagttgtgttcaggaacaaatttgccccaaacctgcatacagtacatattttctaacgggcaatccacatatacttcaagtgaggcttctccaactcctattccaagttttgtgttgaggaacaaatctgcttgtgacaccaagatcttcatacaaacactgatcgcaattgcttcaaatttacaatactgatgccagcttttggatttgtcgagcagatgtcccacgcattgaatggagggtcattcagcgaggttgcgcagatggcgtacccgtcgctggggtcccaggacttgagcatcaggccgtcgcaggacgggtttcaaatgtgactgaacatgccagttgcacatagtaaagagcaaaggcttccttccatctgatcggcgaacatgcaggtgcgcagggccgcataactgatgctgctactgctgggagcatgcagcagcgctcggctgtgctgcatcgccatcgcccaggtttttattgtgttcatcagagggaactgagaaaaagctcgtggagccccccagtccgtcccccaccccacggaagcaagcgctggacggatggatgagagcctggatggctggaaattctgtctgtttgggtggtcgcatgcattcatggtcatggctggcgcgcagtgcagtaacagtgagctgtgtgttggtagcgagcaaatgagctgctgctgcagggtgtaatgcgaggagccttgttttgttagtagtttcagtgcttttgtttgcataatagtttaagagtccaagaaacactcttaaaattgggggggcggtccggcgatggttatgttgaaacatcatacgtt

SEQ ID NO: 4140 - DNA, 16365 bp, Sorghum bicolor
tgctctgaccaccagtcgcaataataatcgccgcgaagaacggcgctacgacaaccgcgaccaccgtcacgataacaagtccaaaagctcgagggccagacaattttgtcgtcaccgaccagactttcatccaaagataagtacacttctaatatcttatttatttttagcataatattttttattatccttcaaaaacaactttgtgtttagccacactagttttttctcctacacgagctttccagagccggtactgtctccgactcctccctacacgtgcacgagatccgccctctgcgttccgggtggtcggcagtagctccctggcgaggctggcaatcccacgcgtgtctaggttccgcacctcatgctgattgttggctagaccagagctggtacaagctctaggatgaattaactacttgtgctaattttataacaaaaaatctaaaacttatctcagtactgatttttatctaaagtttatttgtacatcatgtactacctattctttatatttatttttcaggggtttggcccagtcgacaagctacgctcggggactcgtcgactattccctacgctgtgcccggggactgctccgaccaccgagcacgtttacgttcccaaccacgctcggggacttgtcgactactctctatgctgtgctcgaagactgtgccgaccaccgagcacgtttacgttcccgatcacgctcggggacttgtccaccggtccctacgccgtgctcggggactgtgccgaccaccgagcactatacgctcggggactggtcgaccagctcaccaatttaagaacttggggactgcaccgactaccgagcactatacgctcggggactggtcgaccagcccaccaatttgagaattcggggactgtaccgaccaccgagcgttatatgctcggagactggtcgattagtctattcaattgcagacgagcatgatatgctcggggactggtaaattcaattttttagaccttgctacaaggctcatacttcgccttccagcaagctcggggactacatcggtacgatgcatctggcgatgcatctcagtttcagaatttctttgaggacttttcttttgaccctggcaccacgtgcctacgtcacctactaccaggttcggggactaagtgggcacacttcaccttgcggtgaatatgcttgcttttttgaggtctatactttttagaaaagtaaagtgggcacacttcaccaggaaaaaatcttttttagagcaccatgcattcttcgaacaacctgctttttcgatgtcaatgttgatcaactgtcttttgagttggtcaaaataccgttgtaactgtttgggcgactttcctgcttattgaagacgtcaagcctcactgatcgaagaagctcaagacggcgtgttacatcataatacatggtgctcggggactagctgtgggggtataaacccctataccctcatgggcctatatgggccgcaccatcagaggtggctcggcccacaggatgaagacgtgcggcgcgcgactggtcggcgtgcaccgcaagactacaagatattgtaccaaataggatactttgcttgtaactctgtcccttcaggatatataaggaggggcaggggtctcctagaggacacatcagatcatattctctcagcacaaatcaatacaaccagacgcaggacgtaggtattacgccaactcggcggccgaacctggataaaaagcttgtccgtgtcttgcgtcaccatcgagttcgtagtttgcgcaccgtctaccgataaactactaccgtgggtataccccaaggtagactgccgactagctttcgtcgacaggaagagtatagccctcgggttctgggtagccccgtctcatgaaatctaggcattgggtgacgatccatgtcatgatactccgtcgcctaggcataggtcttcggctccaagtgcgagcttagtgtggggctttgggtaatgcagacgtggatcttcgagctcatggtggtcaacctcgcggtggatgggaagccctgggctccaaaagttcagatggcgtaggaatgcccgttggtggcacctgaggcaggcagatgggcagcaatggtgcttggtgggtgtggtggcgacgatgcatggagcgggcagcggtggtgcatccaacgtaatgtggagcaacaacaatgggagagtgagcaagaagatgatgggcttgtgtatttctaacaagatgactatttagacgtccaaaactaaattaggtcatcgtacaacaaaacaggttcaacgaataacatcccaacagatctaatagaacatactctcactaaatttgtattgttgccaaatcgaatgtcgttgagatcggtggaaccttactccgatgtgccatcgtcgcctctgatctcgtcattatgtcaagaaaccatggcctagtgaaatagtaaatgaccaacaaggccttgtttagttcaccctgaaaaccaaaaagttttcaagattcttcgtcaaatcgaatcttgtggcacatgcatgaaacattaaatatagacgaaaacaaaaactaattacacagtttagctggaaatcacgagacgaatcttttgatcctagttagtccatgattagataatatttgtcacaaacaaacgaaagtgctacagtactgaaaacttttcacttttcggaactaaacaaggcccaaaaatcaaaatcaacgaagggacatgtcccacttctctagtcactgctaaagtcgtcgataaggacagagaaaagggggccatggtggcaacggtagctggggagcatgtagtatgcacaaatatgtacggccttgtttagttcaccttgaaaaccaaaaagttttcaagattttccgtcacatcgaatcttatggcacatgcatgaaacattaaatatagatgaaaacaaaaaataattacacagtttagctgtaaatcacgagacggatcttttgatcctagttagtctacgattggataatatttgtcacaaacaaacgaaagtgctacggtaccgaaaacttttcacttttcgaaactaaacaaggccgtagtcgctgaataggatcttcatccatacaggaacaccgacgaggggattgtggagtcgtcacggactcatggctgtgcatgcgtgcgacgcagattatgaaatctagactctcggccttatgttgtttgtttgtggtattagatttggcaaatcggaacctacatatacataaactcgttaaacttttgttgcctggctggctcattaaagtaaacctgctaaactcctggtttagcttgttaaaagatataagcaagccaattcaaaccgagctatacaagttgagtcgaatgagtatcccagctacgaggttttcatccggcctactctcaggtttggatcaaacattgagaatataagtcatgaataacttttaatttattaagtttggaaaacttaaaaaaccatatgaatagatttgtcttgaaaaatactttcataaaagtatacatatatcactttttgataaatatttttataaaaaaaggagtcaaagttatgttttggtaaccgtgtcgctatcctaaacaatttttttatggatatagagggagtacttatgaaacaaattataaaacaaaaagaaagattatactaaaacaaaattattgttatatgttagggagaaggtggtggggggctatggccccctgccacccccttggctccgctagtgggcatgggtttaagtttaacctatgaattttagaggaacgtccatcaatccaaacaatgcatttaggtttgaacacatacgatgacatgcattattactacggcattccattagaactaaacacgcttttagtgattgacgttccaaagatataggactgccgctgcatgcatgtacagagtcaaacaaccacaaatgatattgtcgatcaacaataaaaaaaaataaccaggacatttgtcattcaggcaagcacccccacacacggccacgcaaacaaacgccaatttttgccctcactccctctgccgaaacccaaaaaggctcgcaaaacattggacctcctcgttcgacggctacaatcgcgctaggcgctaggcgccacgaccagtcccaaaattaagcccacgccaagcgcgacaaacggtgtccgcatgggcagccctcgcccaaaaatagcccgcctccgccacccatataaataaagcctggcctcgccacctcgtccctcaccacaccacaacaaaaccaccgagacaccgagcgtcaaactcgccacccagccagccagcaaaccaccagccgagagagctagctagcaggcaccgtccgtacccatggctcgcgctaccgtcgtcttcgccatcgccgctctcctcttcgtcgccatggccgtggcgccgctggccgctgaggcgaaggagtccgccgacgcccccaccgccgatgcgccggccgatgccagcgggccggtgggtgcccctggcccccagggcgtcgacggcctgtcaggcaacgaggacgacgacgacgactccaccaactgaggccgaccggccgagcacgtcgtctgatatatcgtcggttctgaaaacgaatggcccggttgaatttggaacaggacatggaagaaaaagtgagagcaatgtcatttaatttgaagccatatgtaataatgtgtggtcgtccgtggatatatatgttctttgctctccctcttttttctttctgtttgattttcgatgcgttatatcttgttcttagctcctaattgtaacaactcttgatatcaaggactccaaattttatcatttctgtgtttctgagccactgagagtcatgtgcatgcctggatcacgatgttagttttaggctcccccctttccgctactcactattagaaacataacctatgccaacatggaagtataaaggccaacgggcagtcgaggagattatgaaatggccgacggtcaatgtattacccactatgtaaaaaggtcggtcctaaagcatgtctgtaaaaacaaactacagacacccgtttgtgtggctacgcgtctatgttaagggaatgtatcatgtgcaatccagtttcatgtgcaacctatgcaaccaccaattaaggccataggatctagatccaacgtctgaggtttttttcacttaaactcttctatccggatacatacgggttagatttaaacccataggtggaagggtttaagtgaaaaattgatggttgcataagttgacacgaagctggattgcatatgatacgttgccctatgttaaagtggcgaccgagcgcttagttgatccaaagtgtacacatggacacgtcagtctttgtatcaaatagtcaacggatatttacccatcgggcatgcagcacactggatggccgaccgggaaaactaattcctgatagttccagtaagacacttgtcaaatggcaataattcccaacggttatacgtatgattctcgaccgtgttacaaggacacatagctattcggtgaactattgccaattgttgtcggttgatcgttggcctttttatcaaatggatgatagtttaatcattttccaacgatatcttataatacctaataattgttggaaagatactaatatagcatgctaagtattatttggattggtctagatatttgattcatggataaaaaatctttgttagataaggtatttgtattccaaagcttcacactatgtattccttttcattttgagcccacgatctatttcatttataattttctataaagtaaacttttggaattttatacccttcgttttaaattagaaggcgttttgacttttctaaatacatagcttttgccatgtatttagaaacacactatgtctagatatacaataaaaatagggcatatagaaagctaaaatatcttataattggaactgaagggggtaggatttttgtagagctgaagtttttttaggattaattatataggacatttgtagagctaaagttttttaggggttaattatagggaggtgatttactcctatataggattttcaatggaacacatgaaaggggatattgtctgggctgctcaagggttgcttttgctttaatgctccattcactcaagtcatttctgtccaagcgccgctgcccaatgcaattaactgcaatatttctcccatccaggcatttgtgatatctaatcttggacctgcagccattccttgagggcgtctcaatagttcccaaataggcaatctagaaagaatttcattagctatcaaggagagaaatcaaatagctagcaactcctaaataattagtctagcatgatctcccagaaaacacctctctcatagctcacataattctatattgcaatatccatttctccagctagctatttgtaaattgctattacaaacgtcctaagtgattgtttgagcagcaacacgagcaaattttgaaatttactatccccgaaagatgatgaattaggatgaaactaaaaaagtagtttatcttagctctctctctctcccatttttttcttttatccatgcataaagttgttggtgaagttgttttgccaaacaactttttaaaacagctcagttagaaagttgcttatgatttttttttaaaaaacaactgcaccagtgaagctaagttgtgacaaacaaaaccttagtaccgcacgtgaattattttttattctttgtttctatctttttagttaattttcccattcttaggatcatgttcttgatcgacgcctcctacaacaattaaaatgtgtaatttcttgcagtgacttgggttcttccggtgtttttcaacatttattatagatattatctaccaaatgccttcagcgaggtttttcatgcgctataagcctataactgatggtagcattttattactattttggtagcgtacattcattgctgcaagctattgtatgctgatgttgtcttttattcattgatttctatcatccttgtatgcttatttgatgaacaatactataagagcaactccaaccattatgcaaatggacttgacatttaccaaaatacataaaactcaaaaaaaaccctccaatcgttatgcatttggactttgcattttacatagctatgcatttggagggagaaacttggcatatatgccaaaggagtccggctatgcaaatagagatcacgggattctcggtaacacctcacgggcttttttcttcccttcgcgcggtttcccttcgcgccgccaccacttcgcgcgataggagaagcatcgcgcgtcctccttcgccagcttgactgatggcagcgacctgatggagatcggtactggagccaaggggcgaacctgtacgacgacgaactgatggccaacagacgacgaactggtacggtgaacgggaactaacggaacgggagatcggtactgcgaacgggaacgacgaactgcgcagctcacgatcggtactgcgcggctgtttggcgcgggaattgatgaacaggagacgacggcgagctatttggcgcgggatcgattggccgcgcggaaaggagtgccgcgaaacaaaatttccgggaaaaaaaagatgatggacttggcattttgcataacggttggagatcacccgattttagccttgccattttcatttaggggtttgcaatttgcctaaaatacataacttcaaatgcataatggttggagatgctctaacatagtattacggtcgtagctaccccgctttaacaatatatggtatctgttttttctccatatttgtggtattctaattatagtttcaaatgttattgttctgtatgcttgcaggatatgtccgtcactagtttgtcctaaacagaatataattttgagaacattcttgtttaaagtgttcaaagtttaactaaatatataaataaaaatattaatgtttttgtcatcaaataagtctattataaaaaatatcctataacaaatctaataatacttactcattttaacttgatactgattttactagagggagtgagtcctcaaaaaccaaaggacgacccgcatcgaccgagccgcaacgccactgcaaccaaaaccagccgacgaccgttcgtacaacccaagaaggggcgcaatgccggcgcggcgggggcggcccaggaagggcgaccgccggatcgacgcggccatcgaccacttcaccgtcatgggctacgcggcgcgcgacgttaaggccgtcgtcactgatctcctcaaggtgatttttcgattaggtctcttcttcttaattcccccctgcaagcagcgtcgggattatggcggcactgtagggtttgggttttctgtttgtccgcggatcgattaggggttcgaaatccgttttttttgtttggtgccgtgaacagacatttgcaaggcgttctcttgtgtttgcggcgatcggcgcttcaattcgagtgtgaatgagaatggatgagtgcactatctgatggctcaattgtgtgttttttctctgctatggctgtaggtgtacggggggcctgatgcgtggcccttactggaggaaggtggctcctaccaggttgtgcaagagaggctcttcgagatcgaggagaaggagaaggagaagaaggaccagcagctgctgctggagtatcaccaacagcaggatggccagcaagtggaggatgagcttcctcaggttgggtgattcctcatttctttttgttgtctctcaaattctcactctcatttcagaacaacatggccaatatggatcgtttattactgctcatactctgaaaaacaaaaaaacacctagtctctccttatcgaaagacccattcctggtttgcccaacatgtctactaaaaaatccatcatcatccatggtttctcaattttatctaactgctgccaaggccacctagtttcaattgtgatagatcatatttagcaaatcgaataagaggacatttggacgtctgaatcgtcctgcaaatcaagacacatcttttgttcgttagcaataccctgatgtcccattgtatccgttcttatcactttgttggtaccagcccgagtcccacctaaccagagttaagtgagggacttctgataatatttctttttcaagacctcatgttagaggcgtatgacatgggcctacctagtggctaacagccactctcaattagagtcaaatctgttcagctagttagctgattgggttagtttggaaggttggaggaataataggaaagaagagaggaattatagggagtggttagccagggaggctatttatctataacccgtattagaggcaagccttaattagaaggaaaagccttctctcttgcccggtcgtgggcaagacctccggccagccccctctcttactctgaacacgatctgccaccataacatttggtatcatagatgccaggttctgatgagggtgacaagcagccgaaggtgccactgatgctgccgttagatcccatcgccaaggcgctggctgacctcgcccagcagaaggcgtctctttgggcgcacctagaggccctggaatcccgaccgccggcgaccaccaccaccatgcagtcggtgttcccctgcagcttgccggcacacccctccttgccattctccatcggaagccctcctctcttccggtcttccctgtgcggtgtggactagtaggcatccggtggggagaaggcatgggtcacagacaggcgcgcaccatgtagcgtcgctgcattccaccatcgactgctggggggtgcctccattggtcactgttgcggcatggccaaccttggtgatgcgcgtgctgactagagatgacaatggggacatccccggtgggaagtgacaccctgtccccgtcctcatcctcgatttccctcattttccccactccccggccccgatcccatctcggggaagactttctcccatccccgtccccatcctcgattagcgtttcaggcctcgacaagtctgacatcccagaagcgaaggacgcccattcaaagcaaaggattgaggggaagagtaggactgcaggagattgaatctgagaaggacggaggagcagcctagtcgaagactagaatctgggaagggtggaggaggaaaaggggatcaacattaggattgggaaagagggtcaaaggaacaacacaaaagaaagagcaagcatcgccatgtgaggaagaaggacaacatcgccttggacttgggcggcgccactggcggagccaccctaggggcggggtggggcggccaccccagcttctggcgagctcgccctagactccagaacccttcttccctagcaccggcagtgaggcgagcacgagcaggatgcagcgacttgtggcgctcgagcgtggaaaaagaaaagcagaggtgaagagaagaaacgagcacgggatgggccttttcttcactttgttgaggccgacagaggtgagaccgtgagtgggcccttgaaagctcaccattgcacacaggcacgctccttccccaaccagtggattcgttcccaaatttctaaggaaaaagtccactttaggtcccttaactttcacgaaagtctaattttcatccctgagctctaaaaccagacaaaatacatccctcaacttttaaaaccgtgcacattacatccttgacatggttttgaaagcggttttgtctttttctttttatttattttggctgattttttttgaaaaatcacagtaaatcacataaaaattataaaatagaaaactcaattttgttgaacttcagatgagtagatctacacattaaatatataatatagtatattttagtataaatttttttgatgcagctttagatatatgcttttctataattaattagactaattatagctatagtttctatggtccaattgtgatgaaatttatatggtgggctaattattctatgattgagttgtagtaaaaatttcatactcattggatcatgtattacttagttatagatttatttaggtttatgcttgttaaatcttaataaatctataactaagttatacatgatctaatgagttttagatttttaccacaatttaaacatataataattagcccaacataaaaaattcatcatagttgaaccatataaactatagctatgaactattctaattaattatagaaaaacacagatctaaagatacaacaaaaattttctattaaagcataccatattatatgttcattgtgtaaatctacttatctagagtctaacaaaatcagatttactattttatgaattttatgtgatttactataattttacaaatatttagccgaaataaataaaaatgaaaaagacaaaacagccttcaaaaccgctcataaccatgtcagggacgtaatatgcacggtttcgaaagttaagggatgtattttacccggttttgaagttcaaggatgaaaaatagactttcgtgaaagttgagggacctaaaatggacttcttccaattcctaatcgccatcacggcttgcgacgaagcttgcgaggtcacgcccgccgcctaggtgcccaccggccaccgcggcttggcctctgcgctgactgccgagtgccgaccgtcgtgcagtcaccagatcgcctgacgctgtgcgtcgctcgacattggctgttggcgtccccgcatcaaccgtcgctggctcgcccctgggccaacctctgcggtccctgtgcggcctcagcctcgcccgcctcccacgggtcggccaagactataggatgcaggagctgctcaactgctactgctttggtagctctgttgcgagcctgtgcttgccagcctgcgatggagggaggaaaggaacaggttcactaggaaaccctgcttttggtaagcgtgattggttgtgtgatactaattttgtgtttagcatgtagtttgtgcatagagttcgccccaggtaaaaaaaaattctggctccgtcattgggcgccgcagcatcggtgtcgagggctcggctgctggcgcattgcagagttgcatggaggtagaggaccgcgactctgtggtcgcaagggcgacatagaaggtgaaagcggctgctactggtgggagtttgggagaggagcaatgattctagggtttcatggtatatatatcagtgctatgggcttggaatgaaaatacactagctggacatcttttggcttaccttctcgtggtctcgatggatttcaggggcagggacctgtagaacgtccccgaccccgcctcacttgacaggactgacttttggcatcttaagctccccgcggggatgaaatttggcccattttaatcccctaatggatgaattcctcgtcgggtatcgagaatggaggccccgttgccatccctaatgctgacggcgcagacagtcggagctccattttcctcggcaagatgtatggctcagatgttgtgctttgctcatctgttcttgacctgcggggggtaagacagcccccaggcattgcattaagaagaagaccttctcacgcaggtcgagaaaaccctcgaacccctgccccacccatacacagcggcaccgtagcccatgtgagaacgaccgggacttggccttagacctgtgctttggcatgggacagacgaggggattttttaaccttagcctgaaaattcgctcccacggggagtcaaacccaggacctaaggagtgccgccgggttcctctaaccaactagactagaggccctttggcttgctcatctgttctgatggggctgggtctgggctcgtcgcttgggctggatgtggtggccaagctgcatgggctgctgtgctcttgtttcttcaagacttcagcccatgtgcggactgctccatggcatccaggtggtaaactggtaatacgtgtgcaatcattgcgttcagatggtgtccacggtccaccttccattgaggaggccaccaaaataaagagtcaaaatctatttcaggtcaagaataataaactgagccgggacataaaaggcttgtttttaagtgttaggtttgtgtcgagtcaagttattgttatgagctagttaggttgcagctcgaggatgagctgcttgtcaggcaggggtggtgttagaggcgtatgttgtcatgtggggcaagagattcacccgtagagcaaagaaggcaagctcagcaaatcaggaaagtggctagattggtgccaaattgagggtaatcctgggcgcaccattagcagatgcaaatttagaagcttagcaagagtgatcgagacagaattacgtggtgattgggctgcctaatggctatgtataccatgtgctacaatgagaataagcaagcaggaattagaaggaaaatccttctctcttgctccgccatgggcaaggccaccggccggcctcctctctccctctcaaccctagccaccaccgtaacacctcaccggatacctgtgtatttccatgttaaaaagaagttatgtgcaaacttaaagggttgaggttaattcatgagaaaaaaagatgccatactgtgtctataatgacaaaacaaactgagcaattaagtaaaatatactgacatcttgcacacacactcctaagtgctgcaagcaacctgcttcacctattctccactgcaaggcttcttctctgatgttttatatctaactgagattgtaccacattttgttgacaaaatattctgctttttatctctttccaagtgcgcaaaaccaggttggtgggtagttctgaaagaactgatttcaccaccaaataactttgagttggtattaatttttgtttcaagccaacaatcttacttctgtatgtgtccatgaacattcaaatgcctaagtatgcaacatgaaccagtgtaaatgaaaagttttatggccttgtttactttcaattttttttgcaaaataggaatagtagcactttcatttgtatttgacaaatattgtccaattatggattaactaggctcaaaagattcgtctcgtcaattccgaccaaactgtgcaattagtttttattttcatctatatttaatacttcatgcatatgtctaaagattcgatgtgacggggaatctgaaaaattttgcaaaatttttgggccattttgtgtttgtacaataatatatcttggatatcgctatgacttttggtattaccatgttttcagggtcattaagtcccttacactacaatgatgatgccaaagttgatactggcacaatgcagcaaactgaaagttaaccaactgtcagtctgttgtttcgtctaactaaagacctttgggtcattattcattaatttatgattatggtttctgttgttatccaatcgccacatgcttatgcatgttgtggaattctcaaataggatgatataaatttcaacactagtagaatgcagaaaactaaaaaagaacagtaaacaaactgtcatgccataatacgacatttttctctaagcagaaactctgagtcataatatacgattatgacttatgttatctatttgatgatgcatatgcatgttgtgaaattgctactgggctaaatccaatatgttttgtacatttgtagcaccaagaaccagcagcagatgaggaagcggaagaccctatgttcattgaaccacaagataccatatcaatttcaaatgaggcaccagcagagactaagtcagcagataaggaagtggaagaccctatgttcatcgaaccgcctgctcgtgaagctgcattggcacttaatgctgctaggactggcccaaggcgaccctgctatggatggcttagtgagtcagaagatgaggaagaggaacaacctacttgtcaaaaacatgaggtgcatgttccaagtccaggagagcaagcccagtagatggtagtgcaccctattactatgctattattgagttgttacttaaactaaatttctataaatagtcaacatcttgaattttattgccactgtgactttgatccaaagatggtcagtatggcttatgatctcctcaattatgaactatgcattcccttgtcaccatgaacatgatactagccatatatcacatagcaaggcaggcatgcactattgaaacctccttgtaatcaataagctattaagctacaagcctacaagatagtcaatggtgttcttctgagaaacgaacttgctggtataggctctcaaagatgccgctgcagtggtttggtatgttaaaatattaggtagagaaaaatatatacagtggtgttactgttggggaatggccacatccttccccctggtgtcgtctgaggatgccctttaagcccgggaacctccgacctcaggagcgtcggaggatatcctccgcccagggaacctccgtgcgattgcgtgcgaaggaccctgaaaagagactattattggcaattcgtctcgtcatgatctgtgcagggactgatactggcggaggaccacaagcagagaaaggagcagcctccgaccctcccaagtccgaggatggcgagggacgcggaggatgcgaggaacctccgacgagtccaagccgaggaacctctgacatagacgcgtcgagggatcggcgaccaagcaagccgaggaacctccgacacacgaagtggcgaaggatcctcggtcgcgcgaaggatccgagccaccgaccagctgaagctctagacagaggatgcgtgtggggtttgtagtgtgaaattacacagatgacttagggccagtagactgtaataggaggatatgctgggatattctcccaccgtcacggggcatttttgtaaatatcactaggtcggttttcgagccctatataaggggggatgccgtcattaataaaggagagagggcattcattgtattcacctactgttgagctcattgttcattactgttcaccgtctcacggcaccgagtgagaaggttctcgatccacagtgttgctggggagtgcggtgagcattttctccaacattggcgcccaccgtggggctcgaaggatcacccgcgatggctggaaagagaacaagcaccacaagacctcgggcagagccctccaggagaggaaggccgagaagggccgagcggagcacgtatgcgaccgcagagggggaaggctctgagggcgagcagccggagaacgagcagccggagcccggccaggaacctcctcccgccgcggggccggctcaac

SEQ ID NO: 4141 - DNA, 4555 bp, Sorghum bicolor
tctcatgcttctttcgtgctgatggtggttgatcaatagagcatcactgtttgaatgagattgctccactagaagagtttagctaagaacatccggccaaatgatccttgtttgctttttatttaaacaattattttaccttgtaagataagaagagctgatcaaggtgaaggcatgctttttgtttctaaaacaaatgcagtagctttgacctattgccattttggttgacatatcatagtcatcaagcagttcaaaggtcatggtttttttcccaagaatacgaagtctaacgtaataattatctaccacaattgttgattgcgaaacaccagccagaatttccctgtgctgtgatatacttgtgtactttagaattttcagctgaaaatgagtaatttacatgcttcataacttcttggaagtggagtattcgttgttgtattcagctagcatcttttccatgcttttatatatctactgtaaatttcggtgtgctagttaacatctgctgcacggaccacggtcataactcgtctatatatttttatgatctgatgaaaccttatttacctttttcctataaaaacttggtttttgtcctaagaaaatcttcttttggcccagtcaagtattttccattgactgttcccttctatatatattgcagagatccaaaagtttgtggaaatcagggaagaaactgatgaagattccacaactcaccaaagtgaaatagaatggagcagctctcctgtagaagaattaaatgagaagataaagatgctcgagtcgaagctggaagaagccaccatggtcatcaataagcaggattcaaaaataattgaactagatgcactcagccaagtacaaccacagaataccatagcatgtaacaacgatctgctgtctctaccatctgatgtagaccaactgctcttggagaagctggaggcagagattcagtgctttatccttacaagagcttggcaggattggaaactcctgaccaaggatcaatttgctcttaacgagacacagaaatcccttctggcggatcacaaatctttagaaactaagctgaggcacgctgagaacagggcgatgatgctggaggagatggtggataaactagagtcacaatgcaaggagctctccgagacttcagaagttctgaagctgcaggccagagctagcagggtctccttgttctgctcggtccagtttgtgctgctatgcctagccatggggaccctcctcgttcgctttctgccctcctctcccgatgttgtacctacttgaggttagagaattatgccagtcagcctttgtgtagccattgtcgaaaaatttttttctttaaattttttgggcccaaaccccctcaaaattttttttttttggcccacaaaccaagtttttggggaaattttttttaaaaaaaagggtttcgggggttttcgggttttgaaaaaacccctttgttttttttggtccccccccccccccccccccccccccccccatggtcagtattatgttcaaaaggggatatcgtcaccttcgtggtttatgctgagatctgtcatgctgttttatgtgggctgtacgatgtaacatcaacgttcggaacacgcaagccggggggaaaaaaatcaggcgccatgaaacagtattccgtactgtaaacaagcgcttgttagtcggattcaactttccagctggcaacttgttagtcggattcaaccttcaagctgccaaggctgttggatcgaaagagggaactgcaaaaacggatctgaatatcctggcgaaaagcgtcatcttgcgtgcgtgttaagccgcgatggcaatccgttcttgtctcgaactcgcctgccattttataagaaaaatcaaagccagctctctcaatccacattgcctttcctccttcccgctgccaccacacccatccacaaatcgctaggctagggtttgacacgccgccggccgccgccatgtcagcgctaggtccgctgcgccgctggaagcgcttcttctcggtgttcggtcaaatcgacgccgccatcgaagccgcccacccgtccatctcccgcgacgagttccggtccctaaggggcagaatcgtcgagatgctgtgcgactccgaagacgacgacgagagagcggagcagctctgcttagctctcgacggcgcgatggcggagtccctcgtcacgctgctggaggtgcccgtgtcgtcgagggtgctggtgtcaggcgaccttcctaagtccgtctccgccctggggcagcacgagtcggcccggatccgcagcctcacgcgcggcgtcgtgcgcgggtggcggtcagccgtcgagagtgaactggagagcgccaaagcggctatggaggccctgaacaacctgtctcatctgatgccgcctgagaaagagagactcgcctccaacagtcatgtgcccatcgccgccggcaaagacgagacgcgaatcaaacacacgccggccaaatttccatcgaagaggactcccaacatcaccggcaaagacgagacgcaaatcaaagacacgccggccaaatttccatgcaagaggactcccgtcgctggcagcagttgcagtgaatcccgcgaggtgctggctacaaagcgtaagctccgagagggctaccaggaggtcgagaacgcccagagtcagcgcaagacccgcgtcatcgaggaacccaagatgttagaacagccgaagcagaagaaaatgcatcccatgatcacaccacgggagagtagccgagcaagatgtgggaacctaaccaccgtgaggcgttctctgatgccttccttcatggtttagaattctgtagcggttcagagtttgttgtgcactgctgcagtcgtgtaatgtgatgggatgattactatgttggacgtgtaatggtgattgaattgtttattatgttactgatgaacttgttgttcaagtgatatttattacttacagaattgcacttgcttcttccaataccaaattcacgtgcagtagaaccatgtggtcgcactaccaattcttgaaaaaataattttttgttatcagcatcaactctaagaaacttcatttttgtgacatcaactccgttttcaccagcaaaactactccttggccccctttccccggatcctggatatgctatttttgcttgttcttttcccctggccaatgttcacttagtattatactgtagatatctgacatttgatctgctgatgtatgtgttgttcgcaagtcatgaactagcacaagcacaacataggttggctttggctttgcgcatgacatactgaaacagggacagtaactgaagaagacagagaaacatagaggaagatcaaattcatgcggcactatacacgcgcagttacactacttgtccaaattaaccaatctttgagcatcagatacatgcatggcgcagagccagacacacacacggagtagaatacaagctcaagaacacggccagccggcgctcagaagaagttggggtcgtatccgttgctggaggtggcgaggatgtagtaggcgacgatgtggccgagcgagccccaggcgaggacgtcgacgaggttgaagcccacggggtcgttggacttgagcagggccgcgaactccttggcgcgctcgtcgccggcgtcgaagtgcgtcttgccgttctgcgcgggcacctgcttcgccacgttctcccgctggaagttgaagaagacgaagcggcccaggaacagcgacacgcccgtgctcaggctgatcaccagcgacgcgctcagctccgcgcgcgccgccacggaccgccgcgccggcgccgcgcggaacgccacgcgcgccgcccggcggggggacggcgccaggcggagcccggccacggacggcggggacagcacggcggcggtcgatgtggccatggcgctgctggtgttcctcttcctcgagtactggaaggcgcggcggctgtgggtgtttgtgtttcctcttgatcttggcagctacgacgtgtctgcttgattaatggagttgggtatatagtgggatgctgacttggcagatatggtggggccgcgggaatgcgaggttagtggtggaggagacgaggatttggaggtgcggccatggcgtgtgcccattggagggcgccggataaggtatcccagcaggccatttttcaccggtagcgatgtcactgtctttgcatttggcaagttttttcccctctacttgggtggtcagggagccacggtgaatggcatggctgtgaattcgtgcaactctgcattctattacttggttcagcttgttcagagcttcagattaacaagaaaattcactataaagatgcactggatgaactcttggttattctcaaggctacaattttagaacgtgtcctttttttcctgagataaaaaaatggcgaaaataactaatgtctgacaaggaaatgatatgtactcctgtgcataatgcctaatttttcagaagggactgtactcgagcgtaatcagact

SEQ ID NO: 4142 - DNA, 5083 bp, Sorghum bicolor
gtagactactgcacattgttcgcttcaccttattagctgaatctattagttattcagcagtgtttttctctcacaacaaatcaaccaacagtaccatagtttatcacccaaacgaacaatgatatgttagtttagctggaacatctatttatatgtttattgtagttaatatccagtgaatacgttttgtggcgattgtgtttagttcagtttttgaagagtgtttctgctactataaaaaatagaacgtcaatcaaacggctagaatctgaagctcctttagaattagctgtgtttgctagaataggccttgtttagttccaaaaactatctaaaatttttcaagatttcccgtcacatcgaatcttgtgtcacatgcatgaaatattaaatataaatgaaaacaaaacctaattgcacagtttgactgtaaatcacgagatgaatctttcgaacttagttactccataattggacaacgtttgccaaataaaaacgaaagtgctacagtatttcaacccaaaaaattttaggaactaaaccaggcctaacttgcctaactttcacacgagcttcggactctgctattggctttcacctgttgttttctaaataggtggaaataaagaaacatttcatagctgttccaaagaagatagagagtaaatgttttatagttatttgaaccatacaacttataactttttttataacaattcttctatgaatcaatatcatgcatggaagtagtattcaaacaagtagtatacaactattcaaaattgcaccatgaatataaaatgttaatggttgtcatatattcgtttgtccaaaaagttatgactaaaaataatgttcgctgatttaacaggcccgaagttttaaaagtttacgtgcaatctcgttacaacactaaacatctgtgacatgagaggatatcccgtagaaaatatttatgttatttaagaaatgaacattttaaaagaaaaaaaagaactgcaagacagttccgtgattcggtcttacccaactactgtatggggcgactgatcttgattcgctcttaccgaactatcatcgggagactgatcctcaccctaaccaaaaaacgagagcatccacacccccgtgactgatctcagagtacagtcccgatcagcatcaacacgggagtggagtactttctagtgcctcgtagtagtatttagctattgttaatctcgagattaacttttagcagcagcatggaggagatatctttttttcaggtgtcagcgaacagagggagacgattggcgcagccggggatgctacacgcgggcagatcccgcagcctcgcttgcgctcatgtgcacgccctcgtgaaccgagattttctcttcccttttttttctcgatttctttttctcgtctgctcttggtggtcccgcggcggctcctggctgtgggggctccacgttagtcatgtggaacgggccgggccgcaggatgttgttttgcctgggccttcgggtagagacccgaatctcctcgtcctcctgttcctgtcaggcaggggcaggctacagaaatatttctgctcaaatttcctttttgagaaacagattttggtcgaatcacttccaaaatcgtcacttcggtgctaaaaaaaattcagtattaagcagccacgaggtaaagaattctcaaagctaaaaaaaacttcagtagatatgaaaaatttacagctagtattaagcagtgaaattaatgaaccctcgcagctcgcaggtgagagagagagagagagagacaacactgaaatcgaaatttaattaataaagagacccagtacggcgtggccatggcaaagcggcgtcgcaaaggaggttcccctgcccgcatggccgcgggggcgtcgacgaacgacgagtgccccagccacgagggcgctttcgtttcttccggtaacttccgcgtgacaccgttataaatagcgccgagctcaccccccacatgttaaactgctacgcccacacgcctccccagtcaacacacctcagctcgcgagctctcctcatctacacacagtccccgacgcccgcccgcccgcaccgctgcgactgcgacgccccgaccaccccccaccttccctgcctgccttcttcctcctcccgtccgatcggtttcactttcaccattcaccgtacgcgcgctccacccgccgcaatcgtactggcgcgttggacagggagctaggcggccggggttgattgcaattgggggaggcgggggtgggtgatgtacggcgcgccggtgcccaaggacctgaacctgccagcagcagccctgccgcagccgaccaccagggccggtgcgagaacgccaccgcaccagcagcagcagatgagctccccgggactgctgcggtacaggtcggcgccgagcacgctgctcggcgaggtcatgtgcggggatcaggacttccccgcggctgcggctgcggctggcggcgcaggggcagggcacggaccaccaccggaccacgccgccgccgcggacaacgtcctcgcgcgctttctcgccgggcaccaccactgctccgaggcccgggactgcaagcctccccgccccgccgcgtccgctcatcacttcatggacgaagccgccgccgccgccgcgtccatggccgcctcacagcagcagcagctcatgtaccagtcgtcgcagcagcagatggccgccatggaggggttgtaccgcaacgtcagctccggcggcacggagcacggtgcggccgttggcggcgccggtaacaacagcctgatccgccagagcagctcccccgccggcttcctcagccacctgaacatggacaacggtaattgctttgctggggcctctgcctcgccttgtactaccttttttcttttcttggtctctccagaagtagtagcatcccaatcatgcgctaggcgcctagctttccatttgcggagcggcgaactgatcgcgaccgattaatgcgccgccgccgcgcggcttgcaccttgcagggtacgggagcatgctccgggcgggcatggccggcggcgggttcaggacgaacggcgccgtcagcgacgcgcggctcaaggggcagctgagcttctcgtcccggcaggggtcggtgatgtcgcagatctcggaggtgggcagcgaggagctcgacggcggcagcagccccgagacggcggccggcagcaacggcagcggcgcgccgcgcggctacagcggcatcccagggtacacgatgggcgtctcgcccggcgcctggacggacgagccgtcgccgtcgccgacgtccggcgcgaagcgcccccgcgactttgctgggcccgtgccgcagaacgtgcatcagcagccgctggcgccgcagctcagtctgcccagcggcaacaacggcggcggcaagccggcggcggcctcggcggagatggcggcgatcgagaagttcctgcagttccaggacgccgtcccctgcaaaatccgcgccaagcgcgggtgcgccacccacccgcgcagcatcgccgagcgggttcgtgccctggagcgtgcagccatctgcattctaggctgctactactcttgaaactgattcgcgtcgttgtcgctgtcaggtgaggaggacgaagatcagcgagcggatacggaagctgcaggaactcgtgcccaacatggaaaaggtaacaaaaacagtgaaacgtcacaagattttttttttctttccctttttcacctctgataaaacagtgaacagaacagcgcaagataaactgacgaccagttattgttgatgactgcagcaaaccaacactgccgacatgctggatctggctgtggactacatcaaggatcttcagaagcaggtcaaggtagtatatgcccacatccaaaagcagttttttttctgccgaggccgccgctgatggcctgatatgataggaacttgaatgcacgattcagttatcgggtcgccctgagccatccgaaatgcttccatcaagtagatttgccctatggttgacggcaggggtaacttaattcaagccatgctcctgtcggcatggacaatagtgttggagtagcttaagagcgtgtccaatttattaatgagatggtataatactcgaatgtcaaaaggcgtccaaattctgttcatggttgctcatggtggtctctcgttggttccaggtgctgaacgacggccgcgccaactgcacctgctccgccggcaagctgctgcaggaccagttcaccagttagccgccgccttttctcggtgcgatgcgatgcgatgcaatgcgtggccatggccgcaaggcctgactgacgcctccgcgccggcagctcgctttctcctcctcgttgaagttgaaatagtaccagtgtactacttggttattacatatagttttacatgaggaggtaagcatcgtaaacaaggatggatataatatggaattgaaatgagagtagtctgtacatgcaagttcattagcaggcagagcaggacccgcaatgttatagtgatagctgcaagctcaattagagttggttcttggtacaacacaaggcgtggtgacagtgtgtctttgtcttgccccgtcgttacaccgcgtacgtactaccagcacatgcatgcacccaatccaatccgatgcattgcgactattgtgtctgtctggctgcgtacgtgcagcggtgcaggcagtgtcgtccaaatgcatttccctttacggcaagcctgcggccttatttaacagcaacctggtcgatcgtcctcatgtctctcgtccaacaataatggcatcgtggactaggagcatcgcctcctcgagcaggcgcctaagccctttaccagtagatttttgcgacacctactgctggtttatacattttcacgcgccaaacagaattttaggtaggtttgtttcgagcaggagtttgtgggtcgaatggacccgaacacagacaggttcagtgaacaatacatgtacgaattgtcctgtctcgagctgtatgtaaaaccgcacgcctcatccatctatgcaccccagaaaac

SEQ ID NO: 4143 - DNA, 5488 bp, Sorghum bicolor
gtaattagtttttattttcgtttatatttaatactccatgcatacgtctaaagatttgatgtaacggagaatctgaaaaattttgcaaatttttttagaaactaaacaaggccttactagtaaagctgtgccaaacaagcctaaagttgtgaaacctactatttgaaatggtgaataacgaattttctcgaaagaggaaaaaatgtcagagctgggtacagaagagaaaacatgactgctccgaagtcccggcatcggtgcggccacaaatgtactcaatccatcccaaattgtaagttgtttgacttttttaatatcaagtttgaccactcgtcttattcaaagttttgtacaaaatattactttttttgttgtatattggtttattaataaaagttcttcaagaatgacttaaatttgactatatttgcacaaattttttgaataagacgagtggtcaaacttgaggtaaaaaagtcaaacgacttataatttgagacggagggagtacttagtagcggcaagcgacatggacgggtcacttgcgtcgtcgtgccgctgcgtatacgaacaaaacgcgggcatgtggcggcggcgctcaagtttcagtggcctgttgagcagagcagtgggacggacgcacgggcagaaacgggaaaaaggctcggcgcactttgggaggacggtataggcatgcatcgatgcatcattgctgaccggggaaccggatcctcctgcgcggagggggtggtgggtgcacttgctgtggccctgccgaaagagctgctctcctggactgatcgatcatctcatctgatgccgatgctggatgctccacgacgatgagtcatctcatcgatgccggctgtgggctgacctaggagctagcgaaggaaaataaaaaactaaaattttatttagcacaactcaactttactaataaagctgatttttttttagaaaataaatttacggacaatttttttaaatgaagctgagctatttaaaaaaagtctttggtaaaatacttcaccaactacttttgcatagataagagagagaattaagagagagctataataaactatttttttagttttatctcaactcatatctctatgaaaggagaaaaaacaaattcacctataaaattattttaaaaataaatatttagcaaaaaaaatctcacaacaactttgtgctaaacagactctaacacaagtcagaacgaatctcctgcgcaattgaaaacagaagtcagacggtacgaggagggttgcgacttgcgagtgtcccttttttaaagaaaggaaatggaatatcaagcgtagcaacaatctatattcttttcattatcaaaatcaaagaaaaaaaaacagccatacaccattaaatacattcattctaaatatatatcatgtctagatatacttcaatcttcatccatatcccaaaagtggacgaaaatatatccattgagttaaacaatcataaatatgactaagtttttagaaaattttataatatttatatctttaaataggtttatcatataaaaatgtattgcatgattaatctaagcaatatttattatactcataaaatactactctttccatttcaaattatgtctttttagcttttttataggccattgcttttattatgcattaattgtagtgcatatctaatagaagctttgtatctagaaaaagacgaaatatttaataatttcaaatggagagaatattactcatttgtatatatatttagttaaattaggattgtatatagtaaaaatttatatcgaaaaaagaaaagctataacgcttgtggacgtgctaaatacgcatgttaaattaaatcagtacctttcgattctatttttatttcgtttgttaattcgctagttttgactctcgagtcttgaagagccggatgcggccaacacgttcagcagctctcccacaccacatgggaccaacacgaccaaacggagcagaagatccaccgaaacacccaacggcggcctcgtgtatgctttcgcccattcctgctcgccccgtttctccccttccatcctgcttccttctctctttttttcactcccgatttccaaatctcaaacaataaataaccagaagagaagcgaatcttctcctccatcaacccagcaaatcgctcgttcgagcgtccattcgactgagaaattatcgtccgtcgcccccggctggctctcccgttcgccgccaggtacgcacgcactgacacccctctggttggcgattgctgctctgattagggttcttactccgtacgctcgcggattaagggggatagagggatggatttttcgcttgatcatcccattcgttgccgttttagggctgtcgtctgacacggattagttttggcgcctcaatcgcgagggtggggtcaacgtggaggtacggattcctgtttagggtacataattagcaaatgagtagtggggagggtagagttgcgtgtttcgacatttccgtcagtttttttttcgcgtactgactatacattttttttgggggtgttaattgatactgtagggcccaatttcgtgtggacaggttgccgtgatcctttgctggatggggcagcgcagctagccacaggaggttgcctaggtttgagtttaatcgggttaccaaagtggtagttctcatggatcaacttgccatgcttgcgacggagctgggtgactcgtcggactttgaggtggagggcatccagaacctcactgagaatgatgtcagcgacgaggagattgagcctgaggacctggcgcggcgaatgtggaaggacagagtcaggctgaggaggatcaaggagcgccagcagaagctcgccctgcagcaggcagagctggagaagttgaggcccaagccgatatccgaccaggccatgcgcaagaagatgtcaagggcgcatgacgggatcctcaagtacatgctcaagctgatgcaggtgtgcaatgcgcgtgggttcgtgtatgggatcatcccggacaaggggaagcctgtcagtggcgcttctgataatatcagagcttggtggaaggagaaggtgaagtttgataagaatgggcctgcagcaattgagaaatacgactctgagaacttagtaaccgcaaatgcccagagtggtggaagtaagaacccgcacagcttgatggatctccaagatgccactcttggttcactgctttcctcattgatgcagcattgtgatccaccgcagcgcaagtacccattggagaagggtgttccgcccccttggtggccttcagggaaggaggaatggtggattgccttgggccttccaagcggccaaattcctccatacaagaaaccacatgatcttaagaaggtttggaaggctggtgtgcttacaggtgtgatcaagcacatgtctcccaactttgataagataagaaatcatgtacggaaatcaaaatgtttgcaggataaaatgactgcaaaagaaagcctgatttggctgggagttttacagagagaagaaagccttgttcacagaattgacaatggtgtatcagagattactccgcgcagtatgccagaggacagaaatggggacacaaatagcagcagtaatgagtatgatgtgtatggttttgaggatgctcctgtttctacatcatctaaagatgatgaacaagatctgtctccagttacacaatctgctgttgagcatgtcccaaaaagaggaagggaaagggcttacaataaacaccctaatcagatcgttcctggtaaggcaaaagaaccaccaaagagaaaaaaagcacgccgcagctccactgttaccgagccagatgcacgcagagttgttgatgcaccagaaaactcaagaaatttgattcctgatatgaatagactggatcaagtagaaatccaaggcaggtctaaccagattgtcatttttgaccatggggacaccacaactgaagctttacaacacagaggagatgctcaagtacaggtccaccttcctggtgctgaggttaataacttcaatagtgccccaactgcaaaccctactcctataagcatatgtatgggtgaccagcctttaccttatcaaaataatgacagcacaaggtcgagatctgaaaatagttttccagtagatgctcatcctggtttaaataatctgcccagcagttatcagaacttacctccgaaacaatcactaccactttccatgatggatcatcatgtggttcccatgggtatcagggcacctactgatagcattccttatggtgatcatatactaggtggtggaagttcaacttctgttcctggagatatgcagcagctcatagattttcctttctatggtgaccaagataagtttgttggcagttcctttgagggattgcctctagactatatcagtatcagcagtccaatcccagatattgatgacttgttgcatgatgatgatttaatggaatacttggggacataacattaggtaattccactacatatccttttatttgctgcttctttctctatggtaatttagttcttttttcatttcgttttcaggtcaggatgaggttgctagcatttgtttttcatccatttagtctcgccggagtcatcatcctaacttgagtatggaaggctaaacttctcattttgttgccggtcttgttatttgagaccaaccatctgttgtatgctgagtgatgacttgcatactttggcaataatgtatcatacagtgacacaattgtacatgtggaaggtgaacatggcctcacttaaatatgatatctttctggagataatatctgttgtagaaaggattttttataattttagaatcctcaagatatgattgttttcctctttgtcatcctatctttcgctatggcttttgccatctaaaaaaacatcgggaacccaacactgtatatgaaataaagaaatgaaaaaaaaatacttttgccattctctctgttgtgtttgtgtttgatttcaatgtccgctcagaaatgctgttgttgcataacaaagtccactactagcttcatctgctgattgtagttgtgcagcaaaattgttgttattacacttttaaaaatatataaaattgagataaccatctttgcgcattgaagttcagatttgtcccaaagtagtagcaataagttattataactaaactgttctcttgtgttatttaacactgtcaatgtcaaatctgcatcatggctgagataacctgaagatatgtacgctaggctgttttgccgaccatttggtgtgactgttggtagaaattcagtgcctacgaaaagttgcttgccatgctggtagttcttcaaagttgtattcatgcataacacatccatatttaaataagaatttagatattgtgtttcttctattagggatctatacattgtactagaagt

SEQ ID NO: 4144 - DNA, 10407 bp, Sorghum bicolor
tggccaaactatccaataaacgggcaagatgtgcaagagtactagatttctagttactccttgccccaaaacacatattattcacatgatgaccctgctaaatatgatactcagcttaccaatcccatatatgacatggggtctatatgaaaggtgtttaagactcacaacgacatgtgcaatggtccttagtcagttgaagcaagttatcccattcgagacctgagctcgccatgaccctactcctcgccaagtcttcggccacactcattttcttagtcatatttttagctatttcccctcctagttgtttattagctaaagcaatcgactcctagtttgcatgaagaatgacaatcccattacatgctcgatttctatcgggctaagcaagctaaccatgtataacagtctaaaaatttaaaaacaacacttgaagacatggttatgaacaacaagaaataaagactacaggttggtgcatctaagacatgatcatacataagtaaaagcaaacatacatatatacataacacttagtcaagtttatgcataggaatttcctaaggagtggaaaggatatgacccagtttcacaagcaaagttgggtatactcatgctcataatgcttagcatgaccacaacagaaaattccatttttattgaaattaatctttagacttgataattgttcataaaacgctgagcaataattttatattcttagcatgatccataaataagattatataatctgtagcaaaatggataatccatgactaattatattaatgaagatatttgtgtggttgttgtccttgtttggctctacatggtgcccccgtaacaatctttgtttctctagaaaaaacatttcacttcttttatgtgggctgccttgagaagaatatattgcctacagttgtggatgctgctgcaatgtgataatacaaggtatattgtcagcttggtgagcacaactttgaaggtttaattggcgcctaggtgtactgcaggctacggtgccgtaaatgttgtgaactctggctggtgacagagttaaggcgtgccgcaacgcaatgaaaccacaccaacataattcaaatttgctgtgtcacatcatgccaaataatgtgtggtgagcgtttttaacaccaaagatttggctcagccgcaggtgtggcccggcagtcataggcatcgtccaaacaggcgctagactttgctcattatttactttcgtttgtgtgctcttttcccttatatggatcggctattaagtatacaatattgtaagaatttaggtttttagagtcacagaggcaaaacatttatattttcttcgttttaaaaacatttctattttcgagaaaaataatggcattaatctaggattatatgggttattgagtcgatcatcacaaagtctacacatcaccacctatctcgccatccacgtgaccggcgctatcaacctctaacgctccgtttggcaaaaattcattaatttatttgcgactggtgggactaatttgttgatcagcaaccatttatagtgggattagttggcggacatggcgtagagttgtggtatgactatatataatgactactctctcggtccacaaataaatacacatctcacatttccaagaagtcaaacttttttaagtttaactagattatatcaaataatatcaacatttgtatctgcaaataagtatattattatgaaagtatatttcatggtcaatctaatgatacatattagtatatttttgtatatatttggtcaaaattaaaaaaatttaactcctgaggtctcaggaaacgagacgtatatgtatttgtgaatgaaaagaatatatatataattggtggcatgcatgagtaattgatcagtgatatatgctctgtagctgcaccaccattccgtcatccccgagctgctgtgtgtgtatatatataacgtttactaccaacactacatacctctgcctctggcttcctgcctgcctggacgtggccgttgctcccaggcacagagctagccgaagacggaggccggcaagctagtgtatacgttaagcttcagcagcagggtgcaagaggggagccttgcacgttgcactagacagtagaagacacacgcaagatatggccggacgcactacggagggggctcgctgcagcggggagacgacggtgtgcgtgacgggcgccggcggctacatcgcctcgtggctcgtcaagctcctcctctcccgcggctacaccgtgcacgccaccgtccgcgacccgggtaagcaccacgccggccgtcccggtagtcgccgcacacaccagccgccgccgccgctatgtcgatggctgctgcggtgctgccgtctctctgcctttccgggccgaggtgtgcagtagtttctaaaatttttcaaaaattttcacgaactagaggcctaatataatcgtggccgacttacgataatatttcaggtgatcccaagaacgcccacctggggcggctggaaggggcctcggagaacctccggctgttcaaggccaacgtgctcgaccagaacgcgctggctgccgcagtctccgggtgccggggggtcttccatcttgcctgtccggtgcccacggataaggttcttgatccggaggcaagtgccagtaccgtaccacttggtttattgctttgacatttgtattttgctacgataaagttaaattactatgaatctttgatttaaatatctattaatatatattacctcaggaaggtattagaagagatatatatatatatatattagagagtagaccaaaaagtaggctgagtatcttgtgataggatcttttagctctactagtgcgatggataaagatcaatgacatacatatatggtaacatatatacgtgactgtgaacgtgtcggacagaacatgacttcatagtatgtatttctcatgattttaaagtagtattcatataatttcttagtatatacacgtacaaggtagaatcaatctagaaaaaaccatccaaattcataatttaaaagtagtatcttgtcataaaatttcttagtatatatgcacggcgagccacaacggtataaaccgaatttcaaaaacaggacattccaaataaaaaatagaaaatggttggaaaaaaatctaaatcatttttgttccattttcgaatttagtattatgtatttcaaattgaattcaaatttgtacgaaaatacagatttgatcgggtcaaatgtagaaaataatacggttcgctacggtatatattccgactgttttcatccctagctcttagcacacttaagttttctctgttcatggatattgtcaaaaaaaaattaggaagccatgtactcaagaatcagtatctatactataatggaccagttaaaattatactagatctcccaagaaaaacgtcccctactgagagtcgtaaactattttgcacccagaagaatgtacacaagaaattgtctctattaaaatcaaaggctaaaaacattcttagcaggcttcaaactgaatctgatggctgagggaataagtttgatgccaggcttcaacgccgcaccccgccccgcccgcccttcaccccacgcatgcgctcgtgcggccagggatccaatcacacctggaaaaaaaaaagaaaaaaaacaatagcgctttctgcgactggcggcccgtgatcgtaatacaagccaccacacgcgcagctctcccctctctcgcgcgtgagtctgattctgcgagccacaacggtataaaccgatttcaaaacaggatattccgaataaaaagtagaaaatggttggaaaaaatctaaaccattttcgttctatttttgaatttagtattatgtatttcgaattgaattggaatttgtcaaaaatacggatttgatcgcgtcaaatgtagacaacaatgcggttcggtacggtatatatattccgactgttttcatccctagctctaagcacacttgagttttttctgtacatggatattgtcaaaaaaaattaggaagccatgtactcaagaatcagtattaggataatatcatgtagcaaaagtaaatttatggagcatcttttaaaaaatctggaaagaaatttctagggaagggacacagtgtttaggtgtttatagggtttgggaacgactggttgcgcgcatggtcggggatggcatggccttttaattttagtcgagttcactataattgtatttgcaaaaaaaaaagttcactataattgcgtgaacgtaggaacactggcttccctcacgtgatcgataatgcaacaaaatgaactgaaatgggcaacaatcagcttttaggcatagaaatttcagcaataaacttacgtttagttttaactcactagtcaccattcatattgatacttgacctagccagccgccggcgaaggtgcgcaggagataggattggattagaaccgtgtccctcctgggcgaccgaggcagacaaaagatgcgacggcgccgcgacagagcacagaggcgaggcttctgcggtcctacgcacatcgcagagctgagaagactgctgtcaggagcgcatccgcaggagcagtgatgggacgcgaagccgagaagagactgtcgtcccaccatggacaaggacggaaagaaacgctgtgtagcaacggttccacttccacgccgagcttcaggcaacacacaacgacgccctgataagcgccagcacgacaccgagaccacgggtcgagggagcgaattgctgaatcagcgcacgcgccttgtgaactttcatatataaacttgatttatgcccgtgcattatattaggatcatatttttttagttaacctcatcactcagacatggacgcatgagctttgaggatttcatattagacgtagacacgtagatctgacaatatcgtattggacttggatatatagaaggaacaagatttggtatcatggaataaatgattactttaagtctttttaggtgtataaatataaatttacaagtgaactgtaattttaattttattatttttttacttttaaaagataatgatattttccgatctacttccaagcatatacgtgcttataagttatgatcaatcatgcttatttaaaaaataaataaataaaatcaatacattaaaaaaattatgtaacgattgggtacctgtacgtccttagatcaataggttctagtcctatcgatctattttagactttaatcttgcttttatgggtgagtcaactagctaatgtgttgactcaacctatacccatttatttctagatttagtatttgccttgaatactcaacatgctcatgcatgattgatttatgtgcatttatatggttagcacagtgtcgggtactacacatgcataccttgaattagagcaagaatggtcgatgctggttgtaaaggttattttagccttcactcagctcattcatatagaagttagcttttttagtattaatatatggtccacttatttctctcataaaatttctcggttcttatgtttaaaccggctataagcttacaacttatttcttctctctctcctttccaccttaacatttagttaccttacagctcttaggccagtctcagtgaagtttcaatgtgagtctcgtttgcattactctctagtattaatgcatagcctacttgtctctatcacaaagtttgtttaagccaactataagcttacaacccgtttctcctttctctcctctcctctctctcctccacctcagcatttagccaccttacaacctcttaggacagtctcagtgagagttttattgtcagttttgtttgcatcaaataggttgccacatacatgtttttgatgacatgacaacgtatttaagaagagagatttctcttgtttttcctactgtgtcttgtaagattaacgtgtaggcttctttggggctccaattattagcaatagtaagactgagaatagtgtataatccagatttttggttttgtcacagccataatttccactgactcattgataccaagatgcaatttttttttatttgcattttgtgtcgtactgagctgtttatacataggagatttcttatattttttttaaaccatgcagtcagaagtactggctcctgctgtgcaaggtaccttgaacattcttcaggcttgctcaaataataatattcagaaagttattgtggtttcgtccaccgccgctgttcatttcaacccaaattggcctcaacacatacccaaagacgaggagtgctggtcggacataaacttttgcaaaatgaatgaggttagtgctagtgccagatgcaagaagtttacttaggcctggtttagttttcaaaaattttcaacacgtcgaatcgtacgacatatgcatggagcattaaatatagataaaaaataactaattaaacagtttgtctgtaatttacgagacgattcttttgagtctagttattccatagttggacaataattactaaatacaaacgaaagtgttattgtagccaaatccaagattttcacgaactaaacacggccttaggagggttcatctccttcctatgtcctcctctcgtctactctctctcatgtccttcctctccattgtgttccagcatgtggtttagtcgtttatccctttggttactcttgttttgaccacgacttcgtcttgaacaagacgcactgttatctctcttaggctgagtcaaagaacgcttcacggtcacactaaagaaacctagaatccgtactttcaaccatgacttttcagacaaacaaatagatttttggtacacctcaatcttattctcgaagtctgccaaaaaaatagtagtattgggcagtttgccgtctccccaaatgcaatcatccgtagtaattggttgacatgattttcggcactcatacaaggtggatcacacattgttgattcgtttcttcaatcgaatctaaaacatgctacatgaaaagaaacataatacatatttattaattgtgagttagagatttttttaggaactgtcttatataaatatatgtacacaaaaataaaagattaagtatatagctaagtggagaacagaagaactcgtgaggaggtgctttatataaaaaggaaaagccaagaactcctaagaacatctctaagtgtctttcttaaacttactttctaaataatcatttaaagagtcatttgaataaaaaattattctctatatctttttgtcctccaaacttttttttataatcctgtgctcactctaaaaggtcaatctcgctctttatctttcgagaaatccgaaatagagaatatcaatatttggttcctataataaggaagaaagtagagaggcctttggagttgctttaagggggtgctttatataaattaatattgtatataaaaaggaaaagacaaagcaaatagctccacctactctatctagtgcccaacccaagtggagattggagaacaatagaactcctgagagtagggacaggaggggaatatgggacaatgggtctaatagttatgtctctttgaagaaaaacaatgagttccttatcaataaaagtccatccacaaactttagggttttttcgaggtcatgtctcagcatatgttttccacagagtgcaggttggtacagcaacaaatttaattatgtttaccattacatattcttatttttaactgttgtctctaggggggacttagttatgactaacctagttttgctggcaggactggtatatggttgccaaggttattgctgaaaagacagccttggaatatgcagagaaaaatggactgaatgttgttacagtttgccctactatggctttaggaccgctcctacggcctatggtcaatgtcagccatgaattcctgctatacattattaaaggttgcatcatatttgttgtcttttttagatatttattgttacttattaggatcgtcacagatattgaattttcttgttatttattaggaaaattaattacttttagcaacaaccaactttatttggttgaagtttttttagctaggataactgtacactagtttaatagacttacaatagtgttagtttactcatctaaagtatcattaaatggaatacctttttttagattatggaccaagtagagccctagacacaataatgttctaggacaaaatatctcatgcaaactactcctaggtgcaatcatgaaagccccttgaaacatactcctatatatacttagaggtttccaaaaaactttaaaattatgtacattcaaagtgcatttatatatatacattgtagcaaaagtgaaggagcaaactcatcaatctaaaaaaatcatgcatgcacggttgaagacagaatccttgtgattaaccggatacaaagttaagagtccatacccagctaaggcagcgcaagatggttcattgtatcctatggtaacacttgattcctcttaggacatagaagctcttatggtttagttctagatgcattgcatgtcacaattgtaatagagtggacccttctccccaatcaatacaaagccatcaaacctatatataaaatgattgcatgcccatgtgcccttcatatacgttagttcatagtgtaatattaaaattctcataaaatattcatacttaaacaataaaaaggcttatatgaattttatagctatcgacgagttctatagcttttaaattttaagtcattgagatgacagaataatcaacttaaattttagttggcatcaaagaaaaaaaactcatattttaatcagtaacaaagtatgcgtgggatggtaacaaagagtgaccaagtaagggaaagattgtgggtttgaatctaaaaaaatacatgcatacacgcatattcacgtggcaaatgtgtgatttgtaacttgctatgtgcaaacatgtgggggttggcatcaagattttgtctcatgattccagccttacatcttgacatagctaaatacaatgatttttttagcagaacataaatgaatattcacagcagaaaaatatataattatccctatgtagtagcgtaataacgctaatgttactcaaaatattattttttaattgccttatacactgagttgcactacactatgcttcatgctcttaaaagtatgagaaagtacaacaccctgaaattccattagcttggttaaaggaggtcctactgtgatgaggaacattccctggcacatagttgatgtccgtgatgtggctgatgctttgcttctcgtatacgagaaagagaaatcagcaaggagatacatctgcgcgccaaattacatcagtgcgatagatctggtgaacatgctgaagaaggctcatcctaattacaattacgtaaactggtgaatctcttatcacacatctatgagtgaattttaatggatagctcttattttacatggtttacatctctttgctgcagcggcaatgatttggttcctaactctatagttacgccaataatgtcggagaaactgaagaatttgggctggaaaccaaggaagacgctacataaaacattgatggatagtgttgaatgctatgagaagatggggcttctgcaagatgttgagggatgcccttgccgtcttcctcacctttttcatatggctatagaaaaatgaaggaaactctgcattgcttctagtgttacctaattacacttaaaacattgttggatatgttctaatcacacaccaacattgtttatgatgttcaatggagagtggttgttttcagataaaatgtgtggattgtgatctaatctatatggaataaagtgcaaccttatcactcagttttgtatggaaattatctttcatctttttctttcaaacaagatggcaaaaacatcacttagtttagaatatattagcctactcttaaggaaaactgagctcagaaaccgaacattagatgctgcatgcggaagctgaagtgcaggtgtcctgtatcacgggactaaggagaaaaacagttacaccttctatcctagatggaaggagtatgaagcaagtatatggtccactcaaagcggcttgttgaccatacaccctaaaaactagagacaaaacaaagtccaatgtgtcatgtgtgactatcatgtagttttcatatttctcatcataatatgggtttggacggtgtatttgtcacctgtgttatgcttgatttttgattcacaaaatgttggccctgccactctctttcatcgtttcacacaatccctttttgtttctcatatttttccatagttcacttacaa

SEQ ID NO: 4145 - DNA, 3286 bp, Sorghum bicolor
  misc_feature (1248)..(1347): n is a, c, g, or t
tagaaactaacaaactaagcactatgtccaaccacttattcttggaggaaatctccattgacgcagttttcaacatttggcatgctcatttcactctagttctttatgcctctttgtgtagaatggaccatgaatggtccagtgactagtcctgaaaataaaaagtaaataagagtgcaacaatttatgaaaaaaatatatttctagacaatcatacacttgctcccacatggatttgagattgcaaagtagggtctagttattttatccatacattgagaatgtatttcacaaaatttggtggtcatagactaaatgcgaattaaactattctcaaaataatattgtattatgataaccaaacatcaaatattggatggttttttaattgttaaaaaacaacaattttcatcacatttttaaatgtctctttaagatattctcttttgtcaagttaactattgattaagaaccaaacaaaaatcttccattttagaggtaactttagcttacagatcaatctatttaaagcattacaatttggttagctaaaagcttatacatagattgtaccataaacacctcttggaacataacgctacatttgatagaatcaagttggtcattgaattacacaaaatggtacttttctggctaactcattccatgattcacagtttatatgccagtagcgctatatgaaaaagaaatattaaaggaggtaatactaaacctctaaatgtcttccaataatgtttcttaatgtggccaacctattttggatgggccaggagtgaagttcacttctagagtggtgatagttgttagtttctaatttgtgcacatgtatattcaatcatgtgaccctgtttataaataggaaacatacatctagtattatacttaccaataagttagcacaattggaatgtttgcagccaagttgttaacaagatgtagcattatgagagtgttaaaaccctccaaatgctattcctatgatctgcttaccattggtgctctaggaattaagggccaatttggttcccaagcgagcacaactacctttttggcctgagcaagcttaccttgcttccgctggcgagccaaatttgcttgcctgtagaagcaaggaaaatgcttgttagctcaagtctgaagaaaggcttactaagcaaccaaaaaacgtatcctaaatgatttatatgattaatatgtgtgtgtgtgtgtgtgtgtctatatatatannnnnnnnnnnnnnnnnnnnnnnnnnnnnnnnnnnnnnnnnnnnnnnnnnnnnnnnnnnnnnnnnnnnnnnnnnnnnnnnnnnnnnnnnnnnnnnnnnnntttttcttaaaaaaaaaacatattctctcatttaaaaaaaaaaaaaataattttatttaaatatataaaaaaaattttaatatatacacatataaaattttatatatttttttatttatatatatatatatatatatatatatatatatatatatatatatatatatatatatatatatatatatatatatatatatatatatatatatatatatatatatatatatatatatatattacagatacgttctatatccgaaggatatactcactaatgttaaaagatatgatagctaaatcctactattgtttattgttttctctatgtttaaagatagtatcaatatacctacttgcttattccatatcttaaggatatcatatgtttaattacaaacttgtcgtttatattaaagataccatcgacacagctgcaacttatcatttctatcttaaggagttaaggctatagatagtagccagcaagtatttgatactatattacatataccattagtacatccacaaacttctatataaggaggtccactttggcttcactccatcaacaacatcgcaatacaaacaatcgagtatcaaaggtttgcaaggtcttcctcagagggaggaataagaagttacataagagtatcatggacactgttgctccacatgtactcatagttgatgacacctttgttgatcgccttgtggcatctcgagtcttaaagaattgtaacattcaaggtataatgtcttaagttttctatgctttcactcaagtttttcaattttaaatttcccctttttaataataatattattttgtagtgacaattgtggagggcccaaagcaagccttggaatttctagatgtggtatatcaatagtttatatataactaatattaatagaaatgcacataatttagtttatttggtttcatactgtgttttgacatgttttcgacataacatttgtatacaggagaatgatgtaaatctaattctaactgattattgtatgcctggtatgacggggtatgatcttctgctggaggtgaaggtagactcttttcttaaataaaaaacttataatatccatggtcacatagttttatgatatatattgtgttgaatgttttatgtttgtgtcctgaaatatatagaaaattaattattaactaaatttgttacacccactcaggaatcaccaaagctaaagcatatccctgtggtgatcatgtccagtgacaacatccctgaaaggatgcaaaagtgagtgaagcttaaatctatcaagcaattgcattatatacatcagtatcatctatatacttaatttatgccatatgcaggtgcttggatgcaggggccaaggagtatatcataaagcctatcaaagcagttgatgtgccccgtattttgagctacatttgataagaagatgagggcaaagaaaaaaggaacaaaagaactcactatagggttctattttcaattatctagaaattattccaagaagtccttgcatggtcttcttttatttcttcatcatcatcaaatctatgtattttgcttcaacttcaattagataatttgtgtttttttccaaaagttgtttgtatcttagatccatatgatgtatgatatcttataagcttaatatgatgatggatcatatcatgagttttcatgagacattgattaaatttcggcaaagtatatgatcgttttttatcaatactcccttcctcccggtatataaggcgtaaccacttctgattcaaagaccaagaacatatttaattttctctcgcagcactagtagtactgcatttatatttgtgagagagcatgccttatattatgggacatgagcaaaaagtggttatgccttatatactaggatagagggagtattttaaatgtgtgtccat

SEQ ID NO: 4146 - DNA, 6067 bp, Sorghum bicolor
cagtctgatggactgccacaatgcaaggtagtgtctttctgtctttcaagtggacaagatcgatgacagtttggtatactctgtttccaacctttgagctgatcaacatggtgcttgccactcctgcatccctctgctaatgggcacaattcaagtcccattaaggcactaaccacacatgatctttgagttgccgagccttaaggattactagtatcataacaaactgcatgcgccaattgcaaaaggaaacgaaaattctcgattttttattacaaagaacaaacaggccggctcaactctttgtctgaatccacaaaattcaaattgtgccacaaacagcaactagccatttctgtgccaatgattaaggaagaccaaaggaaaagacaccacgagctagctacaaagtgaacaataacgcaagggaataatcctagagtaggcttgtactgtgtagatgactgtgaagtgctcaacagtttgctgctgcaatttgttttctacgcgttggttggggtcacagggaacccaggcccggcgcccctgcctgactgccgctcctcctctcctactaccccggcccggccgggtcaaggggagcgcgggcccctgcggacgtggccgtatctggagcccgggcccaccccgcacgtgtcctgttttgtttttccaatgcggtttgctgctagagttttgctgtgctcgagtactgctgctcggtctctcttcgttgccgcgtccatctatcgccaggtgtttcaaaattccgtgtccaatcctttgtaattaagtttgtataacctctccactcggagtatatatatgtaaactaattcagttacgttgcaatcggtcgaaatggtacatgtactattgacttccgttatgaaattctgttcagatagcggctatacttgcgtatacgtatgtatgtgtgtgttatctccctgcggtagttttgcctatatttcttttctaggtcaaatgatgagttgattttttgtcaaggatttcgtaacgcgttcagttttcaagaggtaattttgtcgtggatttcgtacgaccaattgagtgatgggagtatgggactcagctagataattgatcatttggtatatgcacatgcaaacggcaaaaatctatggcagctaatagccagaacatacttacgtgatgtttattattttgaacacacacggccggtgagctgagctccatatatatatagatagaatgcaattgttaactgctgcaagctattgagctgcatgggtacagctcaatcgaagctatatatgaaagagtatatatattatattaaccaataattatatatctcataataaattaaattgactactagcagctagcaagaaatggcgcggccatgaaaaggcgtggcgtactgcagactactggctagtacgacgtacggtcatatccctggggcactgttgcgatgaagatgacacggcgagttgaaagctacaacggcgagcgcgtggaacaagacgcgcgcgacatgcgacgacgcatgcacacacacacacccggcccggcggcccgccacagcagcttgtagctcacgacccctggtaggtaaaagcttctccaaggcgtctcgcgctcgctcgtcaagcccgccctcatggcgctggcggcccccctatatctctgcccctcttgcgtgaaaaaacaccccagatatctcagaaagggcaaggaaagtttaaccagcagctggggagcgagctagcgagctgccgtgtgtgcagtgtgttcttcctcctcctcctgtcgtcgcctatagctagcggctccttatcaaaaccctttttgtcaaatcatttcgttcttgaatccgttatagctgcctgctgccgtcctcttcaagtagtgcaacaagaaaccggaagaaaaccgaagaagctttatcttttgcggcagggtagggttagggttttttcggttctgatcttgtagatcatctgagtagtatggaagcaggaggaggtggtggagggggagggggagagtcgaagaagaaggaggagagcttgccgccgggcttcaggttccacccaacggacgaggagctcatcacgtactacctgcggcagaagatcgccgacggcagcttcacggcgagggccatcgccgaggtcgacctcaacaagtgcgagccgtgggatctcccgggtaaggatcggaaaacaattgtatatatatacacgcacatgtatgcatgcatatatactcacgatcaaatgaactccatatatataaatgattgatcatcaaaattcagctacacttttttcttaacaataacatccgcgtgtttagcaatccataattattatatactactttgctctctctctctctctctctctttcatttttagggaagaattgcatatttatctacacataaaaatctggtgcatcatatatatgttattgtttacttatttgttatatccaccgaaccaaatatagatagaacacctataggtacgtgtagatgtgggcatggttaatttccaagcatctaccttacctaggaaaagagttttccaattgccatgcttttggtgcaagtttttcaaaagctagaaaaagcctcaaaccaccactactcgttcagatcgatatcctacatgaatgggtctcaaagttttctttatttgttaagttttttatactcttgctgtctaatctgtcgtccttagtttagcttggtttgctatacctataatctatgttaaatgtgtattttgtctcatcttcgtctctttgcatgcatattttctcttctaaaagaggtatatggagatttcaagctctcatggagtcatggtcttaattagttatttgttctcaaaggcacaactatttttcatccttgattttactttaattctcagtatatctaattcgaaattattggcgacactggtgaacgactggatgtgtcattaataatacaccttctctatatcttaggtgcctgattttttctgttgttcagaaatcagaaaacatgcaattttgtcattgtttggctatagaaaaaaatatttttatctcttgtgaattgttcgtttcattgtaataccaattgtctcttgttagttgttgcctgaaatttttaaaaaattgaggcacctaaaatatagcaactactccctccatcccaaattgtaagtcatttcaagaatcttggagagtcaaacttttctaagtttgaccaaatttatatgataaaataataataattatgataccaactaagtttcattagattcttccttaattatattttcatagtatatatactcactttacgttacaaatcttagtatttctctctataattttggtcaaacgtgaaaatgttttgactctccaagattcttggaatgacttagaatgtagggagtacctaataatgttgttttacatcttcgtgtcaacaaatatgtccactatagcaatataaactatctgcaagatatggcaaaattgtataaattgtttttcatggtcttgatggtcaaagtctttttaaatgggtgtattgcatatagaactcagatgacaatattttgtgagagtggatgaagcattttttttagaggaagatatctacgcttatatattttatttaagttctagatccaaatatatacttataatttgtccgtccagaaaaagtaaaatccagagaataatagtgagatcaagttggataccatgatatactatctcttgtacatgtcgttttggagtttggacatgcttgccgacttgtgctctcttgatcactggaccgtagagtgagagaactgctcagcccaaagtttttcaactttaactcttaataactaatacctccgtgtggaaaagaatgcaattctagttccgtctttagtgaaactatttagagtttaaccaaattcataaaaaaagagcattactatttgacactaaatagacgtattatgaaaatatatttcatagcgaatctaaagatacttgtatggtatcacgaacattgatatatttctgtataaacttggtcaaactcaatatggtttggctcgatactgatatatttttgtataaatttggtcaaactcaatatggtttggctcgatactaaactagaattaatagaactagattcttttcttttcttttcttttcttttcttttctggaaggtgggcatagaccggaaacatgaattttactatggataccttatgataatatacttctcatgggctatcatcaatatatatataactggttaaaagttagcattgaaaaataaagttgcatttatttattcacgaaaaaagaaatttgtatttatttgttaaactgatgccagagagaaagcgaagctgggagaaaaagagtggtatttcttcagcctataagagaccgaaagtacccaacataaagttgcatttatttattcacgaaaaaagaaatttgtatttatttgttaaactgatgccagagaaagcgaagctgggagaaaaagagtggtatttcttcagcctaagagaccgaaagtacccaacaggcgttcgaacaaaccgtgccactaacgccggatattggaagacaacggggaaagataaggaaatctacaccggtcagctaccggccacgccagagctagtagggatgaagaaaaccctggtgttctacaagggaagagctcctcggggcgagaagacaaactgggtcatgcatgagtatcgcctgcactccaaatcagtccccaaatctaacaaggtgcgctaaatttcacgaagttaatttaattttgatcctaatagatagacaaaattaattaatgaagatgttttatttgatgatttgtatggcacgcatgcaggatgagtgggtggtgtgccgggtgttcgccaagagcgccggcgccaagaagtacccgtccaacaacgcgcactcgcggtcgtcgcaccaccaccacccgtacgcgctggacatggtgccaccgctcctgcccacgctgctgcagcacgaccccttcgcgcgccaccacggccaccaccaccaccacccgtacatgaccccggccgacctggccgagctcgcgcgcttcgcccgcggcacgccggggctgcacccgcacatccagccgcaccccgggacgtcggcggcggcggcggcgtacatgaaccccgccgtggcagcagctgcgccaccgtcgttcacgctctctggcagtgggctcaacctgaacctcggcgcctcgccggccatgccatcgccgccgcaagcactccacgcgatgtcgatggcgatgggcggccagacgggtaaccatcatcaggtgatggcaggtgagcaccagcaccagcaccatcagcagcagatggcgacggcggcggggctcggcggctgcgtcatcgtgcccggagcggacggagggttcggcgcggacgcggccgggggccggtaccagagcttggacgtggagcagctggtggagaggtactggcctgccggctaccaggtctagtagctgtgtggatggctgcccgaagtgccgcgagcgacgtgacaacgtaatgttggtctatggatcatgtaggaggacaagatttgaggtgtctttaatgtagtccgttgttgtatcagtaccagtagctgaaaattattctctctctttttttcagttttttgttgtgctgtaatgttgtctagggattattattagctgttgtctcttggctttgtagaaatcggagcaggataggttgataacatgcatgagctcatacagggctctgtgtactactcgtccgtgcgattgtttcttataagaccttgttagttcaaaaaaaattgcaaaatttttcagatttttcgtcacatcgaatcttacgacacattcataaaacattaaatatatataaaaaataactaattagacagttatttataatttgcgagacgaattttttgagcttagctagtttagaattggacaatatttgtcaaatactagcgaaaatgtta

SEQ ID NO: 4147 - DNA, 5566 bp, Sorghum bicolor
cggtaaccggctcgatgttctaattatgtccctgtccaaaggaagaagaaaaaagacgatgacgagtggatctcttctgtcattctctctggaataggtttgggggcccaaatttatgtgctaatgttagagttgaagcaaaaaagttgagcccccaaaagtagagggagcacccaaattaaaagtagaggcctagttttagagactagtgctgcagttgctctaagccgtatttttctgccagtcagcagtgtttttctctctcgtaataaatcagctaacaatattttcaaccatgatttttcagatcaacaggcttttagagaggaaaagtggactttcgtaaaaattaaaggagataccatggacttttaaattagatctagatctgttttgatagaaccgaaggtggtaaaactcttctgactagaccctcactctacactacttcatccgtcccaaaataattatggttttaagttttcgtgttaaaaatttgactagattttatataaaatatgtgcaatatttgtatctctaaataaatttattaaaaaaaataaatttaaatatctttttgatgatactaatgtaacataatattaaatatttttaaatatatatttaatcaaagttgttttataggaaacgagaaccgtaattattttagtataaagtgcattgtagagtttattctagaaaattagagtaattatttgcagttaaaaatcagcttcgagagaatttggagctgtttcttaaaccatatttttttccaatccattcattgcttttaacgagaagactgccacgccaccggctagcctcgtcggctccttcgcctggtcgtcgtcgggcccttggccggcgacgaacaccaatcaggtgtgcgcaccccctctcttcccttccttttgtgcgaaaccgcgctccaaaccctatgtattcggatctgttctagttacaagtgtatatacatgtatgtattatgcctactaaattcgattttcttgcaaaaagaaaaacattggctctacatgtgtgcaccctgattttaggcatataaaactcaatttacctcatggtcttctggatcgatgttcgactgtggcatgcttttgcagcaattgtgtttgaatcttaattccagattaaactttttttagaaaacacgaaaggatggcattgaaatttaaggcatctggctacattatcctgaaagaggaagcatcctgcaacaaagataatgatagtggtaaagatggatcacttccaataagaaataggtatccgcggcagcatcctatcattttttttgatgttaaagaaggatgcgataggaagaagatagatgaggtatgataactatctatccgtgtgatatttcactcctatttatatttcttcccttagcaccgactcttggcattctctttcagttcctgctgcaatggtctattcctattgccaagtcccggccaaatgacataatcatcccagaccctgctccccagatttgttatcttcattacagaagttgattgaacattcattccattatattaattatttcgtttaatcatgtaatattatagggtagttaaagtctactgtacattgttgtcatatatgaaccttgcctaggaacatgaatcacatgcctgaaccatgataggctttagatcccctcgtattctctctcttcccttcttgttgcatgttgggtttcatggttttatcattgctgctattcttattgtcatatatgcacctccatggactttatcttgatgtgcttttttatagttggataactgatgcctttacctttttcaactgcgatgcatccatctagtgggtgaatgatatcctctttgataaattcgacgagctgaagcgcatctttataaaggatagtgtgcggcgcttcctccgattattcaagaactgtggaggcaggggcatgtcatggagtttaaccgtcaccgcacttaaacctcatggtctgttataatgctctgcgatgtgcaaaagttgtactggagggcaaggcacctgagctcaatggaatgcacgccaatcccaactgcataaacccatatggatacttcccgctccatgaagctgctgaaaggttctcttgtgacatgatcaagttgcttttacgccatggcgcatcagccaatgtgcacactgttggcaatgatgtcatcgagaacctacttccactccatgttgcaattgagaatacttgcatgcataagtatctggaggacaatctttctcccagccagagtcatttggattatatctacaagcttatccatctgttatgtctacctgaaatggtttgttttccttccctgtatgagtttcttgtgcgcatgacataaatgctaaatgacacttagattttttttccttggtgttttacagaagatcttcttggatacaactagattgcttgctgaaaaaacaaataatctacttgaagagctctggaactacattgagaatggaaagcttatccagtctgcgattctactactggctgctcaggagcacattcgcaggggttgttcctccaagaaaaatggtagcagtaaaaaagatgggttttacgttatcaataagcgtatactgtggctttcatttgccttgagatgggagaaaggttcaaatgaaatggcggagaagcttctgaacgaaagaagagcacttattgattgcacagggttgcttgttgatgtaatttcccaaaccggtcaacgtctttcttcatatattcagtcacattcagaggtattcattttttgttaggaaaaagtctacatcaccccctgaactatggggtggtgtctactttaccctccgaactatgaaacagtctaatttaccccttgaactatccaaaaccgttcaaatcaccccccgggcggtttttgaaggcggttttgctacaataccgtggttttgactttttcttttttcctatttgttttcatataatctttaaaaaatcatagtaaatcacagaaaaatcataaaatagaaaatctaattttgttggactccgcattagtagatctacgcaatgaatatatattatggtatactttattataaattttttctacagctttaaattagttagaaaaatcaaattttatctgtaactaattggaataattcatagctgcagcttctgtggtccaattgtggtgaaattttatatgaaaacaaataggaaaaaaagaaaaagtcaaaaccacggtattgtagcaaaaccgccttcaaaaaccgcccgggggtgatttgaacggttttggatagttcagggggtaaattagactgtttcataattcgggggataaagtagacaccaccctatagttcaggggtgatgtagactttttccttttttgttatattgtacccatggttgctcacatcctcagatgcctgttgcttaatattttaatatttgtatttactgttgctatatgtgttgtttaaaaaaaagcatgccctaattttagcaagaagaatgttaataattcttgcatcgactaaaaatatctgttttatttgacaactttgtaagttcattcttctaaacatatctctacagaaataaactttgtaaagactttcacaagatcaccagttgttttgcaggctgtcagaatctagttgcatagattagcatgtcttctgtttgcctttgaggttaaacttagcatactaaatatcataagactatgcttccccaaaagtgccgtggtgttatggcgggtgggctggttctggccctggacgtgctgcatcagcagcctaggattagttcacagttttttcgtttgttcatgtttgttagcatataagattcattagttactaggataagattcttagtaggtttgttgggtgctttgtctataaaggtatccataggtagctagggaaggcaagcagaaatagatccaagaagcagctcagagcctacacactccacagcaaggttgcttttttttttgcacaagtctgttcaatctctgaccttgatgtttgctccaccgaagcgggtgccctcctcagtcttagccgcatcatctgcaccatcatcatgagatccggcaggctggattttgattcaaacaaaatgaatgaagatattattcaaaaaaatttagaactaaatacaacccattttaacttgttgtacttcattcttggcaaacacacagaagtacgtgagctgagaattggggtcatgcgaaaccaggtcctagccgtttcgagtgctaacataaaacgtgaatcattctggttcttgcttcgtaggctggaaatctcatttggtatcgattcttaggtatgcaaacacacccttagcctgcaaacttcagatcctgggactgggagctcgtaccataatttgtctgtgggcccatacatatacagttcatgatcaacatttttgtctgatcttcattttctatcgtatagcctgaagaatttgacagctttctctttgataatccagagcagaacaattggtgattttaatgcttgttccatgcactttatagtcaaatgcatttataatagctgggagcaagaataaatgaaccagtgtaaagtctactttaaaatatagaagtgcgaagccattcatgacttgtacctttgaagcgtctagattataatgtttgattacaaagcttgtggaatcaatatagatgtatataaattgtatgtgattgtatgtttagctatttttgtacactgttctattgtcttacaactcatattgtataattgcaaatttctcgttgaaacaattctttgcatcatatatctcttctaccattggttatatgagatacagtagacctatgttgatgatatattgtcttttgtgtttatttttattctacttatacatcagcttgtatgtcatgcaggtaccccgtgtggaggtcttggaacatgtttcatctatcctcaaggaatatgggtttaatcctactggagaaatcatggacactataaacctgtactagtctttatgttgtttcacacacaaaaattctatgcaaacacatgtttaatctgctgatttttttttcttcttgaagccggccttatgactgcaaaatgtcagacacagagacatgcaacaaaggtgcgcaggctcaagttattcttttttacatttaacaaaatgagtcctaacctctactttcttttttcatggagagcagggcttataaatccaaacatggcagttatggaatcagataatctgcacgctgcagaggaaaaggtaaaaataatcgagtattactgtattggagcatcattgtctgcttcttgtcgtgcaatgtccctattgtgatatctaagtacataagatgttgttcacacaaatagtattgtgtgctactgatgcagccaagcagggcagtagtcagataagccacttgcatgattagtttgttctcaagttatgtacttatatttgcttgctagttgtcgattgttatgggctggtgcatataag

SEQ ID NO: 4148 - DNA, 4342 bp, Sorghum bicolor
aactcttatcattgtcatcacctggttgcccatgcatgcgcctatgagaggcgccaatgatctagattggaagggagattgtttcataaatagaaagtgttaataaaagtatactacctcgtatagaatttagaagtcgtttttggataaagtttgggtcaaacattggaaacataaatcatcaataacttttaaattattgagtttgcaaatataaaaattatatgaatagatttatcttaaaaaatattttcataaaagtatacatatatcatattttcctaaatattttttataaaaataagaggtcaaagttgtgttttggagaccgtgtcgctgtcctaaatgacttctaaatcctattaagtgaataatgtcatatctcctaatattctatgcttttggatatgcatacaactcaatagaatttttttagaagtaacttttttaaataattgactagttacatactctctccatcttgtaatatagtaaattttaaaaattttaactcaaattaagagagaacataaaagacatatatacccttattttatttcctaatcaaacgctatcattaacatgatggatggtgaatggttgacaaaatgaaaagtatttaatgtaaaattaggttttatcctctagaatgtattatatttgaggataaattttgaatcctaaaatgcactatattacaggaccgagatagtagaaaatagtattaatatttatatgaaagtatattccatgatcattataacaaagtttattacacatcataaatattgatatttttgttatatatttggtaagatttaaaacgtttgacccgttattaagcgaaatatgcacttgttctgggacgaagtcctagtctataacattgtttggctacaatctaaagtttgcacggatataccctggcagcagcaagcccgagcaagtgccctaggtcatggtctcatggaccctctttggctagacttcggccttgtttagttataatttttttaaatggatattttagtatttttatttgtatttaacaaatattgtccaatcatgtactaactaggcttaaaagattcatttaacaaattacagacaaactatgtaattagttatttttatctatatttaatgttcaatgcatgtgccgtaagatttgatgtgacgagaaattttgaaatctttttggaagtaaacaaggccttcaaatggcttcagctcaaatgcatctgcttgggcttgagatgcaattagttatttccaatgtttgacccaagtcttgtccaaaatgacttaagtatagttctaaattcaaaccaagtcaaaccttcttcacttagttaaatttagagaaaaaaatataatatcaacatgtatatgttaaacataaaaatgtagtttataatattttagtaatatttatttgctatcctaaatattactaattaatttataaatttggttgagcttaagttgtttgactctaaaaacacaagaattactttttagacggatggagcaatttagcttgaaataataaatagcactagcatttggatcctagtcgagtagtactacaaactactcaccctaaaagacggcatatttttagaattctttcacggtccagtgtagccgtgtaggctgtcaacacgctggagggcaccttccgtgatgcgttagcgcaggggcagaaacgtccttctcacgagccagaaatcccggagcactgccccccaatggtgagctgccagagaccgttatttcctcggcctgccggcgcggcggccactccgtcccgttttgaccgcccgtttctcccctcttctccgcgagcgccgccgcagtagaacccggcccggtggtaacccaccgccgcaagcatcccaccgcgccgagctacgcgacggacgcggcgcgcggcccacagacccaaccgcagcggcaacaaccgctctataaagcaatccccccacctaccggctccgcggcctcgctcgctgcgcttcgctttcccctcaaatccaccgcggactcgagctttgctcggaggagacgagacgacccaagacttgctcagctcccccctttgcttcctgcgcaatccctgcggcagcgccttttctttcattcaatggacagcgactacgttgccagcctgctcatgggctcatccgcccatgcgctcgacttcgccgcgctggacaccgggttcctcgacacgctctgcggcggcgccggcctctttggggtgcccggggtcgccgcggggactgggtgtggcagcggcggcggcggcgggtccccggaggggtcctcggtgtccgacccggcgtgggcgcgcgccagcgacggcggcaatgccaggaagcgcaaggcgccgcccacggggtccgccggcgggaaggagacctgcttgggcaaggtgcgggaacgaccagcgcgtagtggattcttcagatacctaccgaatttagcttgctggttcttgatggtgctggtgccgttctgaatattggtttgcaggctgcggaggccaaggttccggacgggaagaggtgcagagtgggcgctagcgacagtccggtgaagcccaaggtagaggaggcggcggcgagcgacgcctcggttgaagtcaaagggcagaagaagggcaaggggaagagcccgaagccggcagtcgaaccacccaaagactacgtccatgtccgggcacggcgaggtcaggcaactgacagccacagccttgcagagagggtaagacactgcagttccacttggttcctactgtttgagctgaattgcaaacggaattttgtgctttgggtttgaattcacaatcatactttgttattggtgtcttgataggttagaagagagaagattagccagaggatgaagtttctacaggacctagtgccaggatgcaacaaggtatgatcatagagttcttggacagtgaattgttgtgtcttaagtgtgaattggtgcctgtaattgggctaatttgtggggattccctattgtaggtggttggcaaggcactcatgctcgatgagatcataaactacgtgcaatcgctgcagcagcaagttgaggtggggattccacttacatttggttacagaacacagtcagctcgtaattctaatcaattttgctgtttattacactttcagttcctgtccatgaagcttgccactgtgaacccgcaacttaatttcagcaacctgtcgactctcctacacaaagatgtgagcttgaacatatcatttctgatgctctgtatctatagaacaatttgcccttgacacgctattttttctggttaattcagatgtaccaaccatgtggcccatcagctaattcggtctttccattggaaagtgccggtgcagcttttccattttgtgaccaaggggatcttttccagaactttggttcgggtgctaggaggatcagtgctctctaagtctgttagacacggctctaccccacacggccaacccacagtttgcttttcaaaagcaggtgagtgttgcctgaggaatcagcaatctatataattaatggcagttaatatgaatcttatcataatactgctgtccctgattttatttctcagcaaagggacttctgggaggatggcctacagaatgctttgcctaccggtagtgagcaaagacaggaggatgggcttttagtaccgaactttgatggtatgcgacttatgcttaaatgataagcgatcaattgaactgcacactttggagattaccatttgactaataaccatcatatgtgatgcaggtcagttacaagctgatcaggcaaagattgagttctagtccctggtgatctccaaggttgatatttttgtatataggcggtacgaagaagacctgtggcaagcaaagctctcctaagctgaccatcattagagtttaggcctccaaactgattcattctgtgatatgctggatgtttggcaactcgattcttcccatagagaccttgtgatcgatctcgcaaaattgaagtagattgtgtactagatatggtgcaaatattacatgcaccatcttctaaagttctactaatatgtaagagcgctggctggtattgggacgatgccgtgttactgtttgttgcatttttatcttatgatgacgaaagtacaagtatgagatatttctcctgggctaatgtttctgtgccatcatttggttgttgcaactgagcttgccatgagttcatcatagtgaagtgttgttctcccatactgatcaaatccgttcacagttcacactatagacatggtatgtcctgg

SEQ ID NO: 4149 - DNA, 7851 bp, Sorghum bicolor
ttcgtcctcaatgacgactatcatgcatccagtacatagcaaaaccttttttttctctcctgttcctttttttgtgcacatgcatgcccggtcacactagctgattatgcatgctctgatgaagaaaaaagaagccatatatacctggcgagccattgcccgatctgtcatctgacaactgacccaaatgatgatcggatcagacgggcaatcggaccgacacttttccagcaacaacaagaattgaacagctagctagccgtgcagacgacaacgaggaaaatcgcggagcagatcgcctattgaagtcctccccatcaaccatcagtcagtctacaggaacaaattgcgatctctctctcctccaagaacagatgcgtccggccggcggaggaagagacgggggacgggagcgccgggcgctgggtggctcatgatcatgatggctcagttacttcaccagcaggggccaggcgcgtggccgcgtgggaggcgatgatgatagcggcgccttgttggtttggccgataagccaaaatagaaagtattgttcgttgatttgttataaaaaaaagcaatactaactaattgatttgactaataagttcaagtgagacctgtgtgatcctggacggtccggtaccaggatggtggatggatcgtcaaacgccgcgttaaaagctggctgttgagacgtacgttttcgcccccctgtagcccgtagtaggatcacgcagtacagtaaccgtttttcccgtggaccttcagctatatatatgcatgtactgcagaagtgcacgttcagtggaatcctggccctggcgttcgaatttaagttacctccagatagctgggagccgcagtcaatatacatttccacggtgaaaattgtgagtccttagcgcatgattgcatgaatttcacaggacccaaagctcaggtttttaccgaggctccgtctaaggtctcgtttagttccgaaaattttttggttttcgaaactgtagcaatttcgtttttatttgataattgtttaattatagagtaactaggtttaaaagattcatctcgtgatttacaggtaaactgtgcaattagtttttatttttatctatatttagtgctctatgcatatgccgtaagattcgatgtgacgagaaatcttaatttttttttaatttttgggtcaactaaacaaggcctaaggtctaggcaacacgacgaagcagcagaaggccagatgcacgccgacgcccaggtccagtccaggggccaaaaaggcacgaagcaggcccccaacttgtcgctatcacgttgttggtctccactctccacgggctcgcgtcctcctgtcctcacccgcgccctcagcggtccatcacgcacgcaacggccagatctagcgcagttcggtaccacactggcacgacttcgcttccaggtgggaccacacccgccctccctttgctatagaggtggatattattgatattatatttacttttatatttctattctaatacaaatagatatcgttaatattatatttatttttatatttctatttggatagtcagatatattagataggatatgaacatacgaacagatagatattataaatatacaatttaaacattcagatacaaatataatattatatattcaatattcgaactcaatacaaacagacctaaatttctcaaaatcaatggaccattttcactacttccctcttcacaaacctttccccccctccaccaccacgccctaggaaaaaccggcggggaatttcctccccgccccgccgcgcacatggcccccatcgatgcatccacttgggcatcccatgatcaccgacgtccgggacccacctatcgcggctccacccgtcatactcacggcgcacgtggcttgttaaagccaagcccttcccccacgccgcccgcaactcgcacttcccacacccaaacccaaacaaaccccccggagcagcggtagcctttatcgccgatcgcctttccatcatcgccgccgcggctgccatccattgccgcagcggagcccggctatggagaccgacgagaagcggcacggcgggaaggaggcggtggcgctcagcgggggccacctttgccacgtctgcgggtaccagtacccgaacccgcaccccagcgccaagctccgccgctcccaccgcaagcactgcggcaaggcgcttccggcggaggcggtagcggaggcggtggcggaggttgaggaagccgttgtgggggtcggggttggcgtgggcgagcgggaggacggcgccggcgccggcaatgcggccgggcggatggtgctcggtacgtccgggggtttagctggtgcttctcgcttggttttatgtagattcgatggtttaccttttccgttcggtggttctgatgaccgtgcccgttcgttcgttcgttccgctgcaggtggtgaaggaggacgacagcgagaggagattggcacgagcgaggccaatggaggagcggcggcgctgcgcggatctgcgggagaagttggcatttctatggaggacaagctgattgctgcaggtaatcgctggtcttttctctcttcgaccattgttcagacttctctacggtgcttgctactgctactttcttcagtgctgctactttcttcagttgcgtcctgcgttttggggtgttatgttacaaatcgaaactggacttaggttcagcggttgttattatgtataaactgatttgcatagatggtggcatcttgcgctttttgttgttttgcccgtactgcattttgcgatacattgaaaagggtaaaaagccgcaaaaggtttggctgcctttcccccctgttccccggttgaagagggagggaggaggggcgcaaaactcacatgggcatagtgagatggtacacctgtggggacctgaataaaagtctgcttggctcttggtcttgggtcgcattaaagctcaaagcgtgggtactttctcgtttccttggagttagggagatacttttgtgataacgatgtagtacaacagttggagtgccttgtatttgtagcttccgaactgtagatctgaacttggctagtagtagtatgttattgctaatatgtcagtagtaatttcatactccagaagctgagatccatgcgaatctctctccttgtctcatggaaaattgttcctttgatactggtcagcagtaagaattcgttcattgtctttgtggacctgtacatacattggattcgttctctagtccgctaggatgaatttgttggtttcttggtacttggtaaaccgtctgttttcctacaaatccaacatatacgcataggtgggtaggatttctttgatcttgtcgttgaagacttgttttcttgggtctgctagtttgtcgtggccctccaccacatgttgtcttagtcacatgggtgtcctatttatttgcaagaagtgttaccgtttcattgtgtctgcatgtctcgtcctatttttatttatttatttatatgtcatcttcttctcatacttgaacagatcccatcttttggggcgttgacatcatttcccgcaatctattgtttttcctaattgttatgacttagagacatgtctgtgcggtattgatcaatagtaaagtcgctgcattaggtcttctaagttcagattattatactgctgtggttgtgagaattgaggaacaagctactgtttgtgtcacttttaggctagccctctagattgtcaacttcgttcccaaggaagcttctgcaatgtgtacttgagaccgctattatactaattaatgccatgatgtattttctgtcgggtatcaatattattaactgttaacctgttacttgcatgatttattggtcctcacttattttactgtatggacgacatttttctcatgcctcaatgttcacagtgtcattatgattttactgtatggacttctgttacaaccttttggtgtgaacaattaatgagctagcgaattcatttttctgtgccacagaatccctttcttccgtacttgttccttgtatttcttttcaaatgcctcgtaatattcactaaagtttcactggacctatggttgtaaagttattagtttgtttgcatctatttctctgtgtcaggagcatttcgtccaaagaatgttggatcattttacctttttattcaagttacctagagtctatgttgattttctctctattgttttgatagaacattcttctcctacctgtactggagctcaaggcattgccactgaattgagtgaagaccacctgattaattgcggcagcagtgaaaatgtttttcctgaagatactggagctcaaatcgacgccagtgaattaagtgaaaatggccttgttgactgcagcagcaattctattgagattgtaaacgaaggcagtggaactgaattactgattgcttgcactaatggaagtcaaaatattgtgggacatcaagttgagcgagaagacagctttgatgaataccaggatgcatctccgtttcttcatcaatctgattctgaagatggcgctgcaccaagttcagtattttctacagaaatgaataaattgaatgctatctcagcagggtcaagtgtaactacaaatgtaaattctctagaaacaaatggattcctcaaagatcaattttctggagaacccaatgtgacagatttatgtgttgactccatagttggacgtaatttggaggaaggagctcttagattgtctgaacatgaattaaacctgaagcttgggggtccatatgaacaagctgtgaatgttgactacacttgcgcagatatggttggtaaatctgatgaagcatctgttcatagtgagatgattggttgtttgaatgcttcatccattcaggaaacctgcctggtaattttggaaccagaatcagagtctacatgctcgagaaaggtggaaggttttatggaagatagaatgcatgttcttcacaccatgcctgaagcatcaccaagatcagaagtagtgggatcagataatgttcagttggaaacaataaccaaccctagcactaaccccatgcctggtgatctgaatgttgtttgcactgataatactgctacagattgttccatggagccccccagacagaactggagtgttgaggatgtaccagatggtaatcaacctgttgagaattctagcaagaaaactttgagatgtcctgctgctggttttcaggatgatcttcctgttaccaagataaatgatactcctgttactaatgtggatgatgtagaattcacctttgaggagaggccacagacagatactgtagaagaaaatctttccatacataagactaacgggttcactaaagaggaaatctgcaacaagcagtttgaccctgagatccctgcagaagatcaattttctgtgagtcagaaacatgacactttactaatggatcaagcatcttctgtcaagaatccatttaatctagacgatgacaggaatgacgacttatttgaacttcccactgagagctgctttttggaggtaccaaatgctgttgaatcaagacagcaagttgactctacatccgtaatggtggatgaaccaacagtctctaaccaaactaggatggctgaagttcaacaatgccataactcaagtaagaatttctgactcttcaattacacagttttttatgtaagtttgcactgattgactctgttgtatacccatttttttgctcgttactttctatgaggtcacttataatttagggaatgcacactattgttgcattgtaaaaaaagtccactgttttgcatcctttgccaatttaattggcggcttttagaaagcactggtcttggtcatagctaagcctagatagatgcttcatcttcatttctagtttgattgataaagtatcgcagtactatagtagtatagtatggagggagtttatctaatcccattgccttgcaagtttagactgtacctctgaagttgactgtacactgagacctgtattgtagtctcagagtatttccatatactaaaatattgtattttgaggcaccatattactgtatgttttttctatcagatctttacctttgaatacataaggttttatgctaaaatttgttggacatttctgcagctgaacgcatattatctgcatcaagtgccagtgaaaatgaagtagttggtccagaagacattcctgtcagcagtagttctgaactggtgaacaagagttgcttgactgaccatggcctgcaggaaaatgggcatacaagtggtgatatttttgtgccatctcaggcagcctccgtggagcttagcacaatgtctatgcaggatatcagtgcactcagtgaagttgaagaaattatgcaaactgaagatgctagtgcaaaggacatgactgcagtacgtagcattgattgtattgaaatgaaccaggctatcaacactacagaaaatgatacatatgccgctaatgttgaagaaaagaagctgattgaaggcaccgctgcagggatgaatgaggtgcgacagacagattatgttgaagaacagacacaagctagcgatacaaaggagttgagcgcagtacagaacataggaaattttgaagaaaataagctgactgaagataaagatgcaaaagagactaacgtacggtttaatgcaaatgatgttggacacaaaacacaaactccaaaggagatggctgcagcagaaagcacatgtagcgttgaagagaaacagcagctaaacatcatggttggccaagatggaagcaacaacaagctgaatgaagagattgcatcgacaggcgccaagctgaattcaggaagagttcgtgtcccgctgaaggtcctcctcgccgaggcaagcatggagaaccaagtgaaaaaacccagcaccaaggaacgagtgctgtcgtttcggcgccgggtgaccaaggacagcaacttgtcagtgaaatcagggtcacccaaatctggctctgacgaccatcattggagctccccagccaaactgcctcataaggacgttgacaagagttccaaagaaaagaagcagccgtggatgccgtttatctgctgccactccgtgcgctgatggcgtcttctctccagataatatattgcatcagccgacaactctacatgtgctgctgtaactaatgctatccgtctttgtgtagatagtctgtgcaatcaaatggtttgatatataatctagtataagatttgaatcagtgcaattttgatgtatccactacctgatttgttagacatttgcgcatgaatctgtcttcatgttcagattctgctagtgtttctgtggactgaacaggcctggaatctttaccggattaagctcagtgtagcctgctggtaattttgcgccaacgaaaagaagcaaagtgaaattaacgatacgatttcatgttcatgtgaatgccggatgtgatgacagttggctggagagtggagagaaatcagaaggggtggggtgggggggggggggcgagggaggaggtgtccttggtggagattggccattgggaaagtattgtgtgctattctacatgcttaaaagataatttcaccttattagattataccagacaaataatttcaccgtattagattatataccagacacactcatatttgtcgacaaatttggaatgctataatttttcatatttgctgatggagggattgtcaaattataaggcattttggctattttagatacattgtttaaaatatatctagaca

SEQ ID NO: 4150 - DNA, 8652 bp, Sorghum bicolor
aaaccactatttttgtcatgaacagtatttagtccggctcatccaattgcaatccaaattaacataatactccttacatccacgaaagaatcaattcatagaatctgtgtcagttaaactttttttaagtttgactaaatttatagaaaagagtaacaacatctatgacataaaatgtacatcatatgaaaatatattctatgatgagtctaatgatacgaatttgatatcataaatattagcatttttttctagaaatttggtcaaaattgaaaaagtttgacttaggacaactctagaaattgattctttcgtagacggaggaagtataacttaggccttgtttagttccgtaaactttttgattttcaagactgtagcaattttgtttttatttgacaaacattgttcaattatgaagtaactaggcttaaaagattcatctcgcaatttacaagtaaactgtgcaattagtttttattttcatctatatttagtggttcatgcatgtgccgcaagattcgatgtaacagagaattttgagaagtttttggtttttggagtgaactaaacaaggccttaccgaatgtagtaattaatgcactagatataggatccagagcagtaggtgaatgcctttcaattgtaataaccacaccatacattttactccttccatatccagaaatgacaaatatattttgatcacagaaaagtcatacaaaatacaatctggcccttagtttgtatttacaatatgttttcaattgctaaaaattttgatgttatttcaatcttaccaaatcagtgtatgactattaattagggcgtgcaaaatttagttgtgcattgcggcatgtggttcctatagtagctttgccgcaagagatcaatttaatttagggcgagccaatgttaccaaatcagtggtgatcgattgctggtttgggtgcgcatggagcagatcaactgaagatgaaactagactagatctccatcgatcgtcctttcagaatcgcaacagatatggaagtgataaagcccaggattccacatgatcttacacacaagtgcacacatgcatgccgcggatgcctgctggaacaagatacaagaacgtacacatcccggatccctagtcagaaaacgggtcgtgtagcgtcccctttctggaaaaagcgatgcaagcaaaacggatcgatcgaggagagctagctagctctcaccacgtcaccccgtgctgaggagctccatcctgtctgcacgaagtatggcaatggcgaccgagaccgacctcccgcctcttccgagatatgcatgatgcatgcgccaaccaggaacggcatgtctgcaggcagctccatcgctgcacgcctgcccgttggaagacgcccggccggaacgaaaacggatcgatcgagctcgatggagaggaaaggggaaagccgcgcgccgcgcctctagctctagcagttagcatgcagggcaaggggccggccggggtccttttcccaaaaccacggcaagccgaggttccatctggaaaagtccactccctttctcctcccttgcatcgacctgtcgagtcctcactggtctattcagctcagcgacgaggagagagagagagagagagagagagagccatctggaaaagtccactccctttctcctcccttgcatcgacctgtcgagtcctcactggtctattcagctcagcgacgaggagagagagagagagagagaggcggaggggaggctgacacatggccgggtattgaggtggtgaattgaatttggttaatgcaaaaggtggcgtgtgaggcaggcaggcaatcacgagacgggttggggttggcctttcgcctctagggttccgcgtcgcccaccaccttaccggaaatggcaatgcgggacgcgcccccaatcactcaccacccctttcgtctcgcccttttaacccaatcgtctctccacccacaactccgtcctccttgcctgcgctcacctcctttttctccccttcgcttttgcttcgttccatcggggcagccggccggtcgatcgagcagctccggtggggtgtgtgtggtagtctctctctctctctgtgtgtgtgtgtgtgtgtgtgtgtggagctgagggtagctgcagctggggctagctggaagggttgggagccatggggagggggcgggttgagctgaagcggatcgagaacaagatcaaccgccaggtcaccttcgccaagcgccgcaacgggctgctcaagaaggcgtacgagctctccgtgctctgcgacgccgaggtcgcgctcatcatcttctccaaccgcggcaagctctacgagttctgcagcggacagaggtatatatatatacgcacgcacgcgcgaccacatgtgtacgttcagtggccggaggccgcagatcctcccggatctgacctccggccggggaagctcggggtggtggcgggagagcttggacggtttttcagcttgtttatatatatatataggctcgggagtagtttcacggggatctgtgggcggccacggggtggatccgtgcgaggccaaagctcgtcgtttctcatcatctctggtgatctgtgattcgtttttgagggtttaatttgggcgtggaaacctggtggatatttttcggaattagggttctgggttggtccttggcttgtgaagtgtggtgatcttagtagatctggtgaattttcgtttgctccagggattcaggatttgttttgaatcgattggtctggagatgtcgcgaatttccagttaaattaatcgcttcttttttatacatattcataaatagctactactacaaaattcggatgagcaaaattaaggtgaggactaggatcccgccaatttgtcgtgctgcaaggacacgtaagctagctttcatcaatccgggatcaaatccggccgttttgctcagatttttcttttgtctgtattttgggctctatttggcaagcttagcttagaagcacagattattttagttcaagcaagaagcatgtatggacgtcgccatgttgcttagtcgctgatgttctaattattgtagagtttcttgcaaaaaattattttatgttgttttcacttctgagaaaacaaaaaggaattttgttaccaccaaatacatgagagtttaacacgatataaccgctctctctgtctctccctatcggcaaaaaaaaaagcaatatacttttacacatattgttatgaaaagttctcagttgcagttcctttatagtttagagtctttttatcatataggagtagatcatgttcgctggaactgggcttagatcacaatcttctttgattgaatgagctaacaaactattaaaactaatccgttagcattattgtctacatcaagtaaaccttcacacaagaaactctccaaaatttagtaattgggaagactaagatcaaaccagaagtgtggttaatctgtctgtggacacacttttaaaattttcgcgctgcctaggaatatctcataattttcacaaggatctgtaatcaatttattcaaaaatgaagagagaactagataattagcgttgtgttccaactctttgcttttggctaaggcttgtgttctgcggtattaaattttattgttgggatgttgaaaattttctgtacacgcttgcatgatctagcaagtgctgcaggcatttatttgtattttagctctaaatttggaatgggaatccttagttttatatatgtaatttgcaagtgggcggaactactagattatggcttcttcactccaagatttgttttgtaagcaggatagtatattattagttccattttctttccaataagttaaacatgatcatcttctgaccctcataatttatgtagtaatattaaaaggttgccattcaaaatgtaaagcaaatgtgattaacccatctacatgtctaaaactccattttggaggtatggttgtggagggggggggggggggtgggggggtggtttggaaccatacattatttactttgtaatattttcaaagtgtataactgaccaccttgtacacaagattcgtaggactgacctggaggtataaactaagggtacaatcaagtgtcggtttcaaatatcagtcgttgtgtccaactgtctcctcaccttttctgatcgaattgtcctttcatttcactcgtttcaatccccttggcccttgcccgcaaaattctccaaggcaaagttttatcatatgtcccttccagggtctatacaattggaacctagtgctctactagtattttatgctgtcagatatgcatgatcttcaacatatactgtagtatactaaattttgctgacgtcttattcctctctgaaagtctataagcatgtcggggccaactgacactccagtggcataggggaaaattaatattctacggtagctgggtgaagccatattttttctattgttttgtctgttggaatgtctcataaggtcttgtttactttcatcccaaaacccaaaatttttcaagattctccatcatatcgaatttttagacacatgcatagaatattaaatatagacgaaaataaaaactaattacacagtttgatcggaattgacgagacgaatcttttgagcctagttagtccatggttagacaataattactacaaataaacgaaattgctacagtgtcgcgaaatttttcagttcacgaactaaacacggcctaagctaaaatgaggaagttttggtgatatactctataactgtgataaatctaaattacactatttgaactcgaggtatcaatatgtatccctggtttaaccagaaataaaaaatcagttgcatgttattatcctagttgagattgcttcatcttctccaggcaccacattctctactttgctaacagtccatgctaattttgaacttgcagcatcacaaaaacacttgagaggtacgaaaaaagcaattatggaggcccagatactgctgtacagaacaaggagaacgaggtaataagagcttgacacgttcctaaatcaatttctcatgagttctcttctgttttagtattttctcgtccaaagattctagagcgggttcctagccagacctcgccatgcctgctgtggtgtcaccacactcgcagcgccaaaacagccgccacacctgtggccagttttactgctgtacctcaatgcaaagatggagcatgatgcttaactttatttgcaatccaaacagctatatgtcagcaggtgtggcaacctcaactttgttgtggtgtggtgtggctgagaaccgcaaacatgcccctagttagggttcaaagcaattttagattgctatttatcaaaatagcttcatgaggacatctcactgtgaaaattaaaagacagtaccttcaatcatttgatcatttatgcatagcagattgtcatttcttgtttctttttatcacatgcacttgccaagtatgagttagaatcatggatatataattcatatgattgagaagacacaatttacaatgagctgctgtcaaagatgatagttccaaaaatcattattgtgtgtgaactgatcttccattttcatccctactgcccagccactatttgctccaaaagcacttaatgcttacttgtttttttttcgaaatctttttgtactgaagtatacctcttattttgcagttagtccagagcagtcgcaatgagtaccttaaactgaaagcaagggtggataatttacaaaggactcagaggcaagttgagtctactcttgagttctatcttcatgacaaaaggaatttccttctcttacccaattgatattaattaaccactagataaaattgctatgcatgtttggacaatttcaccaaaataagtttgtggtactgttgtatgtgctgttagttagtttaccaggcaaacggcatccctgttcaggggaaaaaatatttgtgcactgtttgtttgcttaccttggtgattaattagtacaaatagatccattgcatatagctaaagcattgggtcttcgtcagcatatatgcacacctgaaaggagttttcagaattctcataagtcataaccctctgaattagatactatcaatttatggaggctaaatgaagaaaccaaagtgtaatcgcaatgaagttaaaataagtttcttagtgtgaatgtgtaatgcttagctaagatgcagacaattgattttggctttattggcaattacaggaatttgcttggtgaagatctggggtcacttggtatcaaagagcttgagcagctcgagaagcaacttgattcatccttaaggcacataagatccacaagggtaattcattgaacaaaccatttcctaatgcgttaaaataactttggatgaagctagtgttgatagcacagtccttcatatttctaaattaatggaccactttgaatatagaatgctctatatacaattgtgatcatcatctgtcaagaagacccagctacatacatataacatagtactttcattcacaatattcccattaatctcctatattttctgtgactagtgttccttaattaggggcttggaattttaaatatgttgaatgattatcattgatctcatatataggcatgaatgatttagtattttatatctgtcaaatgctgatcaaagaaatttctgattttgcagacacaacatatgcttgatcagctcactgatcttcagaggagggtatgctcttaacatgataaaaaactatgaagatttatatatctgtagatatttttttggataatttctgcttagattagagcacaggtgctgtttgagctacttaatgatatcgctaaaccatgtcccaggagcaaatgctgtgtgaagcaaataagtgccttagaagaaaggtatgaatgcgctttaccatgtcccttaaatgctgctaacgtaatagcaatgaacaatattcagttcttcaagttggcagatctgtttattagcaccatgctctgttatatatatgcttgcaaatacatgttcgttcgacacattaaattgagcttccatgagcacaaatacgcattaatgcttcttgctgaatcagctttcataattttataatacatatacatggtgtttgtcttaatatatctgttaacgactttttgttgcccagaatgttttgcatgtttgaataagttttgcataaggaataccgtagttcaactgtggcaacataactgtacgtaattcatatataataaaacctcttcgaaatatatattgtgcatattgttcatttgacgactgctagcagtaccacttataccaactaaacgagcatttcaggggaacttgtgagattaatgaggtttcttacgtgattgttttgcaaataaaagctggaggagaccagcaaccaggtgcatggccaagtgtgggagcacggtgccaacttactcggctacgagcggcactcccccccacagcaggccccatcacatgttggcaatggattgttctttcatcccctggaagctgcagcagagccaaccctgcagatcgggtatatacttttaatttatgtcataaacctgcagatacatcttgtgattcggtagatcctatagctatataaagcgcagcctgtgcatcgatctgatcctgtcttcttgttgtgtttggggcatgcatgcatgcatgtttgcaggttcgctcctgaacatatgaataacttcatgccgacatggctaccctgaagatggatctttgaggcaaaggaataaataaagatgcgatggccagcatcatctactactgcaagagtgacagtcatatatatatatatatatgacctagtttgtgtgtcgatgtgtcgaaacgcataaatttgtgattttgttatatgtaatgtataagcacaaacgaaacatgcaggactagttgcttgcttcgacgatgtatttgtgtgtatccgtgtaaaggccgtgcgccacagcatatgcgtgctgctgctttgtgcatacataaattaaaggcacggtgtaatgcctgcacatttcgttatacaagttttaagtgtgttagatctaattaaacttgagcatttttcgggccatgcttaattcaggccaggctgaaaaaagcccaattattttagggcgaaaaattatgtccatgatgtcccactgggcaagtcaggccctattttttgggtcgattatcatgcactacaacataactgaatatccttaagggttgaaaactctcaaagaaagccccaaaactgccaagaaaatcaatgttgtcggctaacactcaagaaatggccgccaagggtagatagatagagaaatagttatttctttgagtgtcagtcgatacaaattgatttcttgagagttgagccaccaacaaaataaattagtgatctaatttttaacactatcaaggaaatataggtttccttgaatgccaatgacaaccaaaaaaatgtaaaaacacccaagaatatacattttcttgagccaatgacacccaaggaaatataacaccactcaacgatatatttcctgatttagaaatcgtttt

SEQ ID NO: 4151 - DNA, 4845 bp, Sorghum bicolor
tcagtcagtcacttagcaagcgaagcaactccggcaaatgcaggtttcgtcatgccggggttattccgatccaagcaattaagtgtttgtcacggttaacggcgacagggcgacgagagagtgtagttaccttgctggcctgacttgctttcatttgcacgtacgtatgtagttgctgctggatgtggatgatccatgctttggcgtcatcttttaatttcaccggaagaaatacgcctccacgacgtcgttctcctgttgctgcatgcgcagtgatcttccaacacacctggcttgcacttgcagatcttttcccagcaagaactgttccgctattccgtgtagcttttgtgctctgctgatgccggcgatttgagagcagaggaaacagtttactaccccaaagtctgaagttctgaacaaacaggtcagtttaatacatgttatatgcgtagccacgcaaagaatgtttcatttcttcagaacaagaactccagaagcaaagaaaattcaaaagcgttgtatcataaaggagtgaaaagtcagatgctgagaactccatctgggttaaaaatgtatgatcctgacggcgccccagagaaatatctgaccacaagtggacccaagagcccccaaaattcaggcaccggtcggttgcttggaaggaggaggcagcaagcaaccagcgtgctgctaggcgtcaagcaaggctcgggagagctgcaagaaagcgccatggtgttgctcagttgctgcatgtgtttattataatcagacgcaatgaaaaagcactaatgattccttgtaacccagattaaggagcatataaagtggcctgatagtcatacagcacgtacaacacatgtcatatatgaatgaatgaatatatatgatcagctgagctcttctcttggggaaaaacagctggcgctgttgattaacatggaagatatccatatgttaaatcagtttatatatttttttaaaaaaatatgtgttggatagcatttccaactaccaaaacgttggttcaactcttctttctttgagcaatcatttacagaaggccatatcaatcaggcttccatccgatttgccatgtcagggtccatgttgtccatgctatgccgcttcattttgcagcaactatacttgcaagttgcaacacatgcgcagaccaaatgaaagcacatctgaagaacactatttctgtataaaaaaatgaagaagagatttatcctttccaggaaaggagcatgtttttttctggataaaggaaaaaaatttcagcctcatctgcattcatgcatgattgtatatagcattgagactacataaaataaatgttgagaagagtgacatgggaaagaaagctaaagctagtttaacctccaattcggttgctaaacctccaaacaaaaaatagaaatcttcataaaagtgacttccaaatttctgcatcccgtcttcaaaacatttctctcgacatctttaaactctttaaaaagcagcaaccaacttctgatccaatatatccccgtaacctgcatggaagaattacttttagtgctattgaaaaccacatcatttctacttaaccaaattgcccaacagagagcagcagcagctgcaccaactcgatcaaattttgaatctaggcttaagttaaaggaaagcgagcataccaaggaagacaaataaacgggttcattagctaaatactagtataagaaaaggttagatttcttgagaaattagcactccttttcctaccatttttgcttaccctctctctagtttgcaattatcattactccatcttgaaatcgacagcaatggagaagagatttagagaagatttgtttcggaccgggacgggatcatgtcaaatcggagaaggaatcatactatttaagcaaaagaagtagatgcaggatggagtccgctccacgccacatcggatcctataaattccccgccttttcttctccactccactcatcacaaatctctctctctctcctcctcctctctctctctctctctctcgctcgctctccaagctccagctagactgtcctgctctgcttcggtgcttgctactgtgcacagccagccagctgcaggcctgcagcagagaagctctgcagtgcaatggagaggcctgcgcaggcgcccacgcagctgccgccggggttccggtttcaccccaccgacgtggagctggtagtgctgtacctccgccggcaggccctggctcgcccgctgccggccgccgtcatccccgtcgtccacgacgtcgccaggctcgatccatgggacctccctggtgcgtgcgcacgcatgctctcctcttcatttgagccgccgtgcttgcagctgcggcacaaccgcgaacattttcagcttattcatacagagtttttcctgattatctggtgtaactaaactacgcaggggcaagcgaaggggagggctacttcttcagcctgctgcggcgagcgccggcgaccggccgtggcagccgcaggaggagagctggaagcgggtactggaaggccacggggaaggagaagccggtgttcctgcagtgcggcggcggcgttggcggcaaggggcagctgctcgtgggcgtcaagacggcgctcgccttccaccgcagtgagccgccggcgccgtcgtcgcggaccggctggatcatgcacgagtacaggctcgccgtgtcccgcggcgtggccgagcagagagagaagaatgcgagccaggtaagaattcccaccataatttcaaccttgaggcttcattgtttcagtctttgctgtgaaattttacagagtcgacctctgcctcaaataccccaactgggagtagcacataccactcccaatttactgctgtaactgtggttgcattaaacaaggggtcaccctaccatcaagtcgaaatgttgtgaaaaatgcttaagctcatttagctacgctaacagcaaagtaccaacataataggacgtgctaaaatagtactaaaacgtacttctccgttttcacaatacatgctgatgtctagcatgctaccgttcgttttactgaaatttggctaatactttgatgccgaaatattgtgagaggaaaacattgtactattgctgaaatttgcttgtcctaaatacaatatatacgaaaatggaggtggtaatcaaaatggctctcatttcaaaagaagtgaaagatcgaagttttttttctcgaatacgcaaaaggtttgcgcatctttgtattaagtagaagcaggttttttacaaaagcgccgaggcgctggcggcggaggttttacaggtggtacaagaacaataccctccccacaacacgacatgcaaagtcagttagtcagtagcattggtacaccgagtctaaaaaccagaaagttccccatcttcgagcaacttgagattgtgacagcttaacatcgactactaaatggaaatggaatactacacaatgcaatgatatgttttcagaacatgcagatatgagaatctagcctccgtttgaagtaacttgacccgctttgcaacctcgaccgcgatatatttgccgtatgcagcttacatttgaccagaacttggcgtgccaatggctgcagggttgcgttgctgcgccgggagagtgggtcgtgtgccgggtcttcctgaagaacggagcaagaagcaggccgaaccgggatgccaacagcaaagctctgggacaccgcgcctccgctgcgccgccgcagccgccaccgcagcaccgggaagatgtgggaggacgacggcagcagccgttgctactctcgtcgtcgcagtcgtcgtcctcgagctgtgtcaccggcgctaccgacttggcagaccaagacgacgaagtcagcggcggcggcggcggcataagcagagataccccagctgaccctcaaagagaggcctactagggatttttaagtgttctccccccccctctctctctcttgccccgttaagcatcagataatcaggtttaaggcaagcccagcgcaagaatggtccagatcccgaaataccatgtcaaacagatttagcaacctgagttttgaatcaggagcgatagttgctacggtagatctgtggtgtggcatgcacttggatttgatgctagaaaatgggcgctgcggcggcccagtagtgtgtaaaagctaaaatggcggttaatttgaggtggaatcctggttgtattgtatatatagaatcgtggtcactacggctgccgtaccatgaatatatttcataatactccctctatcggtttatcctaataaatatataaagcgtaattattatttgtcgagtcctataaacccaaggcgtggtatctttctctcctctagactcacatgtattcatacagcagtagtactagtattgtacatagaattaatacgctctttagtctttatacttgtatactactccatctatctcaaaattgatgcggacaggtcaaattttttcaactttaattatatttgtaaaaaatatgtgcaacatttatatatatattataaatattaataaacttttataaaatcgtttgggcttattagccgaatctgtcagtcattcagtagtgttttcctctcacaataaatcggtcaaaagtactttctgccatgacttattagccaaacgaataaggcggagaatgaaaatgacatctattttagaacggagagaataagatagaacgagtagtcatcaacttgactcgtgacatctccagtgagaaatcgttgggtgaaatggtgctgggaaagagtgcaaattaaaaaaaaaaactt

SEQ ID NO: 4152 - DNA, 7655 bp, Sorghum bicolor
atatatagaatcgtggtcactacggctgccgtaccatgaatatatttcataatactccctctatcggtttatcctaataaatatataaagcgtaattattatttgtcgagtcctataaacccaaggcgtggtatctttctctcctctagactcacatgtattcatacagcagtagtactagtattgtacatagaattaatacgctctttagtctttatacttgtatactactccatctatctcaaaattgatgcggacaggtcaaattttttcaactttaattatatttgtaaaaaatatgtgcaacatttatatatatattataaatattaataaacttttataaaatcgtttgggcttattagccgaatctgtcagtcattcagtagtgttttcctctcacaataaatcggtcaaaagtactttctgccatgacttattagccaaacgaataaggcggagaatgaaaatgacatctattttagaacggagagaataagatagaacgagtagtcatcaacttgactcgtgacatctccagtgagaaatcgttgggtgaaatggtgctgggaaagagtgcaaattaaaaaaaaaaacttgtaccactcatgggcatatgtagacgagtcggggagagcagagagcgtgagctttttgggaagcaagcaaatctagcgattcctctctggctagcaatatctgttctacacgttggatgtatggtgaattggtgatgtgagccaatgacattgctatcgtattgaagacgtccttatcttactaaagtggcttctcctggctcttcacaagactaatcaccctattatttaccactacttcagcaatacttttcagcaaaagaacaatgttctctcacaacaaatcaacattaacacaagtcaagttttagtgaagcaaacatacttacaaaattgtaactagagttatttttgttaaatattttttaaaacaattatagctccatcaacaaagttgctccacataagaaactagagccaaaaccctaccaaaccgcccgaaataaacgagcctgtttggaactttagcactaaaaaatagcactatgtttagacactaattagaaggatcaaacatgaactaattttaaaactaattgcataagcggtgactaactagtgagacagatctattaatcttaattaggccatgattagcttataaggtgctaaaataaacacagactaatcaatagctaattaggattaatagatttatctcataaattaatgactgcttatgcaattatttttaacattagtttacatttagtccttattagcatatgtgctttttttagcaatattagcatatgtgctttttttagcaatattagcaaatgtgtccgtgcgttaccacggtgaaacactaaggatctatttgaatcataactgaattgttataatatgagatatacatagaattattataatctagattacgaatgtgattttaagcaatatattagcttatgtgcttttttttagcaatattagcatatgtgctgttcttatgaactgggatcaaacaagccttatttacgtgggccaacttgcgagtggctttgctaggccgagaagggcccggccttctgcatttctgcctgctgggcgcctgggccaacgtcgtgcacacgctctcaggccttgtttagttatttttttttggttttcgggactataactctttcgtttttatttgataaacattgtccaattatagagtaactaggtttaacagattcatctcgcgatttacaggtaaactatataattagttattatttttgtctatatttagtgctctatacatatgctccaagattcgatgtgacagaaaatcttaaaaagttttgagtttttggatgaactaaacaaagcctcagtaaaatcacaccacgcgggggctttacttgcaaaaagcgcgcaaataaaaatctcccgcaggagacaaatccacgctttccttcgcctcctcctcctccatcgcggtcgcggccaaggccaacgaaccaatcccccctacggcccacaccttcctcctccccgcgtgccatcctcccatcccggcagggcgtctcctcctccctcctttccatcccgcctctatcgccgcctccatctccaggccgcgtcgaatttctccatccaccgcctccatctccaggaggaggatgctgggcgccgcgaggaggcagcttggatccggtcccgtgagtgccgccgaaccaggctttacctccgtgggtttctgatcgtctcgcgaggttcgatctgtaacggtgttattggttgttgttttttttggtcgctgtttgtgcagatgctgggacaggttttgcgaaggctccgcccagcggcggcggcggctgaggtggcgaggggctactccgccgcggcgaaggaggtgaggcgccgctcgaccgaaacctacctaccttttcgtttaaccgtgtggaggcgaggaggttgtgttggtattagacgtcatgtaaatcgtaattgtgttgtcttgtttgttgactggcggctagaatgtagaccgggggtaggtggtttaagcggtggagacgtgtggatgcgagtttagttattgcagtagttgccatgatcccatgaagcagattgttcatagtttggtgatgggttggtcgctttgttatggtagtggtttgtgggccaagggaatggtttaatgctttaatttatggcttactattgttgcacaaaaccaaagtgcattttagtggggtacactttggatttgtgcggtgcatgttagttgagaaatgctactagaatatattcatcgaagtaactttttatgtgagattctcgacaagctatatgtgggaaaagcaaagtcctggttttgcaattctttgtgccttctatataaaatgaagcacgcttcacagtttctaaatgttaaagttgtacatggatttgttatgcatattatgctttgtttcttatttcttctttactttatttcgttcatctctatgtcagcacctgctagtgttttattcccatgttgaaccttctacatctttatgtgacaagtcatatacattattattctacatgttcagatgaatgtccgtgatgcgttgaactctgcactggatgaagagatgtctgctgatccttcagtttttctgatgggagaagaggtatcacctggaaaaaaatctttctgctggtcttttttttctctccctgttcagtgtctaatttataattcatatccctactcatttgtgtaggttggagagtatcaaggtgcatacaaggtttgtaaaatttctaaggattaatgcgtttgcttttatctatcgataacttaacactgaaatcttaaatcctaccatttttgttataatattcatcggtgtcctgttgcagatttctaagggcttgcttgacaaatatggtcctgatagggttcttgacacacctatcacagaggtgcactactaaaatcctgaaaccattgctttcaagctgtgtaaacatgatcacacaggcacacacttactgctttctctttgtaccctcaggctggctttactggcattggtgttggtgcagcttatcatggtcttcggcctattatagaatttatgacatttaatttctcgatgcaggtcagattttgatattggtaacaaattaagattttacttgtagtatgacagtatttttttgggggtatgaaaatcaatgtcaacttagttattgcacatttgccattttctagtggtaagcttgcaataatggttcaaagtagctccaaatttgcaagtgctccctagcacaagcgtaccttttctcccatattgattgcaaatgatccataattatcgagaaattttattgattgctgctttgcatcaattcctcatgcttattttccctgaattactgtcaaaaggcaattgtttgtgcatgcttaattcatgtgactgggacaagtagtagttgtactgattctttttccattaatgtcatccactgaattcaacatgccatattttgtgaaaaaaaccctgagtaatatatattgcatcttcaggctattgatcatatcatcaattcagctgccaagtcaaactatatgtcagctggtcagatatctgttcctattgtttttagaggaccaaacggagctgctgctggagttggtgctcaacactcacaggtttgtcagatggaattgctcatgtagttatgtacttatgtgtccgattatcatccttctacttcctaatttttcatttttatgttattgccatccttttctgtgcttgtttgtatcagttgtacttcaagatgtcaatcctttgatgctctgttaaccagtttgcagcacttttataaattaaaggcgtaaaataaaatgataagttttgagtgaaattacagaaaaaatgcaggagctgagcagtagttttgtaattgtttcgttaagatcatgagctttaatgatacatagtacctgttttcatacatctttttgctagcaccttgattatgagattataactgtactaacatgaatttactaactcaattgtatgcagtgttatgcagcttggtatgcacatgtaccaggacttaaggttctcacaccatactcttcagaagatgcccgaggcttgctcaaagctgctattagggatcctgatcctgttatttttctggaaaatgaattgctgtatgtcagtttcatcttgttgagtcattttcctagctacctatcattttgctgagatggtaccgtaccatttgcagttatggagaatctttcccagtttctgctgaagtgcttgattctagtttttgcctaccgattgggaaagctaaggtatgttgtgtcttgggtgcatatggatgtatgggaaggaggttagtttaggtttcaataagtttaccttgggacggttttgagtggagttcctgttgatgaaccaccttgggtgtagagatcagatatagacttgtaggtatatattatatatatatggaagaatgctttcaaaacgggtttcccccatttccatttccatttccatttccagattatacttgatattatgtgcactttactgtgggcctcatctttctgtagatagaacgtgaaggtaaagatgttaccattactacctactccaagatggttggctatgctctccaggtatgtcatgatgtactttgtaaacaatgtaaaggatgattaattattagtttgttattcattaatcattattaccctataggttgacaaataattatgatctgtgtttcccaatatatgtttacttctgtagggatttggatgtactgcatgaatgcacttctgttacttgttaaactgatcaacaaagttgtccgtttgaaaattgtaattttgatttttgttgtaagagggatatttaggtgacagatggttttaatagtgcttatgtcacttgtttgtcttcatttttcatcatagtgggctgttattttggtgcattctcatgctcagtttgtctacaggctgcagagatactgtccaaggaaggaatcagtgctgaggtaattccttctgtagacgttatagtttcacttgttcagtatagccatctagttttctccatatgccatctgtagtaccttacttttggttcaatttgttgacaggtgatcaaccttcgatcgattagaccacttgacagggctgctattaatgcatctgtcaggaaaaccaaccgattggtgactgttgaagaagggttcccccaacatgggattggtgccgagatatggttctctctagtccttaccctctcaaacatttgtgtgtggtatctagtattctaacacatgtttgttgcagcatgtctgttgtagaagaaagcttcgagtaccttgatgcaccagttgagaggattgctggagctgatgtacctatgccttatgctgccaaccttgagagaatggctgttccacaggtcctcttcttttcctcttgtatacactgctcaagactgctccctcttccatgcttcttatgctattttatgataacatgtcgtgtcctgtatccctagtttcatctagttatttatttaacttcatttatgaattgtatgtccaatccttagaaatcccaccagtggctaattgtgtaaaagatggtcagtagtagtcataaaaatattgtttcctttagaaccatcaaatgtgcatgccacactaaatcacaaatcagatactgttgtcagctgctgcatttttgcacactttgtgtagctgttatctgccacccggatatgccagaaggattgtcctgccatgcttaggagttggatcttgggtggtttctttgtctgtctagttgtgcataccaggtagccattgtgtggtcaaagtggtcacacagcataatgtcgctattattggttggctgcttggctgtaatgcttgatgctatgcagaagactggaaactagtaagaattgtgtttggatcttgtttggtagtggaacgacttattcgggagataatcgaggagcatttttttgcgttgctcatgaaaagcgaatataaacttttgctacaatgctataccttactttgcatgaatgcttatgtgcatgtattgcaaagttccctgattttctgccatttgtatcactttaggccccattgattttgttgttgccgtgactaacagattatactctgtgcttgcttgcaggtcgatgacattgtgcgggccgcaaagcgggcctgctacagggcagtaccaatggcagcagctgcctgattggtggacaagcctttctgttttccttccctcggctttcgctctctagccagagacatgtagtattcataaggtgcaggcaaattggccggaccccagactccaagcgagctaattttgtagatctgccatggtgtgctttattccgttagtcgatatttgctgcattctttctagtatcgagtccatttgcttttctatgacttctacacacggccaaataatcttgctaaggtcctgattgaatgcagagtattttttggagtttaggaatggttttgtgaaatactttggttttggagtaacatgaagtgtttggatgcaacacactttaggctttgtttggatgtagtcggatccacatgtgttggagtgggttggagtggaacttgaactaaattccatcccaattcactccacacaggtggattgaggtgaatccgacaacatccaaacaaggtcttacagtttttggagagcatggtattgctaaatctgtagtctttttggagatccctaaacccaactaggcctctctttttgaaaccataattttgcacatcgattctaacacgcagttttctaatccttggggtttttaatgctacaacactcgtgcaaacgtatcggttagttattgttacggtgggtcagttctgttgcaggtcagtggatggtaaactaaagaaaacgatcgtgcatgcctccctttgtttttgttatctgcctcaaattaacgtcacgaaaaacgatcatgcatgcctcccttctgtcatcttcctgaaattaacatcaggggg

SEQ ID NO: 4153 - DNA, 3121 bp, Sorghum bicolor
caatgcatgcgcttgaagcatgtaaatacccacacatattatagtatttcagatagtaaacttcatatgcattaaacagtaaccttcaccctagaaaaagcattttaccttatggtaatagttgcagtgaacatgttcttttggctacttgcactgttctatgaactatggttgtaatgttttatgaaattcattataaagaaggcatgaagacaagaagaaagcatagaatcaagtcacttacgcccctccttcggctccatcggacccatatttttaatcaagttagccttttgccggttctcctttttactcttctttcgccgaaggatggtcatctcccggagatttaagaacctcataaacttaaatctgtacaggtaagaaacttccagcctccaatttctgcctcctggaagaaagaggcatgttagttaacaaggtcgcaggaatccttaccttactagaacatggacatgatgagcatataaaagggctaaattgagaattgaaaattggtacgcaatcaaccaaaatcgattgctgaacactggaaacttggccaggcgcgcagatcaagggaagagattaagcaaacgattcgttgaaagaagaacgcacgttgcatcggaaggcgcttgttcagcatcttgtttatcctgtcttcagtggcacccgatctcttaatgcctctctccctctgtctcccgacgggggccatcaccaccttcccaccacccagcggcgcacactgacgcgaacgacgaggtcggcggcagccggcggtgctcgggatgagcagcggtcgcagggatgggatccctaacccgagggcccgttgcttcgagttataatggaagaagagttctattgtattcacggccttaggacgaaggcgaggacgcatgggccgggagaagagaaaattatcaggccgccagatccttagattcggtcacagatgggccgtgttcctcgaaaaaaaaattagccaggccagtgtcgcacggcccgcacgtgtaggttgaggacttcagggcaacaaactaatttatattcaatccattccaaattataatatatttgactttttttacactaaatttaaccaattgtcttatttaaaaaattgtacaaaatatcacttcttttgtcgtggtttggtttattaattaaaattcttcaataatgacttaaatttgattatgtttgtataatttttttttaataaaacgagtagttaaatttaaagttaaaaaagttaaatgttttataatttaggatggagggagtacaaactaatttgtacacgtagtgtcacgctgacgtccgtctccatttccttgtcattgataacgtgttgtagcaattttgaccgtaaggcttttctaatccaatctaattctaatctaatctaataagggaagaaatattcagtttgaagtacttcaaagcggtcgaaatgctacagccaatattttagtagtgacaagtaacctcaaagctgttaaattagcacgctctttttttcgatttagcttatagcctgtaggctccgttcacttgttttataagtcgtattttttttaaatcatcagtatttttctttcataataaatcagcgggcagtactttcagtcatggtttttcagagaagcaaacaggatctgcattcgcttgtcatacataggacttatccaagcctgcttatttaggggactatatgcaacactgaaacaattggggatctaagttaaaatggagccttcttaacctcaagtaatagtgggttgaactaaaactgagaaaggcatcgctccttggcatatactgaaagaatgtgtatatgttcctcgtgccttatctttcctgaagcttttgcaaccaatgggaaggtgacataacaccttttgtggggccgtatctatcacttctcttgtttccatctgcaggaagcatccatgccaatggctacagcacacggtgtgctcctcgtttctgtttctggaggtaccaagcatcaccagggcggcaatggcgcctcccatctcagcatcacaaagcacaatcaccattctgaagatttttccaaaacctcctgcacctgataccagcagcaataacttcactgttggggccaaattcgacaacaggaggtatctcatcacatcacatattcagttcctcttttatctccaggatgtgctcctagatagctcgttgtgagtttgataaatgtgtttctctgctgttctagggcacttttatgtggcttggtcgctgctgctgctggcaccgtgctgagccctgacatcgccggtgctgcttcgaagaggcggcctccaccaccagggccggcagaggagaagaaagacccgaatgttagcggtgtgcaggctaaggtgcttgccagcaggaagaggaaggaggccatgaaggaagctgtggccaagctgagggagagaggtaagccagtcgataagtgaaggccagattgccagaaccagtagcctcattatggctcgagaaatgtaacttactgataataatataattgttactcgtttgatgtgtacagttgagaataaaatacaactatcttgcttggatgcattttgttccaatttagtatttgttgcgtgcattcctgttcttgccacatgctctgatttggaaactcgaagggatagcaaggaaataactctaataacaaatacaagcatgattcacgttctaaaaaataagcatgataacaaactcacttgacataatgataacaaactcagaacttggtaacaatctcagaccttgatcctatataacagcgttatgacatgttcacaggacaaacaccagggcagtgccttaacataatggactcttaagtcctaagtcttaaaaaacaacttattaacttgtactaactgctacctgcaaaaatcacatttgtaggacagagaagtctgaatattaagtgtaaaatttgaatgtttaatcttcagctacacacaagaagggtaaacccaatcaactcgcagcttccggccaccagtctcatagccattaagctcgtggatggccctctccccatcctcacgtctcttgaagacggcagcgccga

SEQ ID NO: 4154 - DNA, 18318 bp, Sorghum bicolor
caccaagatgtgatctatttgcctagaatcatatcttaatggtattatggtagagtcggcttttaagggcactcccaatatagaaatagaagtgatttctccatcttagctacgacaatgtgtgaagaaattaggtagttacggttaagagtcgcttgcgggagtgttgatacgacgaacaacttgtatgcaacatgattctgccccttgtctacgttgtctctttgtaaaacttattttttaatacagtacgacacgttcataaaaaaacataagaaagcaaaggagaaccacaaacggggaagacaatcgtacccgtggattcgggcattgacgagtttcgtatctgctgggtgtaggcatgggtacgaaaactcacctatgggtacatgagcgtcaggtacctataaagatgtggatatcaaattttacctgtggatatctgatagatacccgcaatttgaaaataaatatgaatatatgtaacatatgtcatatacatatcatgtcgacggactcaattaatatatattttgtagcctatacatagcatgtcaaactataaagatgatatttctcatggatgactaaatcatatcatgaacttgtaaaaatcaaactactacaacaagaagaaaagtgattgtgtaagctgttaacttgttactttagactttattaagttgtcttgtgttaacttgttactttagaccttattaaagtgattgtattaagttgtattataataacttgtgagctattgtatatcatcttattgaactctatgtaagtgagattaatcgtatttgtgtgtcattaaactataattgattgattatttaatttttaatatcactaaaattttactatgcgatctcttttgaatatacctcacgggtgttcgatactcaggataccgctggacacggatacaaaatcttaccttcgagtatgctgacggataggtaaatgcttttatccgcgtagtactcgacctgctgccatccctaatctcacgtgaccttgcgcaaatggtgaggagaaatagacattatgcggtcgtcttgctgacagtgtgtgtgtagcaaatagtagttatttaacttattttttttagagttatcaataaggaccctctcctaaaaataaaataaaaaagcgccggaaaaagtttgcctttttaacgcaaggacgaaagaaggcagcaaagtcgcacacaattattcccccacgggtgaaaatagaaaaatcaggagccggagactaccgaacgtgtgctcacttcctccagcagtcgtcgtcctcgatgataagcaggggaggtggatcactcgaacctaataagtgagcttccaggtcgggagagggaccgccgctggaaaactttggaggcgcccagcttccaagatacccactagctcccagcctcccaccgtgttctttccacccttggccttggctgatgctaggaagatggaatttttggagcttcaagacaaccacttctaatccctgcgcttcaggcgccccttgctccctccgtgttcttgtcttcttgatttgtcctcttttttctcgtggtgaggaattatcttccttacttgttacttgttaggggataagacgttttttagtcctccttgaaatttgtatgcatgctaatttattgattattttttgcagtttgaggtgatatctcgattctaaaaatctgcgagatttcttctccctgtttgtatggacaaatttgggaacgaaccctagtctgtgtctcaagcagccaaagtagtgttcttgcggagcaaagctaaagctgcagcagttggtgaggatacaggagaagggcttgttggattctgcaaagacactcttattggctgattttttttttcccataaactggggccggatttgcggaagtgcaaccctcttggattaagcaagaacaaagcctcgcaattttaggattcggcacaataccatccaatttgatcttggacatggacaagcaatccagcacccggcatggcaccctagagaaattgaagagcttccgggggatagagaagcagagaagcttcaagttcttgtccatggagaagcagcagagcttcaaaaggaacaaggacagccctgggaagcggggtgacaccgagctccaccttgcggcgagagctggcagtgttgcacatgtccagaggatccttgcggagtgtgatccagagctggtggtggagttagctgctcgccagaatcaggacggtgagactgcgttgtatgtgtctgctgagaaggggcatgttgaggttgtgtgtgagattttgaaggcttctgatgtgcagtcagccggactcaaggccagtaacagcttcgatgcattccatattgcggcaaagcagggccatttgggtgagctttcattctttcatcattatttagttgtggattaggccagtgcgaatttggattcactggcttgcactggcagttctatgtgatcttttgtattggtcattatgcttggagttgttatgtttataaaaactgacttgtatctcattgacttctgcaaatctctatgatcatgaaggaactgtttccctcatctttttccccttcaggaacatagagtattaaaacagtgacactgagtccctgatttccttttgctcagatggctgataaatttactttgctgatctggtctagattacaacctaccatgtctgtctttcttggttttacagacaaattgttgatttctcagagttggcagttttctacaatcttgccatgttgttgcgtctaaatcaaagaactggcaatcctatatctagtgaggagataagctcgctactacttgtctgctcagctagaagtcttcaccataccaattaggctatgcaatttctgatatttgagttagtatgctgtgttgaagagcaaactattatacagttgttatttaatcttatttttcaaaacgtgtgtattctcttctttcagagaaagatgtcatattagttcaattttggtctttgcagatgtcttgaaggagctgttacaggcctttccctcattagcaatgacaacaaattctgtaaatgccacagctttggacactgctgcaactcagggccacattgacattgttaatcttctgctagaaacagatgcaagccttgctaggattgcaagaaataatggcaagacagttttgcattcagcagcgagaatgggccatgtggaggtggtcactgcactgttaaataaggatccagggattggtttcagaacagataagaagggacaaacagctctacacatggcttcaaaaggccaaaatgcagaaattctgctcgagttgttgaagcctgatgtctcagttatccatgtagaagacggcaaggggaatagaccattgcatgttgcaactcgaaagggaaacaccattgtaagtgacgttatctcagaatgttctgatttctgccgcggtttgagtcttctcgttttacattttaacagtcagatgttttattgtatttatggttgaagctatgttgctcaggagaattactaaaatagagtaatcacatttgtgagatattacttgcttaatacttaagtctccaatgttttataaaagaattctaagaataatttgcatcttttcaggaatcaaacattatactaaaaaagaatactttcttcctttaaaaaagcaaggaatttctaagaggttttggattgaattttgctcaaatgcaatttgcgtttcaaagtacttattacttgtgctttatctgaaattcgtctgttcctttcagatggttcagaccctaatatcagttgaggggattgaaatcaatgcggttaatagagctggagagactgcttttgctattgcagagaaacaaggtaatgaagagctcattaacatcctgagagaggttggtggagaaactgcaaaagagcaagtaaatcctcctaatccagcaaagcagcttaagcagacagtcagcgatatcaggcatgatgttcaatcacagatcaagcaaacacgccagaccaaaatgcaattccaaaaaatcaagaagagaattcaaaagctccacattggtgggctaaacaacgccattaactccaacactgttgttgcagtgcttattgccaccgttgcctttgccgccattttccaactccctggtaattttctggaggatataactcaagcaccttatccagacatgaccttggggcaagcattgatagccagtgatccagcctttataatcttcttggtttttgacgctttggctctctttatctcgcttgctgttgtagtagtccagacatctctaattgttgttgagcagaaggccaagaagaagatggtctttgtgataaacaagttgatgtggcttgcatgcctctgcatctcggcagccttcatagcactaacctacgttgtcgtgggtcgagatgatgagtggctggcttggtgcacaatggcaatcggcactgttatcatggtggccactctcggttccatgtgctattgcattgttgctcacaggatggaagagaagagcatgaggaagatcaggaggacctccacaagccagtcattttccatatcaattgactcggaaacggagctgatgaacagtgagtacaagaagatgtatgccctttaggatatcggccatgcttgtcatctgagtcatgtatatattgatacccatttgcctgagaccagtccatggcattaagtgggattgactcaatcaaaactatatttagtcctagaacatggcacctgtatcagtatgtaactgcagtctgcagcctccagccaggaacataggggtgaagtctaggtgataggtgtagccactttttgttggcaaaatacaaatattgccaagcatgttgtccctatcttatgcttatttttgtggatggcagtgaaaaccatgagattgtatctgtatagtagaatagtatggaataagttgcccttatgtcaaaagttatctggtcgtggatgctcttatgatgcaacatgagactggagtagactggggcaaaaaaaaaaattggactttgaactggaggaaactgagacagactttgttgaccgttgtcgttacgcggcatttgcagccgttctgtgaaatataaatgcctatgggctgttatgatctccgagttaagatatgaccgaaaaattgacaaaattgctgctctttcaattggaaaacaagaagatattttagaatgcagtccatcatcacctctaaagcctgttcttgcgtttccagctggttaaccatggtgtcatcggcagtgctcgacaaattcagataccctgaagcatgtatgccagctgtttggtccaccgtagtcacgtagagcgactgaacactgcgcacgcacagggtgacttgtggaattggcaatggaccagatcacttcagccccatcaatcattcagttagaagtctgcagacacttccgcatgccgcaaacaacaggcggcaacttgatggtcacgacgaacagagggagaatatttttgtggagaacagtgggttcccgtcggggtcagttccatgtttcaacaattttgcttactcgtgtaacagtctccggtgttctactgtgtaatagtggtcaacctttgtgcttctattacatatttacatgggaatatgggatactttatacttacaaggcttaaattcagaaacttctacgggaagtgaagtgctgatcaagatggagacgaaaccatgggttgacagtcggaagaatttgcgcggttatgtacacgttgctatcttcttttctgctaaaagcgcaagagtctattccttggagtctaaactaactgcttctaatatttcaacaccttgcaaattaggagttgtatttaccgacttgctgtgtgtgaacgagtgcattctatgagtgaaataatattttgtgttagaatatatttttctcaacttgtgattgtgcattcagcacatggtgcaaaatctccgtcaagaaactgcagtgatttgggatagtgaaaagtccccatccaaaaagctacatggtgaatatcaccaacataaaacattaactgctaagaacaatcaagttacgcgtattgtcataacttaaggcaactaagtttattccaataactcaataggtgtatttgcatacattgggtggaaattggatgttactctttctgcattccttcctgaagagagcgtcccatctactgatcagctgaaaccaccgtgttcacttcttagcatggcttccaagctttggtctctgctgcttctctcctgctctccttccctttagcaccgcatcggtggcactggcacccttacgggcagtaggcacaacgccggtggcagctctgctcctccctttcagtgttgctgtaacctgcacgttgtctgttgttgcagcagctgggcatgacagtctcctggtgatgacagcatccaccttctgatcctttgcaccagcattcaaccgaggtttcgttgcggttgctgtaacgttctttggtgccttgtccagtcttgccacattcttggcttcctttgatggctgagatttgttgccagaagttttcttggatgctttggtggctgcagtagtagtagctgttgttggcgctgcaggaattgaattgtgctgcctattggtcagaggtgtatagctggacttcttatccattctgtaagctgagtcctgatctttagatggagtaggagcttctctgttgagttttttctttgatgatgaagagctgggcctcactgtcggagttgttacagacgtagtggagctggaggtaggtgattcagacgttgttgatgcagttgtagagtcaggattgcttgagaactgtaccagtttcacaatatcattgaaagatcaaggaaagatgaacacaacaatttttctattccttttttatttttgataaaccttatactactgtgtaccaatataaaatatttctctgtggcttcgacataactttagaacggatatgtgctgacatgttagatacaccagttttcagcaaattgtctgagaagattgggtgattgcttaatggaatgttttgcactcctgaatcctgatggagaattctagcttggtgaattaacttcatcatttatgcacaaaggacgagatatgagtgcaaacattcatcatacccttgaagttctgattggctgaagtataggcagctccttctgaaaaatcatctgggatgagttggcttccatctcaagggaggggaacagtggggtcgctggaggagtcttgagcctgaaaacgagctgctacgttttacaattcaactgaagtaatgggtgcatctggatgtaattaaaactagggatctatatgtgtttaccagtcgtaatcatgcttttcgccatctggaaggaggtaatctctctttcctgaaggaagcttgaacatgcgaccatctcctatattcagtcatcagaacgcactctcatcagatgatcttttatggaaatctaattaactgcacttttcttggtcgttttaagatatggtataaatcattcaatcaaaaatcaaaatccttgtttagtaaaatgagatgagaatgcataaatatctattcgactagctctagaccctagacagtgataataatagatgaaaaatggatgtcattgattgatattaacaagaacaggtgaatagaagtaaaccctcaccttgaatagcttcaaactccaccgaaaacattggctcaaggaggttcatatctctctctttctcatgcttatacagctccccaaacagaaccaagctctcatcttcatctctcccaactgggaccgcagtaggtgtgcccttcgccatgccagtgaatttcttcacgcgatccatctgcagggtctccaggcgttaatcacaagttttttttccccacagcaatccacaaaaaggccctgagacgctgggagagcaggagcatatatcaccgtgtcctgccacacaacacaggtagccagagaatactctaggcaccaaaactgtgccggcaatgctgaaaccatccctggagctccacgcgatgtgaacaaatgtaacagatgtgttggtgaaagggacaggcatatgccaatgcgactgaatgggcaaattgtcagagtcgacgattcattcggtttcggtgtgttgttccgttctccttggcctccatatggcacaaatgtgttttttcttcagtttttgttttttgtcctttgcctgcatgccatcccatctccatcggtagcggtttccatatggcgttttggtagaggcacgttgtgtcagattcagaaatgaaaaccatggcatgaattgaacaggagctgctggaaggtgcttcacctgatcacatctgatttcccttcccgccttgacacctccccggctccccaagttcgtccgggttctctcactccacttgcatcttcatctcgagaatctccgtccagggcggcggcgcagcggttgccatggctggcccgcgccgggaagagggagtagaagcaccgctcgccgtgaggcatgaacgccgggcccctggggaagggtcgctgggcgcctggggcagcccaggcggggccagggccgtcacccccctgcccaaacaattagtttcagaaacatcagttgacagacctccagactccagatctgaaaacgtctcacaatcctgtctgaccttgccgcagatgaccaaaggaaccctttcggattgcgttgagccgtcgaagcaatgaaacaaaagaaatgtacaaacatgctacgcgtctgccgtttcagagtgggctataaattcgcagtaacagaaactgacaccgtgatagagcacaccacggcggtgagatcaacagttcaacaaggcggtgcgtcacagtgttaattattattattacgctccctatttcacttattccagcagctagagctgaacattacttcgtgtttgctccagaaccattacagccagcgaacatcactttgcctcaactgaagctctcctctacatgacaagcaacctcttctaggcttttctggtagattcacttcttggggaagcgttgagcttaacactgggcgttccctcgccgcgattcgtatgcctgcctgactgcatcccagaatgcaggcaccgcctctgagtcgggaacttctttgaaagatgggaggtagtttaggtccactatgacatggtctccggtgccttcttgaacctgcatattcaacgaacactcactaagcagctatcttgctacagcactgcttttggatttccttgttttacatatcctaattagagagagagagagagagcagccggaaccataattgcttgtagttgtacggaacttcacgagcatcataaatatgtagggtcagaaaatatacttacaacgacatcaaacccaaatattgtaagtccaagcagtccctttagaaatttcgcagcctcttctactagattggcatctaacagtttgctatcttgcaccccggtttgcagttgctgctccttggtagccactggaagagtcttcaaactgagacacgccagattcaagcatacctcagtgttatagtaccaagctcttacaatggaatgataataaagcaatccagggccaagataagaaataaaattcaggtggggagcaaatcccccctgttgaacttttaaaaaaaaaggcaatccagcacttttgattacctattaaacgtaagagattcacctcctgatgatgacttcagaaagcgtgcattgggcattgaatctctaacagcatagaaaactttgtctccaatcacataaaatttgaaaatcttggatccatgatccacatattcctgtaaaatgttccttagctggtgagttactgagacctgtacagcgaaagctagagaaggaaagaaattcaagaaaaggcacgatgttatactggtacctgtagtacagcaggaaggggcacacttaggttgctaaattcttcaatttgaaaaactaatgcctgcccacagcaacaaatgtgattcagctgatcaagtggaaaagacaaggcaaactctgaatttaaaaggttgggtttgtagtggtggactggtgggagaacaatgaatgattaatttctttatgtaaaggtgatgattcagaaaactgacttaacatacggaccagcatgtaaaacaatacaaaaacaaagataaaaatcaaaccatattgtgggcatcagcaactccacaagcgacttgtggctttacaatgagtgggaaggataaattagcttctgctagatgcttatctaattcaccatcatgaaaattgtcaacctgttctacaaaatagttagtcaggaaaatggtaatacttgaactctcagaaaaagggaccaataactcaaagagtaaccatatcaaaattaccttcaaagaatatggtgctcgaagttttggctttctttcagtgctaagttcttgcaaccggacaaggattttttggatttgaagacgatcgagcaatgggtaaatatttttaaatgaatccatgacgcaaaaatcagggtgctcttccacaaacctgatttaacagagggctgcggtgagacagaataatgaagtccaacagagcagataatatgtttaaagcatcaaatattattgagaaaatctccacttttcaattctcaaagtagctacagaacacatgcctacatttgcctgttacttgttgtttcagtatgaccagtctccgcagccagaaatggatagcaaactgaaaacaagtctccccatatgtttgcaaaaattagtagaaaggcaaaaggctccctaaatatttctgctctagattgatcaatgcacaaacagttgggttgatagagttcaagcttcttcatgacaactccgataagctgcgatttaacattgtcctggaaacagtttcagaaatagtgacttgctctgatagtcgaatatcagtctattcagtacagaaagttggtaggcataagatagctccccagaaattatgtacaatatatcagagaaagacaataagagattgttttaaactgataccataacatcattacttgagtaagattttaaaatattcacatgcacacacaagaaattactcccttcacatctaagttggttagtgcttcataccttataatttcagacattcctgcagaaaatgaaatccctcttggaaaatcgatggagcagtttggatcgatcttgacaatctcatcggttattttgtggaggaccatatcaacttcttgcagttgcaaacttaaaggaagctcgaaagagaggggaacgaagataagattgtccttactaggatatatgggaaatgctcctctctgtaagcaagatgaaaaagcatgatgctcatgctggaatccaacacatagttgttaatattcagttacactttaaagaaaacttgcctttgcgaagtcttcctcacgggattttttcattatatatccaatcaccagaacagatgagccacatatttcctaaatcaaagagggagacacttcaaattaatgcacactgtaattacagaaagtgtttaagcagaaggcaaggacaaacttaccctttttattagagtagccaaggtgagaatcaactcctgaagcctctgaacatttaaaacaccaggaacatctatgctacattcattacctggaccattgaagagtatcagttcccatcaacacccacgaggagccgaggacaaatgttccattatgtaacacagcaatcgccacatatcttgtgcaaaatcctaatataaaatgacctgctaaaaatagcatgaatagaacctggcttttcagttccagtataagcttacctacagaaagaactctccagttctgattctgaagctcagaaattaaacctttgtcaactcttgaagtcacatataaacaaaaacttgtccggctccattctaacattaattcagttggagaaagattcccactttttgcaagaagcagtatagagtcaaacaagtgtgagcttgcaaccttttgaagaaagcctgactaataaaaggaaatatgctgttatttttttttcctaaaagacacagttgttaaatattagaacaagtacagaagtattttcataacagttgcatagggacacattgagtgatatggaagtttcgatagttaaaaaatccttatactgaagcaaataggcaacacatgtcttaactgttgaaatcaaaggcaatgactaaaaagtccattttttctgatatgaaggagataattacatatgatcaattgaaaattcaatggtcccatatttcatgaagaacttgacatgatttatcatgcacttgattatatcaggacatatgctagaaatattggaccatgcctaaagattattgaaatatatgacagtcatcagaaatttaacaggacatgccttcagaacagcagtaataaactgtctttccattagaagtgactggtttctcatttattcttattaacacaatgtcattctttgatgacagcatgataagctagagtaccccatgggccatggataactaagtatggcaagaggaagcaaatactgtcgatacttctgaagagacagcttcagagggttatagatcaatagagtacctcattagatggcatgccctctgcacagcagattgcctaaaaaaggaggatatagtcagatgtctattcattccacatgtttactgaaatcacagtccaaagcataacagacaaaaaaaaggtaagccatactaatgtggaagcaatgtaggctcattatacaaatatatcataaaacagtgctaagagtactgcgtttagataaaaaaaaagttggtaattgcccatcgcttgctcagtttatgaactcttgtaagttctactgatatactgacagcaagcattgaactgttaggctaaaacttgaacacaaggaacaagcatcccatcaaccacatggtgttaaatggaatcctaaattccagacaggagaaaagaatggaaaaattgagcctttagccaacttcccggggcaatctatcagcgagagcatttcctcgaacagtacgccactatgaaacagtaagatctcagtcaactcatctatctaaacagacaatgacaaaatcgcaccgacagaccaaaaaaagaagtcactcataccacgctcaggttggagtagcgcaggcgccgcaacagctcctccaccccgggccgcagcgccaccgccgccgccgccgcctccctggtggaggagggattgaggaggagggaggcatccagcacgagtcgtacagaccgccccgtggccatggcttaggaaagggagatgccaattgccaacgcctgggttcggtttctggctttctgctcggcgttggcactaccgcactcgggggctgccgggctggagctggacgcctgaacctggagccgggcatgggaaaggggaagctcctgatcggtaggcccaggtgtcagtggcaggcgtggccccccacggacgcatgggtggcacctggcgggaggaaggcgaacagatgtgcagcgcagcaggtcagaattcaggagtcagaatacacctgttattattccttttccttagcagcaaaataaaaaaagaaatcagcctagcttttcaactttcagcctttcagggaatcagatccgttgccttcatcatcatcaggggaaaaaaaatatctttctccttttgtcttcccagtcgaaaatttcactggtttatgtcaaggtaatgcaacaagtgtttcgccaaaagaaaaaaaaaggtagtgctacaagttcactagttcagtgatttgccaagatgcatatgttccttccatttccatgttagtagagcacagtatttcatttgccatcagcgaaaacgcaagttttttgcttcgcagcaagcgctacatttcactcgatttacaaaagttgtcctcgcggcacatgctaacagattcttcctacgcgccactgacgcatccaaagaggcgcatgctactgaacctccgggacttggacgacagaccacgccacccatcgccgccgaccggcgggaacggcttgtcccggagaccctcctcgggcagtgcccggccaccctcgccaaaggagaaaccgcgctcgtcatcggccgacgaccgcgcggcgaaccggcagctctggctccgaggaggatggtcgtaggcgccggggaagcgctcgtgtccccatccacacgttggcggagcgccggcggcggaggagaggcgctcgtagtccacagcctgcttcgctgccctccgcttcttgatcgcgccgcagaccaacggaatgagcccctccatgctcatgttgcaacgatctgctctagtgctctgcaccgccgacttcagcagcagctaccgatcgatcgagatggggattttttttttctggagcagcaggaggaacatgagtcgattcttggcttcttgctagcttgatgcatgtggagatggcaaggaagtggctttcatgtttcaacgaacgatgattcttataggaaaccagaaccagatcatgcatgatgtcatagttttcactgacttccccgttgttagccgccgatggagcatgcaaccaaggcatccctgaattttataatcctttgctgactaccgctgagatatgactgcacctgcaactggatctgcatgcatgtgaaggtctgaaatgcatctccggttccatttgtatatgtttcctctacgaccaccgcctgtttgttgaaaaaaagaaaagaaaagaaaagaaaaggtaaactcaatcagagacttcacgtgcacttgcgataatctcgggtagtgatgactggctgatgaacatgacattgcccaacggccatatccaactgattacagctgaacctcgagttagtctccattcatgtgtaagatcatattcagacgacgctaatacgtgtgcaggtatgtatgtgctaggtcaaggctgagcttacctggaccagctgcatctaaacatggagggaatataaacaacatccttttttttctgtataaccatcattaggcactttattcatttgtgtggtaatgaaggccatcacgtcccttgtccgtccccatccccatctggaccggaaaaaaaagggttgggccggacccaaaagacgggccgaataaggagtggactcccctaaaattcatcacagcaaataaggcctatatataatcacgacacggtcaaaataaatcatgacacgaccgccgctggtctagggcaagcaacaccgacacgatcacagacccggccgatctgctccgtgcctccgcctgctcgagctcgacgcggatcggcggatcgcgatcattctccccggcgttcccggcgtatagtaccgtcagaaaagactccccctcctcgcccggatctccaaattatgtcgactctggacgagccgccgcaacctacctcgccggcctattactaccctacctcgccggcggcctattaccctccctcgccgccggcctattactaccatacctcgccggtttactcaccacccttgtcctcgccaggctcgagcgcgcgttggtattccccacccccatcggccccgccggtttactgcgcggtcccggtctatgcccccacctcgcctggctattccccggacgaatggtggggtgatcatactacgtctccgtcgtcgccgggttcaccggtctattgcaacacccgcacctcacggccgattcatggcaaccgctcaacgacgacggccagctcctgcatcacggggcctgcaggttactgcgctactagagaattcaacgatcaagcgtgtccggctctgctggtatcgccggcatacgactcccccacctcgccaggtcattttccagaagaattcaacgatgtttggggagacataactctggcggcggacaaggtacaaacaccggcatcgctcgagtactgctactgttgttcgacgacgctgcaagattgctgctgtcaggccagcgacgacgccgccctcgcgccgtgagctactgtaccacgccgctgctccctggctgctgtcagttgtcacaggcaaccggggtccctttgccaatatctcccgctggcggctggcgccgtgttgcagacttgcagtttgtaatcgatctcctgcattctggatttctgggtcacgtccgtgcaagtcgtgctgcatgctttttttagtcgattgtctctctccagaacacataactttgctgaattttaagcagtgtgttgatttgtttgtgaaccgtgatttatacttgcgcgcgggcacttatatagtaccgaaagttgctacatcatgatgtatctatgtggatttctttgatcataaatgcgtcatccaagtacttcaaggcatgatccccaaatcttcccttctctaacagcgcggacgcaaaagagaagtcacaatgccacccagccaagcgccgcccgcctcgccacgtcaggctgctcctcgccggcatagaagatggtgagtggtgccactgccgtggacatgggccccaccatctattcgccccttcgcctagctagatgaaaccccaaatcaaagcagggcccgagctgccgccaagacgagacagaaggacttcggctgcttcatgggccctgccatctcctctcccctcgcgaatgactacagcgtgttggcttctcaggccgctcccaccattgaccttgccgctaacccgctcgcccgccggccacgcccccgctcctaccgtagacgcgccccagccacaagtggagttccaccgttgtcgcctgggtcgagcatgtgggagccccggcgaccccgccccgcggctgctcgcgctcctcccccggcagtcagtgttggctcaagaaacatgtgagcctaacgtgcgaccgcaagccactctttctatgcttggtccatggcctcgctagtcgccgccggcaacctacctgctccttccttcctcttctccgtagccgcttcggtccaggccaagtgtcatccagggtgctcggtgccaagagtggacgagacaccatcaatgccgaggacgatggtgcgggcgtcatgggtgagtaggccctcttggtgcagttcgcgaagcaggaccatctaggtcgaggagaatagtgctggagttttgggtcgaggagagagacaccgcaaatttgagtaccctctctccatcgatgcaaaatggatttgtgctttgccttctatgttagaaggtgttttcctcctgtataaggcctttttgggtatgggtagcatatgatgccctccctattggagatggtcttaattaggagataaagccaagtagacatacattctggcccatatgtcgtatggtagcttgctgtgagaattgattgaggttgaggaatgcacaatggcattgcaaagactttgtgcaggttacctgcctattagccaaagccaagtaggcattattttcctcagcgctacatgtacaatacaatatggaagccactgaatcagcatgtgtctatggcatctgttcaatatagtgcaaccagacgggtatgtgaagaggtccaatttgtatttgtgttcccgcataacgaaggccatcatcgtcatgtcccttgttgaccccatcgccatctgaccaaaaaacaagggtccttctacacggaagtcaaaacttccaatgcttcgctggtttaaaaagctatggttgaaagtactgttcgctaatttattgtgcaagaaatgactgacagcaaaatacggcttataagaaaagtgtcgccgctgcccacaacccaccattttgccgcagtgaggtggggtctggccggagcgctgtggccgcaaatgtggtcgtagagctccggtgagactctaccgcgcccacaatggtctccttctactcaccctctctaactgccgccatggctatgggcgctctcgtgcactactataaaaatgattttataaaacattgtccaaatattaatggagacgatcacaaaatttaacgtcttgtaaaataccaaaggattttcgaaggcaaaactttttatttatggaaattttgctctagctaggacaatacaaatttgtgaaattggctgtgggaaactgaaatattttctcttttgttgt

SEQ ID NO: 4155 - DNA, 3201 bp, Sorghum bicolor
tccccggccggccggccctcccagtgaccagtcgcgcgcttgccatatgcgacaggcacggtcacgtaggccggcaacccggtgcatggagtggaactactgctccgcccggtcctgctgctccgcgcgcggagcacgatgctcgtgtcccgcgaggagcagtgcgcgctttgccggacacggcggcggcgaggcctcgcgctgtcgagccagggcccggcaccgcgcgcgcggggaccagcggctgcatgccgcgcgggctgcgaaacacgggcaggggaggaggaacgaagccgagttggcgtcgtgcggtgcgggcacgttgctgggctggcttgctgctgcggcccccccggctgcgtcctccgtcctgcgtctgcgtgcatgcacatacgcgactcgggtctccagcagcgagaaccagtgtcaccgagggaacatgcacgtagccggttcccacgcgcccacttgtggccttgcgcgggggggcggctgtcccctaccccctcgccagaatccggatctactgtggcggcttccatggaccatggcaatgacaatacgttcctttggcagcccatgtgtggaagtagctactctacgtgctgattgatatatactggcagctatagtagtttgaaaaatgaagacgccttgcggtaatgaggattagggcactcacaatgcaagactctatcacagagtccaagacaattaattacatattatttatggtattttgctgatgtggcagcttatttattgaagaaagaggtagaaaaaataagacttcaagtcttatttagactctaagtccacattgttcgaggtaataaataactttagactctatgataaagtctgcattgtgagtgcccttagcaaataaactacccttacaagtctgagcattagtaaaagcaaaacgtccttgttcggggtcattcagagtattgtattcataaccaggttgtactaataatagtctgccaccgtagtcttccgtgttacattgccactgaaatctatagtactacatgtcaagaatatactagccctccatcgtacagaacgttagaattctaatataggagtactatcgtcataagcttgccgtaaatatgattaggcttcctgtgcctcggagagcaggtacaacaatagatttatagacaaactaatattgatgtggagaagagaatataaagagatagatgatagtttgactctcatgcaagtacgtggtgggctcaaatagcaagtgttgtgaggaggaatagaaaaattaaagataagtatgagacaacttattgtataacttaactctaattaccgcaacttggcttataagtatgagacaactcaccgtataacttattgaccttgctctgacccacaagctgaccagcgcctgagcaccggctacacagcaatgatgccacaccagattctggtccgggcagccacgatggcaggcacgcgacgtgaggcaggagaccagggcgcctacctggcaacgaccggtcggccccacgaaggacaccgtgccagggttcatgccggccggctgcggtgcctggccgcaccgcacccacccagcccaaccgccggcgctcccgccaggctccgcagccgtgcggctgtccccggcccaacgacccaaccggaaaccggatcctctgcagccacggtcacgctgccgccgccgtatcgtatcttcctgcctggcacgatgccgcctgctccctccactccacagaggatctcgtgcgtgcccaggccaccctgtgatgtgagccgccgcccgccgcaacaacacggtacgtagtatatatacgggtgccgcccagacctggagctctcgatcacttccacttccaccaccttccacgcttcacgatttgctccaccacctcaggtccccgtccctcagcttgtcgacgtacacaggccgccattgattaggacggacgccggagctcgatcaaagcctggaacgcatggcgggctacggcggcggcgacgacggcgtggacctcaccgagctgacgctggggctacccggcgtcaatgcgcgcaaggcgagacgagcgaggaagaacggccagcagccgccgtcgtcgtccgccatgtacgttgttgactggtgtggggtggcatatgcacgtggttctgtttctgtctgactctgaccggctgagacgattgcgagcaggatgcaagcgttcgtgaaggtgagcatggacgggacgccgtacctgaggaaggtggacgtggcggcgtacgacgactacggcgagctcgtggaggcgctcaatgagctcttctgctgctgctccatcggtaagcttgctgtgctgctagtagtgttatgctgcgcgagatcgatatacggccggggagaatggaaactgatgtagaattgtggtttgtttcgttttgtgcagggctgatggatgggtacggcgactgggagcacgccgtggtgtacgaggacggcgacggcgactggatgctcgtcggcgacgtgccgtgggagtaagcaccctcgctctgaaactgcactgccattgtagtaaagacgataggctctaacaatggcaaatacacgtgtctggtttgcaggatgttcgtgtcctcgtgcaagaggatgagagtgatgcgatcgtgcgaggcgagagggttgagctccaacgcctgacaggcatgcagcgccgcgtagcattgagaagagaatgacagaggtgggggcaggtgttcagaaatgtgctgtttctactctgcatgtggttgcattgcgctgaatgccataatcagcactaacacgttcagaaatgtgttattcttttctgtgttaaaaagaatcgagtcttttgtttttgagggcatgaatccgctacaatgataaagaataggttgaattaagaaaccctttgaaaagtgggacaggaactctatacatggcagtagcattgatcacacatcaaagctagtactacataccaaaaacaaatcatcgcaggaacatccacatatcgaactccaactggaactaacatttttgtcgctgctgaacatttcagtcgtgttcattctttccctctgtatatagtctgtaaataaaacactgattggctgtccgtttggtttcagatttgaatgtgcagaggcatcatccgaactgaacttgcactgctgcac

SEQ ID NO: 4156 - DNA, 11711 bp, Sorghum bicolor
aatcgcgcgagcaaagtcacgcacgaggaaagcgcgtgcgccttgagaccttctatttttatcatttgccaagtccaaatgccaatttccttggagatgacctttttttatcatttgcattttgttatgggagtttgcaaataacaacaaatgtcaagttaatttgctaaagcctttggagatgctcttatttttcataacaaatttatttaaaagatataagtattatagttttttacggatctaaacttagcgggtgtttagttatcttttattccaaacattttttaaggtttttagtctattattttgcataataaaattaaacaacattcaaaatttttgaagaaaaaatgactattctccatttttgatttttttgaccttaagacgccaaaaaactcaagagaacttcaagtgactcttatgatgacagtaaattttgtattttggatgaaattaaacatagctatgaaaattttagcatcttgcattaactcattccaaagtattttgcattttgtattttatggtgaacttccttttctattccaaaatttttttggttttgatctatcattttacatagtggaagagcaactccaacaacttgcatattcttgttgtagagactattttagaatttgcataataaaaggtaagcttcaacagatgtgctatctagttttgtaaaacaaaaaatagctattcatctctaagagttttgcaaatttcgttttccaaatcatggtatttgccaactcccaaaattatatggggagagaaagatgagtctatttccaatagtttcgtataattcaggccgtagagatttttgtcaacttgccaaaaatgtcaaaggcagttactgagattttttttcaatttgctaaaaaattaaggatgccaaagctaaatggcaaactgttggagatgctcctatctaattttatgaaatagcaagactgttatggtcctcttatttttaagaagttttatactttataaaatagttaaacaatagaattttattaataattttagtcacactttgggagttgccctaaatctctacaactaaaaattatggaaaagacccatctaccacacccatgataaagccacaactctcatcccttttagccatgataagctatcccatcaaccaaggcccactcacccatacatgtaaaattattttagtgaatttaaaaaagtcataacttttaaaccgaagatataaattaaattccgatagcaccattaaattttctcataacaaattcttcaaaacaagatcacacatgaatatatttagataaaattttattaatgaatatttatctctagaactaagaaattatagaaaaaacatagagtatgtggattttaaaacccgtaacaacgcacggacattaacctataatatgtaaaaaaaattggcaaaagatggttattcttcactttggattttgaccttaagagacgaaaagaaaacctaaaagagcttaaaaaggctctcatgagaataacaaattctgtatttttaataaaactaaatataactctaaaatttttagcattttatattctattattttaaattagttaatattttgcattttgtattttaaggtaaaaacaccccctgggctcacagcgaccacggagagggagtgccaagcgatccgaagtccaaacatcagtcagtttttgacttttcctcaacgtttgcgtcctttcaccgagagccacaagcccgcaactgcaacaagcaacaaatccgcgcccgctccgccgctttcctccccacctccacccagtgggcgacgactggcgcccatcgtcgattccccgttctccgtttccgtctcgcgtgtttggtgctttcgatctccccaaggcggcaggcggcagcgccgtgcgcgccgcgggaagattttggttggtggattgttggtggcggctgcactccgtcccactgcactggtccaatctaaatggcggccaataatagtgacccaatcccggatcagctgggggaaggaggggcgggcgtgaagcacgaaacaggggaggaggtgggggaggagacgtcttcttccgcggcgcaggcgaccgcgacgacgatgctgccccggtcgagctcgcggccgcagctggacctcagcggcgccgcgatccacgggacgctggaggaccgcaaccctaccatcctgcttcccaaccaatccgacgacatctcccacctcgcccttgacatcggcggtacgtgcgtgcccccgtgcaagtctccccgcctccgcttcactgttggactcaacagtgtttatcgctcggtagctatgtaaggttctgtctcgagttggttaatcaaagtagatgagatgcgggatacttagtaatttagcatgtgaccgtggaaacccaactgtggtcgaattttgagaagttggcacttccacctgctagtcccacagtccacactgaacatttccagattgctaccgcatctcaggacgactgcctgtctgcggattgatagtggtgataagatgctacttgcaacagtaagccgtcaaggtgggactgtgcatgtggcttccaactcttgttgttcctcctgaactgttaggatatgtgcttgatggattaaaatgtgccagttttaacaataatttcttcactgtcgaagggtctgacattttgtactctgaagtttgaaatttatgttttccctctaggatctcttataaaactggtatacttctcgcgacatgctgagctttccactgaagataagcgcaagatatccacaaagagaaaacttgggatgtttaatggtggcaggagaagctacccgattcttggagggaggctccactttgtcaaattcgagactgggaagctaaatgaatgtttggatttcatttcttccaaacaactacatcgtggtggtatgcaaacactggtgttagttataaataattggaatgttgtatcatcttcctagttatttccatcaccttgttgacatagtttcctgtgcttcttcgatagcttctgtgtacctttgaatcacagttcacctgtatttacttagcattgaatatcagttatatgctgcaggaattgattcaccttcgtggcgctcgggagctcagcctgatgacattgtaattaaggtaaaaactaaagagacagcatgactgatatgtctgaagactctatataagtactccctccattatccacaaatggaatctcaaataccaagaaaagtggttgggttctctgacttgcttgcatgcatcagcttccactcaggttccctatgcacgcatgcatcacgattggctggccgtttggtttccctctgcatgcgtgaatactattggttgtgctaattaagcatgcacaggctgccttaaacgaatgtcttgggaactgattcgcgacttacaaaagatcaaaagtgtgaaatctacttatgcctaataaacaatatagagggagtataagtaaatgattggattcaggacacctcaatagtccttgaataagaaaaaagaacaacaaatagaaaaaggggaaaggcctagagatcctctcatgcattgaaaggaaaagagaaaaatgctgaattaatagtctttacagaagtctttttttgcggtgagtatctgtttattgctgcattaataattcttccattacatactttatttttgcaagcacagattagttgtccttatttggaattatggccttaggattattttgttgctgagtgtaatattttgtggaaaggcaacaggtggtggagcatacaagtatgcagatgtcttcaaggaaagattgggagtcagccttgaaaaggaagatgaaatggactgtcttgtggctggagcaaactttttgcttaaggttccaaattccaatctatttagtccatattctactatgcatctatcttgtatgtgatgtttatagtggattgttggagatgtattaaactaacacatattagtaataattgtgttaacattcatgaatctaaattacaaattaccagcaagtaaataacactctttttctgcacttggcaggctatacgtcatgaagcttttacacacatggatggtcagaagcgatatgttcagattgatcagaatgacttgtttcccttccttcttgttaatatcggatctggtgttagtataatcaaggtaactttgaggttagctttctagtttgttcttttgagtttcaccggatcttgttgaccattctttttcaaaggttgacgggcatggggaatttcagcgagtaagtgggacaaatgttggtggtggtacgtactggggattggggaagctaatgacaaagtgcaagaggtgctatttttctgcccatggacaccagatatttctgtatacaagtttgatttctcctaaactcagtaattttgtttcagttttgatgagttgctagagttgagccagcgtggagacaacagcaccatggacatgcttataggagacatatatggtggtctggactactccaaggttactattaccatcaaatgtgtaaataattgtaaaacatgttgatattccccataagttattgtatgcactacttaaaagctgctagtctgacctgttattaggataacattcattgtgcactgtatgttagaaaaaaatgttattaaacttcttgtcttatgtgtgtattaattatgcatgcttctgctatatggcagattggtctttcagcatctacaatcgcctctagttttggaaagataatttcagaaaacaaagagctatcagattatagacctgaggatatatcgctctccttgttacggatgatttcatacaacattggccaggtatgtcaaccttgcgaggacatgatatggtaaataattcgtgaatgactagtgagataagtgcccaagaaaaatggtttagtactctcatcacaccttttctatagatacaaacacttgacaattattctaaaaagatttttggaaaatgtgaacaagtaaatgaaacagcgaatgaagcttatctgaacatggaacttttttgtgtgcttgatttatccaggaatctagcctagctttgagtggttgtgttcttttctgaagagaagacaataaaataagtgatagttcaacattttttatgctatatagtgatttttctcataatctgaaagtgatagagttgaaaaattaatgaaaccaagagcgagcgatgccaaagatgatactagatgtcagtgctgaacagtgtattgaaattggttctttggtgggtgaaggtctaatataacttttaatggtgctcaattgctcatagctataagtaaactcacatatttttttatgcttgatgctgcatgctaagttgataaaatacaaactgtagtgtttggtcatttcactcatttaccatgccctggattttgaatttatgattggtgcatacttccttatcggaagaagtacatttgattttaaagctccaaagtgccattgttgttgttttatcactgaacagaacactcagtcatctgtatcaattcatactgatacaggcacatttcacctcttctgaatacctaagctctctatttttttttctagaaaagccacaggagagctgtgtttctttgcactaagaagaaaaaattctctaatttactgtggtctatttttcaactcaattgaagctgtgggttcggtttctttttttttctgtagatttcctatctaaacgcacttcgttatggactcaagaggatattttttggtggattcttcatccgtgggcatgcctacaccatggatacaatttcttttgcagtgcatttctggtaattttttcccccaaaattggtgccccttccctcccctcctccacctcctatggtttgttacgttatttatattaatttttgaaataatgttctcccaatattttctgtgttggtaaaggtcaaaaggagaggcacaagctatgtttctgcgccatgagggcttcctaggagctcttggagcatttatgagttatgagaagcatggtcttgatgacttaagggcacatcatttggttgaacgcttcccaatgggtgctccatatgttggtggaaagattcacgggccacctcttggagatctcaatgagaaggcaagggcatcttctcctgatcatggttaagtttatggctatgatggtttggttatatttctgagtatggcatcctctcttaacacaaatctgatgctcaataaatttacacctttaaaaactcgaaatggatgtcactcagtcaaactacatgacaggcatgcacaagaaccaaagggtcaaccgaaatttctatctctattgaaaaggtcccttgaattagtcgatatcttgttgctactattttatgctggaatgagataacatttccttattcaacatcgtttaaatctagttcacttttgatcgccaatattattttaaaatgtttccattttgaactgtacagatatcatggatggagaagtttgtgcagaagggtactcagattactgcccctgtacctatgggggttccagctacgacaggtatgggaggctttgaaaggccgacttctaagggtgacattttgcggtcagatgcaagtgcagcgctcaatgttggtgttctccatctcgtacccacattggatgtgtttccattgttagaggatccaaagacgtaagacaaatgttcaactcctgtgtctactctctatgtgtgtggaagttggtgaaatttcatattattgaaaatgaacacttcctagatagtttagttctatttgtcaacccagaaaaggaccaactaaatactaactgttgcagtaaaatcagtacggaaatggagctcaatttccattttctaaaaggctctagaaattagtttaaacagtttttcacatcaagttaccagttcgttaagcctttccttgtagctatgataccaaaagcaataaacaagtttctgaatctttttcctcaaatgcagagtttcagcatatatccaaccttctaaattgtgataattgatctgttttgtaggtatgaaccaaacacaattgatcttgaccaggatgagttcaagtattcttctgtttctcttacttatagatatataatagcaattgagtcctttgatgatatctgagatgattgtgctaggtactggttcaagattttgtcagatcatttgccggaccttgtggacaaggtatgatgttgctcttgcaaaggcatctgcatagttcctcttttctttatgggatccctttctttattcatgacatgatgttaaaaaaaaggtttccaaatgtcgttctcgctcacaaactacaatcgtcaaccatccgagactctgtgtttcctgtacccgccaacttaatcagatgtatctccctcagtttccgaatccgtctattgaatggaatctctggtacagtcagcatgaggcggtctgtaaccacagaaggctagaaccacacctcatatggaacagaaattatatcaccctttatcttatgttatccaaatacattttcttaaaaaactcttaacatctttattgttggatcgttacaagtaagtatatcaggctgtgaactgcctactagtaatgaaggcacaccatctttattggtttccacataagcaggtatgcacctgccacaaatgtttgccaaaaggcacagtttcaagggactagttgctgtttccgtagcttagtgagcttagctccttgactctaatgaaggcaatatttccactgcactatcatcacaatcaagtttacattgagattgcatgttttgggctgagatagtacacatatgtttttttcattttgtagtaacaatttgtgaattgaggatgtttacctgaatatccatttcttgtctgtttggaagtaaatggaatcctgaaacagtatattcttggctaacttgtgcattctatcatttgtaggcagttgctagtgaaggcgggactgatgatgccaagaggcggggagatgcatttgcgcatgccttttctgctcatctggcaaggtaaaaaattgctattgcatgtcactattgctatctatctctttgctacctaacttgtgtgtctaaggttagattgatggaggagccagctgcttatggaaagtttggtttggtcaacctgttggagttgagagaagaatgtctgagagaatttcagtttgttgatgcatatattagcatcaagcaaaggttggcatcctacatgtgcgcatgcatgcacacatgctctcatttgtctaacattctgttatcttctgcttgaagggaaaatgaagcttcactggctgttttaccagatcttctgatggaacttgacagtatgaatgaggtatatgacaaaggggcttctttctgcttaattctgcacttaactgaagtcatcttaacatttgcctctgtgatagctcaagttatgtacttgcgattatgccagttttctattggcagcatgtggatgagaaaacatgagaaatgttggttcatgccacgatcataagtccacgtttaacaaagtaccactaaatgtgtttctggcaaaagcaaaacatgccaatgtcactgttaggggtattttttcattgttgttatttttcttttccctctgtagcgaagcttcaactctagatattaatttgagtgaacatttcattttcatggatatccaggaagctaggctgcttgctctaattgaaggtgtccttgctgcaaatatatttgattggggatctcgagcttgtgtagaactttatcacaagggaactataatagaaatctatcgcatgagtcgcaagaagatgcaacgtccttggcgggcaagtattccaagtctgaaatttttaaattttacagttgcattgcgacggagttataaaaaaaagagtgtgctgccacaaactatatcactaactttatgtactttttcttgcagattgatgactttgatatgttcaaaaagagaatgctgactgatagaaaggaccaaccatacaaaagagcactgctttttgttgataactcaggtgctgatgtggtccttggaatgcttcctttagctcgggagcttttacgccgtggaacagaggtataaattgaaatgctgaaaaactaaagagtttccttttttgttagatttgctccagactgaatttaattagaaagagcagacagaatgctggctgcagagattcaatcaagggaacacacgatatattgcatgctaatgtatagatcacattttcttatttcctatttccttcgttgaagatatagactgcatgaaaaaaatggaaaacatcattggtgaatgttgtgataatttcttaggatcttatgtgacaatccagaactgataaaaaaatggagatgatttgagctgtctggctgaccttgtgaaataactgtagaactgaagcagactttcaagattatcccatttggtgattacttatggaatatcctattttcataaattttccactgatagatgtttaatgtgatcaggtagttcttgttgcaaattcgttgccagctttgaatgatgttactgctaatgaacttccagaaattatagctgaagcctcaaaggtacaaagtaaacacaatcccttaccatttagctgtattatcgtttgttgttggctctaatttcatataactcaaatgataatgtatcacagcactgtagtatccttcggaaagctgcagaagctggtgggttgatagttgatgcaatggctggcatccaagatgatctcaaggatgagccagtgtcagtgccactaatggttgttgagaatggatgcggcagtccatgtattgatttccggcaggttagctcagagcttgctgctgctgcaaaggatgcagatttggtaagagggctgcaacatttttaactgaatgcattttctcatgcaagaatcatttgcaatgttctgttatttataatattggtttgctttccaatataatgcagttaattttggagggcatgggacggtcactgcataccaacctcaatgcccattttaagtgtgatgctctaaaggtacttgtttctgcaaaccttactcgtttgttgctacacaggcaaccttgatagtattgcaagaaatttcgtcatctaaaaaaaggaatcatagattttttatttaagaaatttgatggttagatcagtttcagatcatgactacaacaatattttcagtcataggcattggacttcaaatataattgtagtcatgactcatgagctcataagtcacacagcacagacagcagtattttttgtctagacactctgcagtcaactccgaattcagatgattttaagtggcaatgtagcttcagctgaatctggaacttccttacctttctgtcaatttgttggagctaaagagcagaatctttgataagtggtatgtcccacctaatcatgtatgccatttttaaaagtttacaagttgagtttttatgcgcagcttgctatggtcaagaataagcgattggcagagaagctcttcaatggaaatatatacgactgcatttgtaaatttgaaccagttttttaacaatatgggagtggcagtggagcattggtaatgcacactacatattttgccacggcattgcttaaatctggtagtactaacgaagtgggtatcttttcttcagttttatcaccagttttcagttttatcgtcttgcagcaacttgattggtgcagccggcgagacagaaacaagcatgcggaataatggtcattccagtgtacggggtacaagaaacgcccttccaatacgcagctagtgtctgtgataatagtgtctcaaacgatgtaataaataaaggctttaaagtccatttccagaaatattgaatggagaggtttgagccagccaactggagttcgtgtacccgaaaagcgagaactcgttagcagcctagcagggccgaagtaataacatactaatcctggaatgatcttgtcattcttatgccgtgctcgaatcaatccaaaatttgttcacctgccgagacaatgctgtcactcaaatgctaaaaatcagttattagtttttgcatggttgttttcaattctgagaaagactgtcaccatacattttactcgttagttaaattgtacagtagaacagataactcaaatcaggccttgtttacttccaaaattttttgcaaaatagaaatagtagcactttcgtttgtatttgacaaatattgtccaaatatggactacctaggctcaaaagattcgtctcatcaattctgaccaaactgtgcaattagtttatatttttatctatatttaatactcagcatatagcagttgatccactaatcaacgattagccgtccatcactccagaaactatgagctctaggcaaagttgatgtcatacgccttgccgccgtccgctctgaagatgccaaagtggcgctcgaactcggggccgggcttgccgtcctcgtcgtacaggtcgaacaggaacacctccacgggcacgccgggccgcttgggcgtgccgacgccgcgcaccgccctctccacgatc

SEQ ID NO: 4157 - DNA, 6361 bp, Sorghum bicolor
cattctttaattgtaagacgtgcttgtggagaaggaagtcatgaactgtttaactggaagcaattgttcatctcacagcctctaactgtttggaaggtgttgccgttggactctccctccagtccatctaacaagctgagtaccgttatttttgggcgcatttctattattctataggtaaggggaaagactctcccggtgtaaacctgaggacaatgatatttttctctgctaatgccatctcgtcaagggcaaaaattcctgtttctacgtttttttttctctgaaattgagtgattcttgtgaaattcctatgtgatttctatgaaatttctgcattccaaacagggcctaaggagcaagagcaacacaggctaatacgcattaatggtctcagttccatgtagatcaaatactacttacacctaagggcacccggagtgtacagaaaccatcgacagaccttaaagacccagttgacagtcgtacggacgaccatacaccatggtggccaaagtacaaaggaagcgcttgcttgagctagaaattcacaaaaattaagaaactattaaaacagagtaaaagaaaacgaaaatagagacaggtgcgcgtccggtatcaccgtcgtcgagaacgagaaccgcatgtgttccggctccctccctgggacccacggtaacggtattacgggaaaatgcccctccaaccccacctggtagtggtagagagagacaagacaaacgaggaattacaactttccaagggcaggaccaggaggagcttgcgcttgcgcgctcgccagtcgctctccagctgggccggccctggtatctccgcccagtcgcggcagcggcggagcgtgggaggatccggggcccctggttccctatccctgggccgataaggcgagtggtcggccatacaaaaagccgtggccccggactcgcgcacgggtcgctgtcccttgcctaccccgcgccctagcccttcctgttgtgcgtgtgtttgcgcgtgtatttttttattttatttctaatgcttttaaattttaatttaaaatagcctcacttcgtatttatatttttatgtttaatctttttggtcgtgcccgtgcgcacgctatatacattggcgcgacgtgatctatcatgttagacgatgattttcacatgaaaatttcactcccattggtgtgtcatttgtgttttgtcctgctaacagaaatagcataagaagactcgacttaaaaaatcatgtattggatgaagacgatttaactttttagttttgagtttttcattcgaagtagttaagatgctcaaaaaatcataatataaatttcagcagcataataagtgcctacaagaatttgtcatcatagaaaagtaacatctctatggtgttaaatgaagatattttttatatgaatgttatagctctataacaaaactttatacataaaaataaataaatgcaaaaaatttatgttattttttgagcatcttaataaattaaaagtaaaactcaaaactatagaattacaaatctcatttgaagttataacattcataaaaagagtatcttaccgtataagaaaacattactttttgtggcaacaaacacccgtatatgattattacattgctggaaatttatattattttttaagtatcttaaagatctcaaataaaaaaatcaaagtcaaaaagttatagatccaatcgagatttacaagttctatataagaattattgacatcatatgaaaaatatatgatttctctaaagtgaagtctattatcacaccaacggaagtggactatgtgaaaatcagtaaatcaccatccagcggcgccagcatcaaaagtgttaaaaaaaagtgggctaatttttaaaacaaaattttaaaataaaaagaattaaaaatggaaaaaaaatcctccctgtgtccggtggctgcggctgcgcgcatcatattcccacctcgcgaacacggctgctagtcacgagcctcgcctcgccacgcctcctctccattctcccccaccaaccgcagcagcgagactgagaatggccgcggcgccgtcgtccctcgcgtcctcccacctctcccgcctcgccgacctccgccgcgccgcggcggtggccactcccgccgtcccacagcagcttcgcatcggctgctcgcgccgccgcgcccagcgcgtcgtcgccatggctggatccggcaaggtgcgccgctgcccccgctgtttcacgacccgtctttaatctgcccatgtggattctgctctcatgctcccgcttgactcccctttgcagttcttcgtcggaggcaactggaagtgcgtaagtgctcgttctgcttctccagctttacgcgcctttgggatgtcagtactgatgatcctggagacgctgtgtaactgtatgatttttttggctgttgccgcattgggcattccaacgggaccgggacgagatttttgtcgtcatccatacatacatcgtgatttacttcgttcatggccacttctagagtcctagaaatagaatcgcttgtctgctctgctgcccagctttggcctgccagccaaagccgttttgttcggtatataatttttttttctctgaaagggaggtatataaaagttgatgttgcatctttcaccttttagaaaacttttagctgagagaagccacgggggaatgccaccagttcttgcctcctgaggatagagagttttggtgctttcttgattctgtttgctaagctttgagaggcctggacggaggagagacaatgtaaattggtgcatgctgtgaacttttgagttgtggttctttattagtaatggatctgcaagtttcatcggcccaaaatcaagcttcaaatttgtaaattcatttttgggcttcaacttcggattaacgaacatgggttatttgttttgaagaaaaaaaaatcttacttcatatacgaagcctcttcacttcatgagcttttgctagcaacatgaagttatattcctttgtgtatttagttactcatcttagaatttgtggtgttgatgtctgtttcttttccctcttcttcagaatggaacaaaggactccattagcaagcttgtttctgaattgaatgctgctaccctcgaaactgatgtaggtaagcctatttgtttcatcttcacatatcctagtcttcctctttctaggatattcatctgatctgtattcttatgtcttcctgtttcacataggttcccataaattttttgttaatacagatatcttactgaatatttgcatttactaatatatcacttattttctttgtgttttgtacaaggctatctattaaagtgcaaatccattgctaattcaatgtttggatagttggctcgtagaaagaactgctgggaaaatgtttgcttaatgctcctaatgagatttgctagtgactttcctgaaaaccttttatgtaactgtaagaaacttttaagcatatgagctacctgcatcttgtatgagtaccatgtggcctggaaacacttcttccatgtttgtagcagactcttcccttgaatagaaagtgtgtatctcaggttctgcaagtgcaactataggaacaatttatttattatttggcagtatagatgggattctgcttatgggctccaaattataaccaggacctactatcttgggtttgaaactcgtatagtatagagaattatctaagaaattctatgccactttgctgcttgtttcctgctgaataaagcaatgaaactaatgtgtggcattatgcaattctgcagatgttgtggtggcacctccattcatctatatcgatcaggtcaagaattcactaactggtcgcattgaggtttctgctcagaatgtgtggattggaaaaggaggagcctacaccggagagatcaggttgggtacactggacactggtcacccttttctttgctaagtatatacatggagattgcaattagctgtaaagtggttataaaaccagcagtctgttggttttactggatggactttggatagataggtaacgatggattaggagcttatttttcacttctggctttgctaatagaacttttacctttcccttaaaaaattacagtgcagaacaattggtggacattggtgttcagtgggttattcttggacactctgagcgtaggcatattattggtgaagatgatgaggtgaatattttctgtgcatatgctactggtttgacacttccagaaacatagtttttgattgcaatataacaagttgttcaaatgcagtttattgggaagaaggctgcatatgcattgagccaaaatgttaagcttattgcctgcataggagagctcctggaagagagggaagcagggaaaacttttgatgtatgttttacgcagatgaaggcttttgcaggtgaaatttcttcatctaagaaatcttttttatgggcgttctagagaagaagttgggtggcattgattttgcttgaggtgttgatgcatatgcaacatgtatctgcttgcagatagtatttcaaactgggccgatgttgtaattgcatatgagcctgtttgggctattggaactggaaaagttgctactcctgagcaggcccaggaagttcatgccgctgtacgcgattggttgaagaccaacgtatcacctgaagttgcctctagcactcgaataatctatggaggttagtttctcatgtcatatattcatatcactatgtcaggatagtgtgcttctcatatttctttgccattaaatttgataatggaaagattgaacttgcaaccacgattctactaaattagtatgagagacattaattcataagcttaaatatctcggcagatatttcattaaattttatttcagtgttgtggggtgtttaacatgacttactggctctatgatgtggccatcctcctttgctgtgttgcaggttctgtgaatgcagccaattgtgcagagctagcaaagaaagaagatattgatggttttcttgttggcggtgcctccttgaaggtatgacaagttaacctcagatctttgtacataatctcctttgttctgtaacctccattgtcagtgtctgctgtttgtagctcttaaaactcctcttgcaactttcattatgcatttccaaatctcagtggtgtttagcaggactatgtatattgattgctgttcagtagtaggtttaaaatcatctacttgcaatgttttgctgcctttgttctcagtggtgttaaatagggccggttatgttatttttgatctctgcactccatatgcagcatataggttataaaaccttcaagaagctgtcgaaaattttgaaccatcagtgtacctagcctgctatataataatgaatgatctgttaacaaattccttggttttggcaggcaccggatttcgccaccattgtcaactcagtgactgccaagaaagttactgcgtgacgcgccctgttagaaataagttgtcatcagtgtgtcagctcatctgccacgccataaagcctgtgattgtgggaggtgctccgtgtgagaatgtgattgtgtgccgtcacctcctggtttttgctgattttgcagcacggaaacagaaaataatgcaagatgtcatcatctttttttgttctcgtagaccttgtgtacgtgacgggagttcagttgtatgtgagcgatgtaagttgggaatattgtgttgtgtgtccttttttgtggaaaataatttgttgacagtcgaggagaatgataagtgtctttttttatgcccaatacttcaagcacaagttgccgtagaaatgataagtgccttgattgtgtaccgaaactacgtgggatcgtgcatgatcgcagcttggtgagagaagagccgatgctgagccgctcagtctagaaacgatgcaagcacacttggcagtggcagtgactgccagtgttctctgtttgtggccaaagagcaatttgcaatggatggtgcgcggctctgctaggacgacggacagccatggacggcttcggcaatccacaggccacagtgcccccagcgggcgcgccccatgtgacccaaaattccaaaactttacacgattcctcgtcacatcgaatttttagatgcatgcacgaagcattaaatataaataaaaaaataaataattacacagtttacctgtaaatcacgagacgaatcttttgagcctagttagtctatggttggacaatgttttttaaatataaacgaaaatgctacaataccaaacttcattttttttttcatctaaacaaggcctcacttgc

SEQ ID NO: 4158 - DNA, 5136 bp, Sorghum bicolor
gggccattcctaatctaattcaatacggtatgtctattcttcagtatgcagatgacataataatttttatgagccatgatgttaaaaaggcgctaaatatgaaattattattcagcacctttgaacaactatcaggacttacaataaattttcacaaaagtgaaatcttttattttggcaaagccaaagagcatgaagtgttctattcacagtcgtttggtttgtgtgactggtaagtatacctttcgttaccttgacctacccatgaatactagaaaaataaacaacaaagactggaaaataattgagaacaaaatcaaaaagaggcttagtggatggaaagacaaattgctttcggtagagggtcgattggttttgataaacttagtgttgtttagtttactggtattcatgatgtctttttcaaactctaaaggacatactagaaaagatagaccgcttcgcatcatgattttgatagcaaaatgaccagcacaaagcgaaaatatagattagccaatttatcatgtatttcctttgttttaaattataagttattttattttttctctagtctaattaaatacggatgatgctaagaccgacaacgaagatgcttacaatttgaaaaatatacaggaataaaagattaacatatatgtgcagtagttgtctatttagaatcatgtatttgtgatggagtaagaaccaagggattcttaaatcttagaccatcatcagtggggttcatgattcaattttcaatgtatccatattttaaaaaacaatgtaaaagagttttatttctcatgaaactctctttaggccatcccgagtgcaggttttatagcccagtttccaacacatccatattttaaaaacagtgtaaaagagtttcatccccataaaactatctctacttccataaaactcttatgatttctctctttattaatatggtgtcacattagcatatttaatgttcatgaaactccaacgaaaccacattgagactgatcttatttccatgaaactcttatcacctcttttttcattaatacaatgtcacatcagaatatttaatgttcataaaactatgatgaaataccgttgagaccgatcctttaaaacaaaggatttataaaatataggaatatgaaaaatgaggaataaatgccttaacacttcaagtgatatatgtgttttagatgtgtaggaaaaacacatgaaacaaaaacaatgaacttggagctcatgtttagtttctccaaaacttcttcataatggcccaacccatacgaatttcaaagaaattgctataaaatattcgtttgttccaaagagcctgacatgattttttttttcatatagaatttagattcttcattttttttatactttccctccattccaaaatgatccttgacattctagatgcaatgcaacgttcgcaccaactccggatatgtcgtgcgtgcccataggggcattcgcaatcagtaggcgatctctccccctaggctgtcatgttggacttcctggcgacagcacagcaggctggaaatcgcacaagtctttttttttttttgatatacaaatcgcagccgtgaggcaacattcatcacgcgagccggaatgtacactgagcggagcagcccacgccgcgcgacctggcacgtccgtacgcgagggcgaggcggcggagccagcgacagcgagcgagccgcgctggtccgtgtgaggcctggcctgggcagccttgacgcagccgcgccgcttcggcatcacgggtcacgggccgggcctcgtgcgctccgcccgtccccggagtcgcatcgatacgcccgatgcgcacacagctgcccatgttcccaaccgagagtatataccacggcccgccaccttccctagccccccacccgtctcctgcaactcatttctcccgagccccgccgtgagcctccactcgccgccgccgccgttcgcccgttccagcttcgtccatggcttccctcaccggatccgctctctcctttgcgaggcccgtcaaggtatagcgccggatcacctctcgagttgtctgatctgtgagataatccgattacgggtagggttttagctttagcggcgcagggtttccggttgttgccccggtcgcgatttctctactctctctggtttatgtctgcgtgcttattggtttatttactgggtctggtcgcgtttgagacgccctttggtgcgaagccattcacggtgatcatatcggtcgattgtagagttcaaatcgatagatctgcgctgacgtaagtttacgctctcacttcttcatcgtttggattagtggcgcagcgtccgtggtgtttatggacctgtatccgaatgtttgtggagtcagaagttctgtacggctgtatccgtgccatgagatttttggaattgtctatcaaatctgagattgtctcacctgactcaatgatttaggggtatattggtgacaaagctttccatgcttatatcatcttcaggcttacacccttaaccacctgtgtactattaacggttcattcatgattttaagattatatgtggactggtgtgtggtgtctacatacttggttcctagtgtgtcagaagaatagctagtttgcatattttaggttgattgacctgtatctgaatgtttttatgttcttgccctgcaagtggattgacattcgaccaacaagtgttatattcttttcaaagtttgaactaacacaaaatccagtggccatatgtggtctggcgaacgccaacctttttcttctgtagttctgtgttaccgtttggctgaaaacaaaaggaacagtttggataatatgtgaagagatataccgagatttattttattctgtgtagtatgcatctttgagtttggtgtgtacttgtttgcttttcttctcgataagcttgtaatgtcgatataggtctttgactctatctcttagagttaagtgatagtacatggcaatggttctacaataagcttgaaccaatgacacatagtcaagtggacaattctataaaagaataagtcaagtggacaatttgaagcactggtttatgctgtctggacttggttctcatatcttacgatgttacctttggtgtttcacaggcaatcagcattaagtcttcctctttctctggtttaaggaaggataatgtagccttccgcctgcagccagtgccacaaagattcgcagtctgctgtcctgtaagtaactagttgttgtactatgtatctgtaaccgcataaattgatcactgcatgatgctgcatctatgcatctccatttaatttcttttctgtcatatgccatagtttcaactactttgtttggcttctgaatagattttgtatgcattgtgcactaaagtgcttccactgtgtatttatgtacttgattgcattttgtgagtacatagctctgatgaaaggaatttccaagagaattcctgaagtattttctttatccttttattcctttgcatttggcacccctggatttttctttaacgtgtagcatctggtgtggctgtaaaacgtcccatcacattgtgtttgtgtttttagccagtagattatactggtgcaatcttcaataaactgaagtttgtgttacctaatgattatgatctttctattggtgctgtaaaatatgcacttgatcaggctaaaaaggagaccgtggatgaggtttgtaagattgtcaagaagcagcttgcacttgctgagggcactgatgtttgtggctcctctaagtttcaagaacttggtgctgattcattggacactgtaagtgaactacaacacacctttaagttttcaacaacttaatttatctatttaatttttttgtatggttctgtggtagcagaacaacaattggttatttcgttttgtacatgtaccaaactaccaatcataaattgattactcaataacatttaggatcagttttccagttctctactcggtctgcaagttctctattatgccagtagatcaagtttcatttgtagatgtgccatgttcccgtagttgttcctcttgaacagttgttatacctaattctgcaccgaagtttatgccaacttatattgtcatttgtgtttttaagtataaaccaatcttgtataaaaccaaacttatattgctcacctttacttcccaatgagacaatatcttccatggatctgttttttaggttgagattgttatgggccttgaggaggctttcaagatcactgtggaggagtcaagcgcacagtcaatcgcaactgtggaagatgctgctaatctcattgacgaacttgttgcggcagaagcagcaaaagcaaaataattgcattaaactcatggtcgcagtgctttgggtgcttaccctgctcctgtaccagcgcatcccttcttgttctatgcccctcttgttctaccctccttccctttttctaccctggagagctgtttctttgtcatgactgtcattgtggatctcgcggtactattatcatattgaagattctgtgcttgttcaagaagaaaaaaatgttgcgatatatatgttattatatattgaagctttttcgcatgttcaaggaaaattttgttattgctatagcatactagccactgggaggtttccttcagagttcgatttagacctgctgccaagcatgctaacggcacagattagtcctccactccattccaaatcgaccctgtttggatcatgggttttccaattgtgctgatgtcatgtgccgtctggaacaaagaaaaaaatttactctaatacaaagtttttgcgtatgcccgaggcagatgcacgtctggaggtgaagaagcaaatgtttttttttgcctcttacctttttccaaagtggtcaactgctcatcttcttcttgagctcatggccatccgtccatggctgacctggtatccggctggtgtgtgggagggagggggctcgcgtggcttgtaggccagcggcagtgctgggcagcggccgtggcggtggctgcgtgcctgtgttggcagcggcgtagcaagcaagagagagagagagtttacggtctgttttgtttgt

SEQ ID NO: 4159 - DNA, 6101 bp, Sorghum bicolor
caaatctttagacacatacattgagtattaaatatagacaaaaataaaaactaattgcacagtttgatcgaaatttacgagacgaatcttttgagtttagttagtctataattagacaataattaccacgaacaaacgaaagtactacaatgtcgcgaaatttttttcttcgccaactaaacacggcccaagaatactccagtaataaggaggactagaatgcaactgccagggcaatgcctgcctcagttgctatggcgtctagtactcgatcgtccgaacaaatcatacggtatttgatttgatgctgagccgacgtccatgcttctggaaatcgtggaaagaagtctaggctcgcgacgccgattccaatccggcgtaacttggattgggccagtttatatcacgcatcccgcactgtcctgggtcctgaccgaactaacaacgactatagtgtcctgatcgaacaacatgagtcaaacgcaggcggcaacctgaaggccgccatgtcactcgtcatgtcgcaggtgcaagcagattcctcgtcgtcgtcggtcgtcgaactcaggacctcatcatagtcgtaagtgactgtttagatttgggatgaaaattttttaggtgtcacatcggatgtgtcgaaaagatgtcgggaggggtttttagaaactaataaaaaaataaattacatagctcatcaggaaactgcaagacaaatttattaagcataattaatctgtcattagcatatgtgggttactgtagcacttaaggctaatcatggagtaactaggcttaaaagattcgtctcgcgattctcaactaaactgtgtaattagtttattttttatctacatttaatattttatgcatgtgtccaaagattcgatgtgatggatgaaaaaattttgggcggagaactaaacagggcctaagtcgtaactatcctctttgaaccttcaacagttcaacttccatgaagccctggtagtataaaccagaacagctagctagaaatatctcagcattatacttaccaggaaatgtttcagcagggaccggaccggatacagacctgaccggtacggtgctcaccatccgttgcctatccatctcctatctggaaaacatcacggtcgtcacccactcgcccgcccgttcgttcattcattcagccacggggtctcaaggtgctgcgctggtggcgggcacgcccacactagactttcctcggtccgtttccaacagtaatcaccacaccgaaaacgatgcgctgagaacccagggccttgtttagtttccgaaaaattttgcaaaatttttcagattcctcatcacatcgaatctttagacgtatgcatggagtattaaatatagatgaaaataaaaactaatgacacagtttggtcggaattgacgagacaaatcttttgagtctagttagcccataattagacaatatttgtcaaatacaaacaaaagtactactattcctattttgcaaaactttttgaagtaaacaaagtactgaacctgcacgcgtaaaatcgaaatcacacacaaaaaaagaaaaggcgatccagagacccgagtccggaccaaggcgaccccgaccgcgccgcggcaggcggcaggcggcaggcaggagtccaaagcgaaacttccagcgcactgacgcgtgacgtctgaccccgacggaaaaaaaaaactctctgcgccgtgggccccgccacccaccccttcccgcgggaacccagcgtccgaaccggccacctcgcactcggaggtgccgggtgcggcaccgcggcgcggcaggtacactacacaccctgttgcgcggtgttggcccttccattctcccccgactcctccacctcgcccgcggggctccgaatcccggataaatagcagcccgcggacagagccctcgacctttccaattccagagtttcaaggcctcgctttaccttgcttttgcttctgcgtctgcttcgctgcctatggcggcgtgggtgcgggccgcgttgctggccgccgccgccgtggccgcgtatacggcagcggcggcggtgccagcggaggcgctgagcctggacgtccaccaccggtactcggccaccgtgcgggagtgggcggggcaccaccgcgcgccgccggccgggacggcggagtactacgcggcgctggcccggcacgacctgcgtcggcggtcgctcgcggccgggcccgccgcaggaggaggaggaggaggggaggtggccttcgccgacggcaacgacacgtaccggctcaacgaactgggattgtgagagctagctaccactgcctcgctcgcttacagttttttttttcttccgtcaatctaatcttccttgttggggcttagcttagcttcgaatcggggagagggatgaatagaatggaatcattagcatagtccaggttgctgtttagggagctctggtgttccttttgcctttttttgagctaaaagcagcaggcggtggttggagttggttgcgcagcttgcattacgcggtggtggcgctggggacgccgaacgtgacgttcctggtggcgctcgacaccggcagcgacctcttctgggtgccctgcgactgcatcaattgtgcgcccctcgtctcccccaactacagggtacggcttctcctcctccttcctcttgccttctactccacccttcgttatgattgcgactgagtttgatcttttgctctatcggatgctatactatactagtactatcttctaaaaacattagattacaaagttaattctcgagttgttttcccgagattactgcatgatcacgcggacatatttcgtgaaaaagaacaaaaagtggaagcatggcatgtgtcatgtgcaaatcttccagaagcacggcagcctcagctgggaccttgtagggatctaataaataaaaacaagtccaattcattggttctggccctggacatgtgtattcttttttttttctccttttgaaaacgagaagtttttattttctgtcaatatcacagaaacttgtagtctcctggtgcttccaatccattgactatactatcaccaaactgtacatgtctcatgtctgtgccttgtgtaatttgaacaggatttaaagttcgacacatacagccctcagaagtcgagtactagcaggaaggtcccatgcagtagcaatttgtgtgatctgcagagcgcatgccgatcagcaagtagcagctgcccttacagcatcgaatacttgtctgataacacgtcgtccaccggtgtgctagttgaggatgtcttgtacctgataacggagtatgggcaaccaaaaattgttacggcccccataacgtttgggtacgcactctatgatacaccacacgctaaactgtataattgattgtgcttatttccgtgtgctgaatctcgtgccgattgttcagttgtgggcggattcagacgggttcatttctaggcagtgctgcacccaatggtctacttgggcttggtatggacagtatatcagtccctagtttactagcaagtgaaggagttgctgccaattccttctccatgtgctttggagatgatggtcgtggtagaatcaattttggggacactggaagctcagatcagcaggaaaccccgttaaacatttataaacaaaagtatgttccgactcatcatatatgcatttcatataaacaagaaactatatatcaacctcatcttggtataccttcttctgcagtccatattacaacataagcataactggtgccatggtgggaagtaaatcctttaacaccaattttaatgctattgttgactctggcacctctttcacagctttgtctgatccgatgtactctgaaatcactagcagcgtaagtattatgtctaatcagcactgcatctttcggacgtggaaaacttgcctttaggggcatatgccatcatgtgcattcactattcgatatacatggggatgagagagaaatgatacacataggggcatatgtccctaagggcaaaatcaacattacctgcatctttcactgtgttttgttcttacacatgttcattcttaatcagttcaattcacaagtacaagataagccaacccaacttgactcttctctgccctttgaattttgctactccataaggtattttcatctagtaacaatctatctacacgtactgctccatgtatgtctgatggatttgctgctgcacactccagtccaaagggttctgtcaatcctccaaacataagtttaatggcgaaaggtggaagcatattccctgtcaatgatccaataattaccattacggatgatgcatctgtaagatagaactggcactctactctatttgtttatttgtttatctgtatccctgtaagtgagtttgttaattaatttgcaatacctctctctctctcagaatccgatggcatattgcttggctgttatgaagagcgaaggtgttaacttaatagggggtaagcgcttctgtgttcaaactcttaaaccttctgtttggactttaaggtgcttagtctagtttattatgaataacccattgaatggattcgctatgatactgttaatcaatagacttgcttttcttgtcaacttattaatgttttgttcatttattccaaatccttgcatattcaacattttagatggtgccctgttatcatgttatatttgagatctgggcacacacaccagctacatccatgactattcttttatcttgatctcagtctggacgtatgcagtgataatagcttgcctcaatgtttagtcattttttatgcagagaatttcatgtctgggcttaaggttgtgtttgatcgagagaggaaggtcttgggttggaaaaaatttaattgtaagctccgtcatatccatctagactttttttgcagattaaatttaaaaagcttgaaactagagcaatgcccttacatgttgtggcttgtcatgccaggttacagcgtggacaactcaagcaaccttccagtgaacccaaatccttctggtgttcccccgaaacctgccttgggaccgaacagttacactcctgaagctaccaagggtacctcgcccaatggcacccaagtcaatgtattgcagccttctgcaggtttttcgctgaagctgcattgcaacagaaacgtctttgtcgccgctgctctgctattgctcgtgatcctttgatcacctctactccccatgacagtcttttcaaaacaaaatcgccagatatgataggtttagtcaacacttgatcaccctgtattgatttacgtatagtgctataggatcacattcttttggcttgtgtccacagttccagtaggagataggatagaacacgggatgagtccatagcctcataggccatttttgttccatttttacacgttcataatgtaccttgtgataatttactccacccagagtttgtgtggtggtggccctggtgtgtgtacatattagagatgacttcaggatgtattgaccttatagactaagggaataatgatgctcacttatagaggtatacttcatattggttctctatgatgctctcgtccaaatattactttgatgtagattttttgtgaggatgagaacactgaattcaccgacattctgtcattgtttcatttgaagttttgctgaggcccccaaattcacagggacgccactgattctatgatgtcatagctttccacgtttcaatcttttgttgatttcgtttggattgtggccatgtttgaattttggtccataaggaccgttcccaccaattttttccccgcaaaatgagggacattgtaaaaagtatcttaccaccttttgagccgcaaaatgagaatacgttaaattgtgtttaaacaattgggctcaaatgagagatcttctaaaaagtatcttaccagcttttgagccgcaaaatgagggagaaagtctacttttcctcctccactttttacgaaagttcgtttttcctctctcaactccaaaactagacaaaccacgtccctcagcttttcaaaccgtgca

SEQ ID NO: 4160 - DNA, 9017 bp, Sorghum bicolor
agcactagtctttgttcgtcagggcatctatgttgacttcgtcaatcttaatatctattggctctagtgttctctatgtgttcaaaatatgtcaacttacttagagcatcactgatagaaagaaatcagaatatctacttttgatctggggtagcagaagtatcatgaatttcgttagagaatctccaacaatcttccttaaacccaccctttacattctcattcggagagtcattcgttctaataaaattcactctctatatccttctgcactcaaacaactcatctatagcttgttcggtattttttaagagttaactctgttctttatctttggctagcgagaagccatgaatagatgatacaaatatttagagatctaatggaaaatcctataggttaggttatgaaacccgtattcctacaaatatatgaaaagatataaagaaatcctcagagttcctcttaagtatatagaaactacaatagtaccctatttcgataaactaaaacaaaacaaatttaaatctcttacccttccttttgtgtttctttccgatcttgggtctaactttgtttttgaggtagaagaccatcgtcttcacatgcgagcaagtaactctattaggttgattggttgagttactaatctcaatgagatatttagaatgtgtttggttgcctacatgccttcaacctacatcgtactggccgagacagaccttccgtggctaagttgttgccatacaattgctcaaatttggttgcctggatgagtgtagcatggccgaggagagaagttgattggttgtctagatgcatgagctggccttgcactgctgctctctcatcttatgcagcttgcgtgccagcctgtatcccgccggtctggcccaatagatacgctcgattcctacgtttctataaagcctaactgcaaggagaatcttgcataaagggagcctggtccaatagatacgccaaccaaacaaattgttgttgtcgcatgcggagagcctggctgagagtagatacaagcaaccaaatgcctccttcttaacgacgacattaggcaagcgactgccaaccaactcgtgcccgagttaccacaacaattaacatcgtgattcatccaactaaaatttagctaactaagatttcaaagctaaactttagtcagctaaaagctattttggctaaactttaatagactcaacaaaactttaggtggactgaaatagtaaactcaactaaactttaaccactcttttagctgatccgcttaaatccctagcaactaaatttagccagctataattcagttggtagatccaaatagactcatagttacaaaggatcatattcatagcatgaccatgctattgttgcacgataagatactctagccaaaccttgctattttccacctagttaaggtattactccatttgttctagtcaattttttaaaagttggactaactttatataaaagagcatcaatatctataacataaaataagtattttataaaaaatgtttaatactaaatttaataattctacgataaatcttaaccttttttttgagagagagagagtgtgtgtattttcgacagacgaccatgttaccagatttggctctggtttagttcaatttagcttcttccatcgttattacaggaccaggaatacactatacatataatctttcctcacatggctttccgcctttccgacgcagaacaccgccgccgccgcccggggccagcgccactgcgccagccaagttttcaccagccgaggtgaacagagacggatgaccgggtggcgcggccgcaagcggccacgcgggcgtatataaccacttgtgtccggctgccggcagtccgcggctccgcccccgctgccgtttcatctcactttccaatttcctttctcctcctccttaaaaaatcggccacggttatttatctccctcgctccgctccgctccgctttcctaatccgcgagctggggggagatcgagacctaaagcggagggcgggcgggcggcgccgagggccttaggcgaatggcggtggaggaggccgcggagagctgcggcagtcacgccgcggccgccgccgcgtccggcggccgcgcggcggggcccgcgacgtcctcgtcatcggccgccgcggcggcggcgctggcgcggaagcagcagcagcagcagcgccacaagctcgaggtgtacacggaggttctccggcgcctccaggacgccggcccgcccgacgcgcgggcgcccgggttcgacgacgagctctggaaccacttcaaccgcctcccagcccggtgcgtgctcgctcgctctcgcgacagcgcttcttcctccgacagtgacgtggcgcgaatgcaattcgccgccaccagtgggtttcgctgcgggcggcggtctgggctgggctcatctggattcgctttggtttctgcagctacgccatggatgtgaacgtggagagggcggaggacgtgctcacgcacaagcgacttctggagcaggccaaggatccggctcagcgcccggctttcgcggtgcgggccgtgcaggtgatgatttttcgaatgcaattttgaacgggacttagctagttaaagtagacgaagtcaaacacatgttttcctcgtttattatttattcgcaatatggttttaccgactgtggattttagttggttggttcatttggttgtcactcattcctgcaatggagaattccagttgtctgatcttttccttactgtacttatgtcatctgtgtgaaggctggactgcttgactttgtctactttaactagttaagtgcactttttacctgataacatcttccactgagatgagctcattgctatgttgtgcattcgtgctccttttgatcggaaaatccaatagatccttctgagctcttcagtgccaaaagcatgaaagtaatgtcatggtgttgcattcatgccttgctgtttaggttcagtagtcagggtactggctgggctagcgggaaatttcattatgttctaagctgaagcttgtaaggatttcattctacttcaccatctcaaatttgggttctcttgagtgttgaccacgtggtattgtttgtattgaactatcgatgcaaacattttgcgtttatgcatttctctgaaaatttgatcatgccaatagttcaatgtctatgcatgttgtgttacaaagaagtagagtttaagctttccacaagtgtcagtgcccttgttttaatcggtagtatgttactgttcctgaatttcaacgcttaattttgtacatagagtcgttcttttctttttttagctagttgctaaattagcaattatgatatataaaggccttcaactattgttggtcattgtccttattgaatcttgattcattaggtatctccaattcttgatgggaatcagactgatgctgattcgaacactgcaggggaggaagtcgcttcaagactgaacaggcagcaaaggtacttgtgttttctcatctgtctagtacttgattattggcaaatgacaatcattttgcattaccgctatgcacaacaaaaaatatatatttactactgatttgtttgatgtgatctttgtttaacatttatgacttgtttccagcatacatcctcctgctttcggttcttctacaaatcttgaagcccttgctcttgaagctagcaagtctcatcaagatcatgatagcacttctgataatggtcgatctctgtacaggtactatttgcttttaaactctactctctacgtacctttatattataatattctatatcttagagcttcttggacatcccactatttttaaaactaaattaaacaaggactcaaacccctgccagctagatgcaaatttgctccctagccagtgtaaccagcaagagtacatgaaaataaaccgacccctgggggcaagacctccctgaggcattgatggaaaggtagaagattctcttccctagtgtcaagaaaaagccactaaacctggctgtcctggacgtgccactaacagcaaggacacacctgcagccgtgtattgtgctgcaaccattagtggaccacgtatttcactaaacatagcaacgagtggcctttttttttttggtgaggatgggtagtctaactcccgaccttaggttgcatttctgcatccctaccactgcgctatgtgtatgttctcagtgagagtacacaatgagtgatctatttacaggaagtatttcctgccagttaccttttccttctattttgttgttgtccagccatagtttcctattaaaatttttgtaacttgttagttaatgctgtcatggtataagaaaggttccaattacgttatcttcctttgttaagtacttgtttctctgcagatacaatagttttcttgtgtcatttcaggcccatgcatgaaatcaccttttcaaccattgacaagccaaaacttctcagtgaggtaaacctatgtattgttgggtttctcatagggattgtttctatatcttcaaaaatcttgtacatacatttgtccttctgtacatattatacattctcactgatatctcactatctctacttgagttaattcgtttgatatttagtagtcttcttatctatttgtttagtgatatgaaattttctgatattgacagctgacatctctgctcggtgagcttggtctaaacattcaagaagcacatgcattttcaacaaatgatggctactcacttgatgtctttgttgttgtcggttggcatgacgaggtattcactaactaattcttttctggttatcattttcccatgccttatgagtcttgtgtgtcttttcaatatatatagcctttgtgtatatctttcaaagatgaagtcacagagcaatagttctcagaatactgcttgtgaagttaatacataagatatccgcacgagagtttataatatggtttagcatttttaattaatgtggtctaaggcagataataagtctagtaattgtgtatgtgcatgtgcatgagaacctgtgactagcatcatggatcatgcaacatatatcgatcatgtaatcaacaaataatgttggtaacagacatcaatgaactgccaatacttcagaacaagagcatcgttgtggtctgcatattttgttttgttattatctcagtctcttactatttatttacctgttaatttacttaggaaacagaggatttagtagaagcagtgcagaaggaaattggcaggattgaagaggtaaaacagactcattcgatgtggactagttgagccctaactgcaacagatttgttttctgtgtcctcatttttctactctggcttggattcaatcattcaacagacacaagcatggtcttcatctcattcatggtctactccagttgaaaacatacagattgctgagaattcagcagctgaccatgttgagataccaacagatggtgctagtgaatgggaaattgatgtaaaactgctcaagtttgggaataaagtagcatcaggatcatatggtgacctgtgagtgtttgttgctagttatcatgggggaaaaaatccctcacttaatgattaacgatatgtttctgtttccagttaccggggtacatattgcagtcaagatgttgctattaaagtgctgaaacctgagagaataaatgcagacatgcagcgcgaatttgctcaggaagtatatattatgaggtggttactatactcaaactctgtttcaccttgtattacaagatgtgttcttattgtgatattggtagtctggcatgctaatttaatataccttcaaagtttctgaggtttcatttggcttcttgttattttaccttatgtaacttagtcttatttcttctacaatgattcttagtcttatttcttctacaatgattcctatcctacagtcacttcaagtcatcatttacatcaagatctctttgctgtcttttacctaccaacatcttatgttaccaatcctttatcagcatactgactgatctctcgtagaatgaacctagatttgaacttcaaacgcaggatgtaactgaatgaataccttatcaccccatagagtgcttccttggcacactgctcttttatgtactactttgctgagtatgttcttggattttaggaaggtccgtcacaagaatgttgtgcaatttattggtgcttccactaaacccccaaatctttgtataatcacaggtatggttgaagaaaatggtcgtttcaagttgtccattttcttgttgtgatggtaattgtaataatgagtgaaccatcttattttcctctcttccagaatttatgtccagtggaagtgtgtatgattacctccataaacataaaggtgttttcaaacttcctgctttagttggagttgcaatggatgtgtcaaaaggcatgaactacttacaccagaataatattattcaccgtgatttgaaaactgcaaaccttctgatggatgaaaatggggtaagtcatctaatcaggccatttagaatgtggagttgctcctgtttcttgtggatttcattgcagtcaacactttagcttccttccatactttcagacatgcaaaatacatgtattcattgtattgtttgtgacaagttccttttgccttgatggctcttcatggccaggaagagtttctattgtaccaaatctaggactggatacatttgcctggcttacttttattagcttccttctgcagactgttaaagttgctgattttggtgttgcacgtgttaaagctcaatctggagttatgactgcagaaactggtacttaccgttggatggccccagaggtaattctttattattagctttgacctttgatacctttaccatctaccactgccaatgattatatgtttatataaaataaatgtgatcacaattcacgaaacacccatcttcatgtctcgtgcttaagatgtgaatgaaaccaatggatttccttgtaacatgagagaagtggaaattccttattactaattgattgtacctgataaagaacaaattgtttgtatgaaagggcgatctgcaacaggtcttttagcagtatactaaattcctacccatcaaataattatctgaaaatctaaacgatatgtgaaaaactggaccaacctaggggtgggcaggtggctttatcaaaagaaataggcacctgaattcacctcgagagaacttgaacttgggtggtctggccatctgagcatacacccacaacctcaactgaataaatatgatatgcagtaaagtaattggtgaaggaagaattgtgaggactttcatgcttttgtatgctggtagcttcatactgccatcttatgtgacaagtggagctggctctggaccaggccatgacaaagaaattgttacagtgtgttgtagtggtatgggtaccttccaaatgatcacaagcttttggaccgcagtggacttgagaaatagagctgtccagtttactcttttttccaccagtggtatgtcgcctaacaaaatcttacatactttcaggtcatagagcacaaaccctatgatcacaaggctgatgtttttagttttggaattttgttgtgggaactactcacagggaaggtatgtgcattgatcttctgttatttaatccattaattatgctagcttattcttcttttaaatgagttattattaactggtatgtcatctatttctgcagattccttatgagtacctgactccactacaagcagctgttggtgtggtgcagaaggtaaaatcagcagcttgattctttttatcttgctgtcttctttgttcaaaattctgtttctaagaacaagagccagccttatccacattctactgtgatagaataaccacatatcttggaatccgtgactattccatgaaatcatgcagatggtttggtaatgatgcaaacaacatattttcgtggagttttgcttgaacactagcgagtattgaaaatgagtgaatggcaatgcgatcccaatgacaatagattcttgactttctttgccacagatctagaactttctcacctctgcgctataaagagaaaggaaaggggattgcagcattgagtccttctctaacgtgttaagtttcgttggcagggattacggcctacaattccaaaacatactcatgcaaggctttctgagcttcttcagaaatgttggcagcaggaccctgcccaaagaccagacttctccgaaattttagaaacccttcagagaatagcagaggaggtatatgtgttaacacctaattatatgcttataggaataggagcttatgctgacgttcaactcgtgtgacaggtcggagatgagcacgaggggaagcacaaggacagaacactgggtggtttcttttcagctttcagggggcggagccattgagacacggttgaagaatgaagacttgtaatgtacatggtcccggtccatccttgaaggacctacaaccagcgcctgttcctcgcacgtcagcaccagtacacagaaatacagacctgctgcagctgcagttgactgaagtggcaatttttagctgcagccatcgctttccgcctatctgcttgttattcctgagttccattattacacaatgtaacataaggagaggaagcttgggaactgtacatcatcatctgtctgatttctctaacagagtgtaatcttgctgtagatgaaaataataaagccagattcaggccgtggcatgattcttttaagattccatcatttagtatcttttcttttaggtgtcgtcattcttttctggacatgctccatccctccatggtgtggtatggagtgaaacatcgccgcaagctcgagtagctgaacaacagaacaagccaacaaaggcatctgcatctgcatttgcatgggctctg

SEQ ID NO: 4161 - DNA, 3583 bp, Sorghum bicolor
ataatatgctcatagttaatcttctcaagcaatccactctcaagtgctatcgtagccaaactattaagtctttcttgtgtcattgtagagcgcaagtatgactttaataatttcaacttagaaaagctccgctccgctgatgcaacagtcacaggaatagtcaataaaattctatatgcaatagctgcattgggaaaacaatcatgccgctttagaaacttaaggatttcaagaggacccatattttctcttggaatgaaatcctgaagaaatctcaactctatatatagttcattggcatcaatatcagatttcccctctcttgtaaggactgcttcaagattgtcacaagaagatttcaagctgttactatccagtgactgcaatgagtcagaagtaaataagaaaccaaaattcttttggtactcctgatattgttcaaatcttcttgtaagcgagacaatagcttgatcaacaataggaacaaaataggtgattctaaataaatcttctggagactgtgcggcaacatttgtgtcatctgggttctcatcaaattgtctctttcttttaatctctcgctttttacgaaatgttgtgccgatatctagctcaagtgcaattcctttggctgcctccaatgcttctaagaaaccagtttctctgtaccctttgaagaaagaaattagcccttgcactttctcaatagcaacatcaataagcatatcctttgcttgcaagtgcttgctaactaaattggcctcagaccttttatatccaatcggtggtgcagtcaggagcgttggccggagacaatcgagatgatctgatggacatgaagcgtcgcgccgtcgccacgcacgtgaagtcgccgcgagggctgcggactagataggagaccaaaggacgtgtgcgtagagccgtatactccaactaggttctgctactctgtagaatacatagggccttctactactggacttattttttgaggccctgtaatcttggggggcctgtacggacgtacgggttgcactcccatgggcacggccattgtaaataattaccaccactatatatcatgccagatggaaatcaagtgaagtttcgtggcatagcatactccctccatcccttaaaaaaaaccaaggacatgatcgctaaacacgatgatgtaacactcatgacacgaagaagagtgagaccatgtttggttcccaccaaaaccttttcataccatcttatcgaatgtttggccacatgcatgggccactaaatatagataaaaaataataattaactgcaaaatttacatggaaaccgcgaaacgaatcttttataaacctaattaatttgtgattagttataattgctacagaacacgcaagtgctaatgctagattaattaagcttaataaatttatctcatggtttccagacaaaattatataattagtttttttaataaatatccaaacactcattccaacatcctataaaacatctgaatccacgaactaaacaaagcctgagttgtcgatcatcttttccacttgcccaaataactatacacattgataacgattacgtatgataggaacacttggtcacataaatgaacgagtgattttaaccattgggtttcgacttggagtgcttcagtaaaatacgttgtacgtgtagtcgtgctcgtcggggcaaaaaaaaaaatgtaacaggaaagattgtgaatgaaataccaactagtgtgaaactgtgaacggccagcaggccaagtcaagcatgcaaaaaccggtggctcctctgattcacaaaactgcatggaactccgctcccgcccattaactggtaggtgaccaacaaacaaagcaactagtgccgcacgctcaccgctcaccagtcaggcctatttaagcgagagacccttgccacatccagcctctagactctgatcgctgccgccggcgaacagcgtcacagaagaagctcgagactctaccatggcgacagtgaggggcttcaccttgttattcctctgctgatgcttttctcaccatcaccaggagtgaccgatggatttggttcttccattcacaggaggcgtccaggcgattcaggttccaggttgagatgcactgccgctgcattggctgcgtcaggaaggtggagaaggccatggcgtccattgggaggttcagtggtagtacatccttactagctgttcatctcctctcactctatatagattctgcaaatcagaacaaaggtttttcttttgtgacacaggagctgaaacttctgtgggggatgtcaacagcgggattgtcacggtggttggaaaggtgaacccaacagagatttgccactggttgaagaggaagacgaagaaaaatgtcaaagttgtgtaccctgatactacaaccgaggatcacaaacaggtacttgctgtatggtaatagagtagagtgaaaatgaatggcaacaagatgtcaattttctagatgaatatctttcaatatgaatactttgatatccattcgactacgacgtgtacagtatgccgaatagaatgaaagtgctttgacacagatcaaagcacgttatcagaagattaaatggcgttagactacaaaaccatgtcaaaatctgacaaagctgcgcagcagacatagactggttaactatgtgtaacggtccatggttcctccttaagcatgatttccaaaactgaaactaacaactgtacttgtttgcagaaaatgatattggttctaggaagcagctcacaaggtgggcaccctacaccctctgctccaccattacaagatggcatgccctgggctttggtaccatcaggagttcagccagaccatgacagcctacaattcattgaggagaagatcaggggcctcgagaagatcagggatgttctgaagatcaagaaactgcaaaacgagctgattgcagccaagagtgagctcaaacagtcaatgagagtgatcaatggcagtaagaaagttctactggatagtgctttgaatcagctcaaagcatacaagaacctagaggcacttagtcagtaaagttatgacagcaattctagggcctgtgagggtcttgctatagttgctgccacagcaccatgttttgcgaaggtgctctgtaatttaactgtggtttgcagtttgctaccaagtaaaagttatcagttactgggtcttttgtatctatcaaacctgtgctcccttttgactaccaaaacaccattaggtgtcaatttcctccccaatagggcacttatcctgcatgaccttttggtgaagtactggtttatttcctcctttgtctgatatctgtaagtggtctgagagttagatgatatcaaagtagaagattacacagaagtttcagtagtgatattgctacacacagaaagctagatagtgttcaattaactgagagtttcaagggcaatgctactgaaacaacatataacagcacgtagagtaacaatcaacacgctcaaatttattacttttgtgagttcgaggaaccaactggtgaactgatggttgtttcagac

SEQ ID NO: 4162 - DNA, 5865 bp, Sorghum bicolor
tttctgaaaaatacctacatttgccactataaaaaaataactaaaagatacccccgacctccatcttcatctagattactcacactcgtcgttatgaaaacttacctttactttgattgcctctttttggagctaccatatgaattgttaagagatgggctaggaaaagagataaatcatagaattcccaaaagagagagaatattcagctaccatttggtaaactccaataataataataataataataataattaatagccattagacctattctgattaaaaaagcatctccgatgtaatgaaaaatcacttaaataaccccctaataaatcttaatatgggaattgctcacatctactacctccataaaataacctcgtgcatcttcatctaagtaattcacctatagtatcatacgtgaaaaataatatgaactaacctccaaattgcatcaaattaccgaattatatcattattacaattacctaaacaagcaccctaagtcagcatctaaattacctatcgtaacacacaaatctgccagtactccatagattacatttcaaatataactatgtgtatctaaatatgaaggaactacattaatgaaataagttaatgtatgccaagatgttggaactaccttaataaattatatatgccaagatgttgcaagccacaagccttaactcttacaagtgtcgtcgcgccatctaggtgtttatcggatttaggatagatagtcgtactattaagaggtgatctctaaaatcgaatcaattatctatctacatgacactagttttgatgtggtgccatgtggatccatgtaaaatcttgtaagagtgtgaaattgatggcacgagtagttgtagccaaaactgatcttagaataccttggttcggtatatagtttaattaaggtgtttgatttgaggaattggttagtccaacatcttctcactttttatatattttttgtttgcttcctggaatgaaataatttaatgtatcattacctcattttgcacacattaatatttagtactagtatctcaggaatgtagtcatttcaccaaatataaagaatatactcatgatgcaccatttcatatagaatagtttgcttcctcaaatcaaacaaatatgttcaccgaggtttggagcagtgtcttggaaatgaaatgacaaaggagtagctcgatttgtgacttgtcagcagctattattggatttgagaatggcacgcgaggaaccgtgcttccactccaacgtcgcatccggtcggtcatgcctgcctgcttcgttctaaagtagaatttcagtgtggttgttggtgttggcgaagatttcattgcgcgcatgacacatgcatgctgagaagattggtcctttgttttttgtaaccaaggattggagcgtgtctgtttattttctttgctgtcctggtttcgtgaccttcacttctctaggcaataacatcatgctttggaagaacagtgcaagtcctacacgctgcttgaatatcttagcatatgtacagcagaaaccgtggttactcaacaagagttgttctccgctccaattcggtcgccgcatcgtgcccccagtcacgtcccaacaagagttcaacgcagttgttgatgacgatttcgttgtgacacatgcacacaagaatagtccgcgcgcgcgccattcatttcgtcacctgccactacaccgccatggtcgtccatgtcccaagcgtccgtctgacacctagtactgcccaagtgtcaagctccgaacttctctgaagctcccaacgcctccgaggaggtccgcagtttcaatcgtcgtaccatcatcacttgcgggcccaatctcaaggtaggagtatttcatttgtcactaccttgctggatcgtagtgccaacagccaagacaaataaaagcacatggctgcacctgcaccttaaactaatgcacccctaccgaatgacccgaacctgtgaaccatggagtggtcacgttccacctgcatcacagtcacagccgccgccgtgctcctcctcctcttgccgcgcttctgctcaccggccggcgacaagttaacccaaggggagtcgctgacgcccggcgagaccatcgtgtccgacggcggcgccttcgtgctgggcttcttcgccccctccaacgccacgccgggcaggcagtacgtcggcatatggtacaacaacatccccgtgcagacggtggtgtgggtcgccaaccgggacgcgccggtcaccgtcgacgagcgttccggcaataactcctcgtcgtctgcgccgccgccgccgtcgcttgcgctggccaacgacaccaccaccaccaacatcgtcttgtccgacgccgcgggccgcgtcgtttggaccacgaacgtcgtcactgccgccacgaccaccacgagctcaggtggttcgacgacggccgtgctcctcaactccggcaacctcgtcctccggtccccgaacggcaccacgctgtggcagagcttcgaccacccgacggacacgttcatcccggacatgaaggtcgggctgcgctaccggacgcacgacggcgcgcgcatcgtgtcgtggaggggccccggcgacccgtcgccggggaccttctcgtacggcatggacccgagcacgtcgctgcagatgctggtgtggaacgggacgcgcgcctactggcgcagctcggcctggacggggtacatgaccgtcagcaggtaccacgccaccaccggcacggtcatctacgtggccgtcgtcgacggcgaggaggagatatacatgaccttctacgtcaacgacggcgcgccgcccacgcggtacgtggtcaccggcgacggcaggttccagctcctgagctggaaccgcaacgcgtccgcgtggaccacgctcgagtcctggccgtcgcgctcctgcagcccctacggcagctgcggcgcctacggctactgcgacaacacgctgcccgtggccacgtgcaagtgcctcgacggcttcgagccggcgagccaggcggagtggagcggcggcgtgttctccgcaggctgccgccggagccaagcgctggcaccctgcggcgagggggatgcgttcttggcgatgcccaacatgaaggtgccggacaagttcgtgctcctggggaacatgagctccggcgacgagtgcgcggcggagtgccgccggaactgctcctgcgtggcgtacgcgtacgccaacctgcgcagcagcagcgccaagggcgacatcgcgcggtgtctggtgtggaccggtgaactcgtcgacacgcagatgatcggcgtgctctggggcatcactgctgagacgctccacctccgcgttccagcaggaatcacaggttcaattttcgtttctactccattatgcgttattcttttcttttcccgattattagacacggcacacggttttcaaaataaaaaacatttcccacccccatgtcattgtttcgaaataggaatatattttccggagggcagcgtcttcttgcaattgctcaccaaacttacccagttatttgtgtaggcacaaagacaaggtcaaaaattgtgagaattctactaccggtgttggcaagcatttttatgctttcgtgcattttacttgtttggttttgcaagacaagaggtacattgatatatttctctttttttttgtaaacatatatgttatcacaagataaatgctactcacattttaccaaaagaaaaaaaagataaatgctagtcacatctttttttttcagataagaaaagaagcaatgaaagtgagaagaagttggttcccggtagtagcgtgcgaacatcaagtgagcttgcagaacgaacccctaaccctaatgaagatctcgaattcccttccatgcaattcagtgatatcgtcgcggcgacgaataacttctcgagagcatgtatgatcgggcgtggaggttttgggaaagtttacaaggtaacatcacgttctctgccgcgtatatatccttttccaaatctgaactcacgaactgagaatggtactcaggagtcaacactcagttattgttctactattctgaaggggacattattaggtggtcgcgaggtcgctgtcaagaggctcagcaaggattctgaacaaggaatagaggaattcaagaacgaagctaccttgatctccaaactgcagcaccggaacctggtccggcttctcggttgctgcacacagggagccgagagggtgctggtgtatgagtacttggccaataaaggcctagatgcaatccttttcggtatgttacactcatcatcataactgaagatgctaaaacgtcaccactgaagcagcaaacatgattcccccgtgtggttatcgttgttcattgcagacagcgaaaggaaatcactgctggattggccaacaagattggggataatcaagggggtggctagggggctcctgtatcttcatcaagattcaagactgacagtgatacacagggacctcaaagcgagcaatgttctgttggatgcagagatgagacctaagatagcggacttcggtatggccaagatcttcggcgacaaccagcagaaggcgaacactaggcgggttgttgggacatagtaagtaacagtagcacagatggaaatattccttaaaatgttgtcttttcaaatttcaacgttgatttatgcatgtgattgttgggcttggtttctgtctgactgacgactctgaattttctgatggtgttgctagtggctacatagctcctgaataccaaaccgagggcgtcttctctgtcaagtctgacgtctatagctttggcgttttggtcctggagattgtaagtggcatcagaataagctctaccgataacatcaacggatctccgggccttgtagcatatgtaagtatatactcctaattcctaaacatatagtacaaacattagtttctgaatttgtcaggacattatgcatgaaacacttgaactgcactgcagtgatttctcttatcattatctgaatctttttcaggcatggaagctatggaacgaagggaacgcatgggacttggtggactcgtccgtcgcggagagctgtgccctcgacgaagccttgctgtgcgtccacgtggggctcctgtgcgtccaggacgacgcgaacggcaggccgctcatgtcgtccgtggtgtccatcctggagaacgggagcgtgtctctgccggcgccggaacagccggcgtacttcgcggagaggaattgtaataagtcactagaaggagacgatgtgcagacctccaggaactccatgaccatgactgtccttcagggacggtagtcaacagagcagcattgaccttttttcttcagagagaggggcgttttgtccccgtgcaatgatttttgacatgggtacgtagggtctcccaatatattggcccaacttgcacttcgacgggatgggctatgacgagcttttttctctttactttggggcgtgaatcttcatgggccataaatcttttgcgccccagcaattaggcccgttctccatcgccgtccacgccgacatgatcatcatcgctgttcgacaggtgttctgccgcatccgctgttcgacaggtgttagggtgtagcggcggcccctgctacagttgctttctggcattctcgtataagaatcggacgccttcgacatgttcaacagaatgctcaagccgttccccttgcccctccctcgctttgcgtccagcgccagcggtccaccggccgcgccgccagtttacaccacgccggccacttgtccgcgaatgccggcaggcgatagcgggttgcgtc

SEQ ID NO: 4163 - DNA, 11166 bp, Sorghum bicolor
tagattttcatcttaataccttttggaatgaaaatggaatgtggaccttgactctttgggaacattggaaccaatgtgtctttgatggcttggcgcctagcttagtgacagccaggagccttgctgcttgctgtagatgagccagctctgaattggctggggctccggggctttacctcttgatgacaaccctagtcccgatgggtagtggttagtgttttttgtggtggttgtttgtataattgtcaccttcagcatgtaatctacattcccgtatgtgtatgtggtttattcagggttctttatctgtttcccttcttctataatataatgatacgcagctcttctacatgttcgagaaaaaaattgtatgtggagatttgttagagttcatttacatctagtctgttactgtttcttccagcttgatgagactgatggatcgtcagatatccccccagcagttctccgtattcttaacttcaaagcttgcagaggttactacttaaccccccccaccccacccccctcccgtggttgcccatcatgcaagcatttctttatattttcactttgataaaacattgctttttgatgtttcttggtggcttactgtaggagcgatcatgtttggcgactccttactaccatctgagtgctgtctgattattgaagaactgaaagcaacatctctatgcttccaggtaagaagattgttgaatccttggtccttgtttatgctgttactctgtggtacggtggagataagctttactgtctcgcagtgtgctcatgggcgcccaaccactgcgcccatcttgaacgtcacagccctccacgaggagctggcgaggctccaaacgctgagtggaacgcaagcagagacctggcacggcttggggcaccatgaacccagccttgagcgtgctcagatgcgcctcgaacgagtgagaaagctacgccgttgcctgtagccgtaggacaatagcaaatggtttgaatcagataaaaggctgtatagtttgtagagaagcgagtggaatttcactgtgctgtacaattgtacatatatactagggccttgtttagttcctagaaaattttgcaaaattttcacattttccgtcacatcgaatctttagacgcatgcatggagtattaaatatagatgaaaataaaaactaattgtacagtttggtcgaaattgacgagacgaatcttttgagtctagttagcccatgattggacaatatttgtcaaatacaaacgaaaatactatagtgttgatttttcaaaattttttggaactaaacaaggcctggtattcattcatgacgaagagatacaacggcgcccttcacctgacaggcgagtggggtttgccacggcatgttgtgaagtttgtacattctggtctgttagttgttacaacaattcatgccatggaaatctatgtaaaactccattcaaccgtgtaccaatgtgattagttaaagttgagatgggtgtgatagtgaactcagcgtgcttgtttcctctagccaacacctttacgccaactgccaagggctgcccgcttcaaatgatggttcttatctatttttcttctttcattctagattataaaaaaggtattaaaaaaatactccctccggtgaaaaatacttaccacgctgtaatttggtggaatgggaatgaggatgaggcgaccagattgtttggtttgtttcttgtaagaaccgaaatgaggatgaaattatcagaccagatcgcttccttctatgatctcaatttgctagtgggctaaatcctattgggccgaaggacgaaggtacattggcccaagagcacaaacccatctcgcgacacgatatcaggtggcgcgcgacgacatttcgagtgacttctgcttcgcatttccccccaattcctcccgcccaaagccccaaaccaccaccacccaaatccgtctctgccacccgccgatgggcggcgccgccatggccgatgacgacgacttcgcctcgccgccgccagccccgcgcgcgcgggcggaaggaggaggcggaggcgtgtaccaggtgggcggcgttccggtggagttcccctacaagccctacgggacgcagctggcgttcatggggcgggtcatcgccacgctcgaccgtgcgcggcggcagggacgctcccacgcgctcctcgaatcgcccacaggcaccggcaagtcgctctccctcctctgctccgcgctcgcctggcagcggcactacccgctccgcacccctcccgcccccgcccccgccccctcccccgatccattcctccacggcggaggattcgtccccgatgatacccagccgcaggcgacgccaggtgcaccctgctctctctcttttctccctcttctatcgatggggggttcttggaccaacaactgctctttcttggtaatctgtggcttgtcgtttgctcattttgccttttgggggttcttgattgttcagtcgttccggagaaggctgccaagaagaagaacgccccgacaatatattatgcgacgtaggatctctgtcttttgactggaattgatgaggggattggatgctcttgattgatttattcgttgcttgtgtttctgaaggaggacgcacgcgcagataagccaggttgtccgggagtaccgcaagacgtcgtaccgagtgcgcatggccatcttggtaacgcctatttccatatgaatttattttatttcttgccttattctctggtaagaaagagaactcatcatccaactagagtagcagaggcaaataaaattaagactactgcttagaatccgtactctggcaatgcaggcctcaaggaagcactactgtgtcaatatgtttgcttgcgcgagcgacaacattgatgagcaatggtactgtacacaattgattagctcttacaaagctcttgcattgtcattactaacctaacttctaattgaacttccctcatcagcaagtcactgctagacaagatggttcaaggttgcccagaattcaagtgaggtttcctatcttttcaacgccagaacatataattagccaggagagcatctttttctcttggaattttaatgcaatcagttaaaacttgcaggaatgctcagaaactaagtcggcatccatcccttcagattggtggctgctatgaagttcacgatattgaggatcttgtcagagttggacagaaagcaaagggtacgtagatatcttttagttgcacttgtttcctcctgaggatagtctggctctgatctggtcactcctgataactactccctccgtcccataaaaagagtcgctatgggacttgtggtggtcaaactttcttaaaactaggtttatggaaaatattagcaacatttgtatctctaaataagtttattatgaaaatatattatacgatctatctaatgatactaattatgtgtcataaatgttaatattttcttatatatatttggtcaaagttaaaaatgtttaacttctcgggaagcaagaatgacactttttatgggacggagggagtattcaattatctcttttcctgttattggcaggatgcccatattttgctgcacagcacatggcagaagcagcacaattggttttctgcccatataactacctgattagtccggttgtcaggagagcaatggacattgatatcagcagttccatcattattcttgatgaggcacagtaaggcttcacttctatgactctttccagcccttttgatttccttgtacttcaatagtctcatcaatcaagctaaaatagtttttatgtgaccctcattctatccatagcaattatagtcttgtgacatggtggagtctgaattccaattatttttcttcatattgcgtcctcttttcttagcaacatagaagacatagcacgtgatgctggcagcattgacatcgatgaagaatcacttcactgtaagtcaaattccatgattgttcagttaaattcatgttctgttaaactttaaaacacatgctaaagctaattcactatggcaaagtgttgcagggagaacttcaaaacttggccactgatgaggctgttgcaatgatataccagcccttgcacgatattattcaggtacttctacaaaaagagaagagagttaattgccctgttcttttccagaaaaaggaaggatagtgttagtattaatattactcttagagctaagctttaagtacttctgcagggtcttattggttggattgctgagcgggagggcaatcttcataatcatgagttcggacatcccgcttcatagtatgtagtctgcgactcttttagtttcttatatgatttattgattaccattttaacttctcatcttaaaagagatgtgactgccacttcatcttccatatgtgtagatggttaaacataatgtaatgaaaaaactatacagtttcatactgcaatctagtcaactacatttcgagaaattgatccattgcttgatcatgcaacataagttgacaaattgacttgtggttactggttagcgatggccattagatcgactatctttagcctactgttatcaaatgttgagccatttgttgcttagcaacataagctgatgctagcaacttatccctattcatgtctaattgttaatgtactatctaaatgaaataaaattatttccttgatattaaaaaaaaacagaattttgggtttgcgaaatatatccatgaactttcgactgcgtaacccattacaatcactaaatgtttacgatgcagcactgatgtttttcataccatcagtggacttaaccttttgtaatcatcagttggactggtgaaaaggcaatgaatgaacttcagcgggctggtatttctccaatgtatttcccggtattgcaagaatgtgcaacaaaggtgctttttatatcacagtgcagttgttgcatatattgatcttttatatggctgtgaaacattcagattttcaacttccttttgctttaggcgattaaagctgcttcagatactgaatcagatggatcacacttgagtggtggtcgtgctatgacattagagagtaagcggtagagtggtgattactttatttaattcaatcttcaatacacttaataacccaatgatgttatacaatcttttgcaggtctattctcttcattgagttacttttttggtcagaaagggcgtaattcatgtgattatcagcttgctttgcagcgttttgttaaaaaggaaggtagcaagcttgtttatcctttagaaaaaaaacatagttcctgttataagtttttcctgttaacatggaagtagagtaatagaacatttgtgaatatattcaatcctctagatcttacagcttacatcctgcaattgagccgttagtggtactgttcttgaagtcaagaacttggctgctgatttaatgtgataattgtatatatgcttggatatccaacaagctctattccatttttaaattcaaggagcaatttgtgtaatttcatcatatgaaccatttacaggcaatgatgaaatttcttcaagatgcacaatgagtttgtggtgtctcaatcctgctgttgtttttcaagaaattgcagatcgaacactttcagtaattctgacttctgggtaagtctgcatagtccttttctcgcttatcaataagctggtaaaatggccctgttaagcagcagatatccaattagatggtcaatgtgaaatttagaaggagaaaaaacatggaagaggaactagacatgctgccggcagctagtttgaatatgtcaattctttgaactgcacattggtttggaactgtataactgaacatttcatttcttttgttcttgggagaggggaccaaataggcagtgactgtcagtaatggccctaagtaaggctttttttggaccaaggtagaagttgggctactgatgtagatggcttgcatgtcaagatagaagtctagtagggtctaggattataagatatatagatatagatatagatacaaaaatatgtatatatatggactagccctagtgtaaaatgttcagtacctggtaggcacatggtccaactgagataggtactaaaaggtctttatgttatacagattttgatgttcttataaattgcgttgttaagtctctccagtgtcagataatttacagctctgaaagactgaaactacatgtatctgcagaacactttcaccaatgggttcctttacatctgaacttggtgtccagtttgaggcttgcatggaagctcctcatgtaattaatgctgattctcaggtacgtatgttgctagttgtcttctgtatcatggtcataactgcatggtgatggatttgtgttattgggcattgagtagcggaatcaagataatactgtgtttcttgattctgaaattcaaaatatttatttggtgacagagtaattggtcaaaaccggtttttttttttttttggcaaatggacactagttcacttttgtacaatgcaaaatctgtgcataaagtgtttgaactcaccattggaagtgaggattgtttatctcacctaaagggaaagaagaggtgtaatttttatctgcaagctttatctgatggcatattttggcgtgccaatgtaccaatatgtaattacatgaagtgctttagtaaaattacattattgagataatatgcatggcttgaacttgatatgcactactctatatatcacaatttgaactcgaaaattctgtttagggctggtttattagccttgctgtccttatggtaatttgtagcctctctagagacttgtgaatgactctcattttcatcagtttaaaggttgtttaatttgtccttcatactgccagcatagaagataattttcctaatgactctgacccttagtttgtttaggacctggatatggagttatggaccttttgtggttagaagaaagattagcaaatataacttatgccaacaagtagctattacttgcattttttaaagtctatcttggctttgcaggtttttgcagctgtgctatcatctggtccaacaaggcaaatattgaatgctagctataaaactgcggacaatttatctttccaggtaacttttcattgaattatatatatgtcaggaaccctaatttaaaaatattattctatttttacatagtgttttaattttttccccgtttttacataggatgaacttggagcttcactagaggaaatatgcagaattgtgcctggtggtgctctagtgttttttcctagctacaagttgttggacaaattgcaagtgcgctggtctcagacaggtcaatgggcacggcttaatgctcaaaaacatgtgtttgttggtaagatcttttgaagcatttcaaaatgccatttcactaattatagaagacggtattatgtcatgttcaattttctgtgttctttactcaaaacttatttgcttcagagcctaagggaagtagtgaggaactcgatcctgttttaaaagggtactatgatgcaatccttggtaaggctcctgtcaagaaaggcagaggtggttcaaaacaaatagtgaagaatcgagtgaccaaaaaatcgtcacaggaatcagtgaaagcaggagctactcttcttgcagtttgccgtgggaaggtgctattttattacgaaatgtttatattaatttatgtacatgtttaaactttaaaccctactttaaatttcttatgcataatgttgtgcgtatgccagctaccattagcttatgttttgctggctcctgattttatttctaggtatctgaagggattgacttcgctgatgacaatgctagagttgtggtatcctttgtttccctttttgatattaaattgtatgctctagaaagttcagtattaaacacttgcccctactggcatgtagcatgattggtatacctgttctgatgtaatacaataaatgattttgatattcatctgtttccttaaccagacataaggttattgttggaattccttttccaaatatgtaagtttgtttcctttctttgtttctgttttagtaaataaatcaaatgtgtttttctttgtttagatactaacattgattcaacatggatcagaaatgatgttcaagtaaagctgaaaaagagatataatgattcatacaaatcatcaaagcatttgttaagtgggagtgaatggtactgtcatcaggcatttcgtgctttaaatcaagctgcaggtattcagctattgacttacctgtcaggcatcgcctgtggctaagctattggcattggctaactgttgtccttgtcttctgtaggtcgttgcattcgtcataaatctgattatggaggcataattctgattggtatattattcagttatccactccctaccatttgcatgtctagagagaaaagttgattcgtaaaattttgttattttattgatataactgtttagaagtgaaatggcttagtgctcctctttttagaaatagagtgtgtggttttcatatttaattcccatgtattatggtgtacagatgagcgatatcaggaaggcagaaatgttgcctacatttccaaatggcttaggaatgcaatcaagaagtacgatagcttccaggagacaatggctgagttgcagaagttctttcagaacgctgaggtattgctctttttacacatttgattttctaaatgtcgatggtcttgtctaaaatgcatggtactgcttcaggaaaaaataaaaatcaaagattgtggcatcttccccaaggttaagttggatagcgaagcacctcaatctctcagtgatgataaaagaaagttgtcgtggccagaattgagttcctcaaaccactcagtatcacaatgtaatcagaaggtaaagactgaatgtcttagtcagagagttccaaacactgatggtgtagtggtagaccaaaaagttatgggtatgtgtacatcgccagaagtatcgaaaatctctttgagatcttctgttttagtaaagaaagaaaactcttcatcacctgaaagtcttccaatgtcatatccattgcctccctgcaaaattcaatctgattttgaaggtgtagccaatactggagcaaattatgaagtcaaaacagaagttataaatttggaggataatgattttaaacctcggtaattttaacatttttcaggcattctttttcctactattgtatcatcatttgtttttatttaaataggtgtcttcacatgcacaggtatgtagaggtcactatcttaaatccactagaagacaggtcacggcaacctactcttgttgaggaaacttctgcagcgactccagtggctagtcccagcaactattctgaggtaaacacctcagtacggatcaacaatggagatcagattgtaaacacacccatttctctattttcaacaaatagaaatatttcttctctgtccacaccggcagctactcctgaaagaaccaccgacaaagactgtcatgagtctttgatcaacagaagtgtaaattcccactgcgagaaaaagagaaggttgagctccccaatgagctgttgtacttacacaatacgttctagttctccaggcaaatcattctgccacactggttctgctgtgcctggggatgtgaatagaaatgctgaattgtgttgtaaaaatataggattgtccagttgtgaaaatgtcaagcttgaaagaaattacaagccagaagaggtttcagcaaagaagatgcagaagaaacgtataagttgcattagatgcaaaacagctcttgggttagaagaagatgggtttcttgttacttgtacacaatcttcttcgtcgaaattatacttggcatatcttttgagacatgggctgtcagctgctggcttcccggaggatgatttttcggcatcaacaccagcagaggtacaagtagtggagtgcgaagcttcttcactcaaccaaaatatatttggcaaattcggaaaccagggccctgtttggtctgctaaggatggatgtgtgtacagtgcaatgacttgtactttctgctcttctgaaaacacatgtgccatggtccttggcgtgcaagttcttgcaactgataagctcaatcagcaattggtggaaaaggtagtttgcttatctggatgcatatttgtagtttattactgctactgttaccttagcttgattgctgtctcttcaaatgaaggtgctcttgttcagtgatcgtttggatgtccagtctgagccatcaaatggacaggtatgggtgtaaatatattgtgggactaatatgatgggatacatttcgaaaactagcaaaacataatgggtctatctactttcatatgaagatttcaagaactcggagagatgctagtaactccatctccccacaacccgtgatgatcgaccttgagtcttttgcatataaaccattaaagatggaccctgtggcgctgaactcaagaaggtctaaggtcagttgcctgctgccactgctgttatcttttgcagttctgcttgtgttcactttcccagaatttcaagtgaggtttgcatgatcctcctcttgcatcagacttctcagagtataattgacaatactccaatttttctgcccttggattttctgtggagcagcttaggttaccggcctcgaacaaatccacaactggtacataatttgatggagagtttgagataatggtgatctttgctgtgaagcattgggaagaacttttttttgaggaaacgcattgggaagaacttcgttctgtgagatatggcgtccggggaggagatgcagatgtcacgtcaccatggagattcatagttccaaacatccacatgtattagacaagttccgggagctgaagtggggcgtaaaacgcatggcctgggcctggcagtaggaaactaggatgctgatgtatatatccatttacagttcttgatgcatcccattgtctattatatctatgaacagtttttgcgttctgaaatttcgcatccgtgactgagcacccaaactgctaatcacgccgaggcaa

SEQ ID NO: 4164 - DNA, 7355 bp, Sorghum bicolor
agcactcgcatcactttctgatatctctgtggttgaagtcaggacgaaagctcgtgggcgaccaaattcatattgcaagataataaaggcatgatcgtaacactgagcttctttaatcatgatttatccattgttagtgcatctgagttcttgtgacaattgcacagggatctaaatgcttacatctggggatagatgacaagagggaagttgtcggcaccactggtaactgttttattttctccttgaaacagagtagtggcagtatattcgtaatagtacatagtgtaagatgatgacagcctattcaagaccccactcgtggctgttagttatatttttctgatgttatgggatctagttatcaggcctttcatctttgcagttgttgttcaggagcttttttacaaccaaccagtacggaggaaacaaatacaatctaagtatgtgataactgttactactacctgtcaatatattatttgattgatatttatctgtatcatatttctgtagcgagaaaagagaactacatcatgtgaagaagtgtgtcctgcaaattgcacttattcatccacagatttcactgagactccttgatattgacaggttatctattgtgctaagcttaaagcattaatttttacatttattacaattttacttgtacagcacatgttgacatgcctgttttattaatgcagtgaagatgagttgctatacacagctttttcttcatcccctttgcctctcatatcaaaattttttggggatgatgtctccagatgtctccatgagataactgcctccgaccagggttgggttctttcaggtcacatatctggacctgcagatgtgttttgtacgaaggtaaaatcactgtttaagctatgacctattgaagctaaagtttgatgatgtgttttcagtaagttcaattctccttttcaggatgtccagtacttatgtatcctcctcaccaatcctccgttatatacttctatttgttattttcaaattcttggagacgtccttgacttttcaaagatatcaactcaaggttcgtgaataggaacccgattcataatatgctcaataatctggcatctagttttcaatcttctattataagcgagaatgaagaagatgttcagagcaggaagaggcagaagactgatatctaccctgcttttatactaaacttttactgccctagatccagctatgatctacattttgagcctacaaaaaccattgtggaattcaaggtgattcactaaagctctatgcttttgagtttccttgtttatagtaagcttcatttgtatctaatgtttggtttagccacctcttgtacaacaccctgggcttctcctaaatattaataggtggttctccgttctcctgccagttactatttttctgttgttaaaaaatgtagctaacgttcctgtatgagtaggactgtgtcttaggcaaaatgtctttgtgcccatttggaaacatggcattatgttgtttcatctctaaatagtttactctctgtagctggctaattaatctcccttgttttccccatttctaggattggcgaactgtcttggttttctgtgaacaaactgtcacaaactactggaagaagcatcaactgcaatcaccaaaaggttagacaatgtgacctcaatgttccttgcttatgtctttgtgaaatggacaattattggtgtgaatgcattgtaacctttttattagcagatggagatggaggttgtgctgatggtacccatgtgcctcagaaaaatcatggttggtgacttgttgaacagacttcagttttgtatctttttatctgttaagcttctgagcttttctcatacggtgctgttgcagtgaaattggataagggcctcctgaaagatcataatgtgcagaacgagaaagagtacgctgacttcgaaaacactcagcataggaatgcagtcagagacaccaacagtgatatgagttccacaagagcaacaagaaattcaggctgcttttcttttgttatggaaccatccattcaaaatgtctgtttctctggaaggatcactaattcgttctgcctgaatgacaatgttgccagtattgattacaagttagggtataagcaaatgcattctcctggaaatggcagttgtatgtggttagatgatggctcttcccagttagatgatgacatttcaagtgttaacccaacttgttggaaaaggcaaaggacagaaggtatattccatgagtatgcatattctggtaatcttggaatgctggaagatgtgccaactgaagttttttttgctcacaaacaagagtctgagctgattggtccagaagttgaaataccagaatcttgcttcagggttctcaataggccaaatggaacgacacctgattttgtgcaaaataaaaccagcttaaaggcacaaacctcaggctgggatggattatatgacaagtttgataaattaaatggggatcgcttattcaatgaaactacagaaacaatcactgatatttcttacccaaagatgttacagttcagtaatggattttatcatgatgatggtagcacttccaggggctcctgtagagttttgagaaagttcagcgccagtaagaagttggggactgcagctggatgtgttgaagggttagaggctgatgctaaccagatgaatttccctgatattcatgctctgtggaacagtgacttgatagataggtcctccatcaaggatactttaaatcattttcctcatccatccttgttggctgatacaccttgcagtcatccaaggaccttgcacacactttacaggaaatcagataaatgctttcgttcttggaactgtgataatgttgacagcaatgttagatttgatgtggacagatttagcaatgattcatctacaatatttgaaggaattaaacatttcaataactttgacaatgaaatacatccgcttaattacttcaataataagtgtggttcaaccgaccagcttggttctgaagaagacctgataacttggaaatcaaaatttgacatgaggttgtcagtcaatatttctcctgagagaagtgataatggtcgcaatttgaatgttccttcttcgaatatggcaaatggcagcctgcttactcaaaatctgctgaatcaacacaactctggactaaatcagagacccaggacttccaagggtagatttaggagtcaatctgctccaccattttatagagggaaactgaaattctctagattaaatgtgccactgagcaaaccaagcacagatagcgataaagatatctgcatcaataaccccgaaggtacatccaaactttggccctttttgaattgcatttttatgggaactaacattacacacttctaatcaaatgcagaaaatccacctgcacctgcacctgcacctgtggatatctcatgtatgagttcaacacagcctgttcctgagactgatagcagtggatttctggacctaaatttcaggtatactcatcttgcctagtttcctggatatacctttagtacttgtaaatatctttctatgcccgtcgttatacactctcatttggaacagctcgaacatatttgtgaaaatgtctgaagttgcatgttctgacgggattgaggactccactgctcaaataactaaatggcgagatgaccctgtccagcatacagttaagcatgcatttgagtttgggatattaacatagagagttccatacgtccttgctactatgcatcttgctatcttctgagtgctttacctccctttgtaggctttgaactcgtcaatgcatggtccttttggatgctacgatgatatacttagcatttcttctgggaccttacatctctcttgtagttcgctaattcctgaatgtgttgacaagaactgctttgaggaggcaagggttttgttgcagctggacaagaaatttattcctgtcatatctggggaaactatcctccttgtcgatcaggttcaaattttctcatttagcaaggggccaggttcataattgataccgtggttttttagggctttgacaacattgttacagattctagcatattatctattcctgttatttttgttggaataatcatgttgtggaaatactatttagtgcctgctgcatttgatcaggtaaatcatgggcaaaatgctcatgatgtgtacctgctgcttaaatttttattcaggaaaccttttggtcacctttcttgttactgctacagttttaactatttttagggaaatacttgtccttttaatattgttaagtgcacaatagtttctaaatatgaaatgctgatttaatggttttattttcaaaaagatttagtaagttatgtccttttttactgtcatgtacagcatgcagctgatgaaaggatacgtttagaggacctccgtagcaaggttgttaatacattgaccaggaacaactattcaacattgttttatgcttttcatactcgtacactgatgcgatctgcaggttttatcagaagaaggacatggagttagttacttggactctgaggaagaattggtatgtgatatagcattcatgaacttgtttcaatcctaatatgcgacattcaatattttactcactccagttttctttcagtctctccctgagactgggtttcaactgttccagaagtatgctgagcagattcagaaatgggggtggatcatcagcagcgggagcaattcgtctgaatcattcaaaaagtaggtgcttgactaacataacatgtgtttttttggggacttcttttctttctttgggggctttattgatgaggttttgaatgtcttgtgattgtctttttttttctctctgtgatgacaaacagtgtcctttattaaggtactccaaatccttttttttataaaaaaaatctaagacttgctgttcttttaggttttgctagtcagttaatgttaacagtacatttaggtcattgttatctgagaatggtttgttcacatgcctgaagattttcttgaatgaagtgttaacattgtcttgttagcaaaaggaatttagcttagctcaattggtgaaaggtgtggttgtacactggttggagtcttctctagtctctaccttaaacttaggtttctatcttcccatagaacacaaaaaactacctatttcctccttttttgtttctccttttttcattattatggatggcttcaccattctctgactattctttaagtgcaaaagccattcacctcatctatatagatcaaatatacgaccatcatttgatcatttactttttatgttttaggaacatgaacgttctgaagagacaagtccgtcttgttactcttgttgctgtaaggaacaccctttcttctgtctgtaccattcaacatgtttgtgttttgcttaatctcctggaaatggtggcttttctgtctcttatcagtttatgtacatggtttcccctaatctgctggtatttattatctgtttacgttttatagtaccaaataggctatcaaacccactgtaacttatttagtattcataaattgtgcatagactactggcaagaacgagttgaaaaggtgaacccagacctgtcatatgccatgtatctatgtacactaaatatcttctatgctacacaggttccatgtattttgggtgtcaaattgactgggaaagatctcatggagtttatttggcaggtaactgccaccatcttatgatgtacaacttatatttttttactaaaacagtctcattcacttgcacaaaaatttatacgagtgaatgaccctagattttcatcttaataccttttggaatgaaaatggaatgtggaccttgactctttgggaacattggaaccaatgtgtctttgatggcttggcgcctagcttagtgacagccaggagccttgctgcttgctgtagatgagccagctctgaattggctggggctccggggctttacctcttgatgacaaccctagtcccgatgggtagtggttagtgttttttgtggtggttgtttgtataattgtcaccttcagcatgtaatctacattcccgtatgtgtatgtggtttattcagggttctttatctgtttcccttcttctataatataatgatacgcagctcttctacatgttcgagaaaaaaattgtatgtggagatttgttagagttcatttacatctagtctgttactgtttcttccagcttgatgagactgatggatcgtcagatatccccccagcagttctccgtattcttaacttcaaagcttgcagaggttactacttaaccccccccaccccacccccctcccgtggttgcccatcatgcaagcatttctttatattttcactttgataaaacattgctttttgatgtttcttggtggcttactgtaggagcgatcatgtttggcgactccttactaccatctgagtgctgtctgattattgaagaactgaaagcaacatctctatgcttccaggtaagaagattgttgaatccttggtccttgtttatgctgttactctgtggtacggtggagataagctttactgtctcgcagtgtgctcatgggcgcccaaccactgcgcccatcttgaacgtcacagccctccacgaggagctggcgaggctccaaacgctgagtggaacgcaagcagagacctggcacggcttggggcaccatgaacccagccttgagcgtgctcagatgcgcctcgaacgagtgagaaagctacgccgttgcctgtagccgtaggacaatagcaaatggtttgaatcagataaaaggctgtatagtttgtagagaagcgagtggaatttcactgtgctgtacaattgtacatatatactagggccttgtttagttcctagaaaattttgcaaaattttcacattttccgtcacatcgaatctttagacgcatgcatggagtattaaatatagatgaaaataaaaactaattgtacagtttggtcgaaattgacgagacgaatcttttgagtctagttagcccatgattggacaatatttgtcaaatacaaacgaaaatactatagtgttgatttttcaaaattttttggaactaaacaaggcctggtattcattcatgacgaagagatacaacggcgcccttcacctgacaggcgagtggggtttgccacggcatgttgtgaagtttgtacattctggtctgttagttgttacaacaattcatgccatggaaatctatgtaaaactccattcaaccgt

SEQ ID NO: 4165 - DNA, 6746 bp, Sorghum bicolor
ctgccacaactcccaagtcccaacttatgttgaaggacagaccaagaagaaagctatatgacatcattactgcaaccctcaagcaagtggcaattgcatgatattggctattgcaatgcagtaccaagcagaaaattcatgcctctatggacaattgatgcaggcttattgtaactgataatcatatatgagccactataataatcgcccaatcacaagtaatatattgactcaagaataacaatcgacagacttacttgattcaaagcattctgtggagtctcatactctgctgccacaaaaacaaacacctacagtcatgcagcgaaagtaaagttaagcagacagaagcaagaaccttctaaagtttcgcttgaacagcactaatagatcaggtgcattagaaattcagttgcacagatgtattataatacactgaaattttctgtggcaaatttccattatatttcttataatagatcattctgcaacaaatgagaacactgtaatacagttaaccaaaactcaggctcaaattgtcattcaaagacccagacagcaacgagagagtacttcatgtgctcaaggattcctcttcagttacttttctaaaaccatactttctagtgcagaaaaacttagtaatgatgtggaaactggaacatgaggggaaagggtatcaagtaccagaaatagaaattacctgttttgtgttccacgtgaaaagagatgaaaggtctgccgaaatgttcagcgtcatgctaacctgaacgaacaaaagaaattaatcgttacaaattcgaggcacatatctgacacaactagtctgatgctaggtttgactaatttgcaaacaaaaaaaggatacggatatgagttacctcgtcgttgccgttggcctccttctggaaccagtttatattcaagatctgtgtaacccaaacgatggggatcccattagcatgacacatgaagattgtacaagcagatcgagccgcccacgctcgaactcacaaattaagataggtacgccggcggagatcggacacaacgcagccaggcaggctcgacgggattgagagagacggggtgggggcaggggagagggatgcggtaccttgacggaggcggtgggtgtcggggtgttgaagttgtcggagaaggaggcggcgaagcacatcgcggccagtatggtgaccccgaacgttgccaccgcgttggcgcggtgcccaaaggagtgcatcctgtcgcggctccgctccctcccttaccgcgccgcagcagccgagatcgccgggcctgcctctgccgctgccgctccttctccttcctcctgtcgcggcggcgccggcgacttcactgcagtttccttccctctgtcttcgtttcctcgggaagtgcttacggaagagagagaagttggcccgttcagatcccccttgacgggctgggacccgcccgtcggtgagagccgcgagtctgacatggcacgcgctgattggtcgacgcacgtcacggaggaggggctcagccagtcaagagtcagggtgcacgtgggccacaaatggacctattccggcccattcgtacgagtcgacccaggaagcttacaaaatctcccatttggccatgggaggcccggcctggcccggcagtgaaagagagtgaacgcgacgcagccgaggcgggaaaccctaacctaatcctcgggtggcggcggcggtttagcgcgcgtttaacttttaatataatcaggtcaggccatgagcccaggacgctgacggctgacgcagggcggccccgtttgggcaatgtcacaatcggcagcccggcgccaaccaccgtccaccgttgttgcttccacaccacagccacacgcaccgccaacacccagcgcatcggccggctggcggcgcccgcgacttggctgtcaccacacgcgcccgccgacgccgaccaggtcccgtatacccgcagcggcgtcgccgttcccggaaaccaaccgcacacgctaatcaaaaaaaagattagtggagcactgcccgcctgacccttcctttctcgttctttagcacctgctccacgagagcacgccagcggaaagaaaaggattagtagaccagaagcttaaggctagctacagaaagactgctgccttgctgttcatttcccttgcttgttgagccgttaagcgtagtacgtgcagtttgttcgtttattccattccacgcatcccaacaattcgtcaatccccagccgcacgcacgagagagggagattccctgctccgagcgtcttcgctgccttgttggtttccgtcctgtccttcgcttgctttgacttggggtagttgggttttctttctccccctccccttcctccaggcttgctggggatttggttgcttcctgtcgggttttgagaggagcggcgctcttgaattgttgctttcagttggtccgtttggcaaggtttgacaggagaaaggtgagatttctgtcgaattccaccttggttccgtcgaatttgggagtttcttgaggattcgaggcggcgtttggtgattgcgagaagagggtaaaggagtaaccttttggttgtaggtttgttgccggagatgggcaagccgtcgctgaagaagaagagggcctccggcggcggcggcaagtccggggaccatgggggcaagtcggcgtcgctggagcggtccggctccaaggtcctcgacggcgacgagaccctctttacggacatggcgcaggagcacaaggaggagggcaacaagctcttccagcgccgggactacgaccgcgcgctgctcaactacgacaaggccatcaagctgctgccccgggcgcaccccgatgtcgcctacctccacagcaacatcgccgcctgctacatgcagatgagcccgcccgactactaccgcgccatcaacgagtgcaacgtcgcgctcgagacgtcgcccaagtacaccaaggcgctgctcaagcgggcgcgctgcttcgaggcgctgggcaggctcgacctcgcctgcagggacgtcaacaaggtgctcgttctggagcccaacaacctcactgcgctggatgtggccgacagggtgaagaaatccatggaggagaaggggattgtgttggacgacaaggagatcatgcccacgccggaggaggtagtggccgctgcgcccaagcagaagccgcgcaagaaaaggggaggacggaagtttgctgccaaggctgcggctgctgctgtggaggaggtcgatgaacagaagattgcggaagctgtcaaagaggaggaagtggaggagcagccaaggcaggtgaaacttgtgtttggggaggacataaggtgggctcaggtgccggcgagctgcagcatggcacagctgcgcgaggccgtccggagcaagtttcctgggctcaaggctgttcttgtcaagtacaaggacaaggagggtgatcttgtgacaatcaccaaccaggatgagctgaaatgggctgaggacttggctgaggctgggagctcacttcggctgtatgttaccgaggccaatccagagcatgaaccttatgttgatgacaccaatagtgggccattggagagaaatgtaaacagtgcttcggataatgggagtatcagaagcaatcggcaggatgaggacaggagcacggtgacttgtattgatgattggattgtgcaattcgctcggcttttcaagaaccatgttgggattagctctgatgagtacctggacctccatgaggttagtatgaagctctacactgaggcaattgaggacactattactactgaagaagcccaggaggtgtttaatcttgctgagggaaacttccaggagatggcagcacttgcatttttccactggggtaatgttcacatgtcccgagccaggaagaggttgctgctatcaggggactccccaagagaattggtgcttgagcaggtgaaggaagcatatgaatgggcaagggacgaatacaataaggctggaaagagatatgaagatgccgtgaaggccaaaccagacttttttgaaggtttccttgcacttgcacatcagcagtttgaacaagcaaaactgtcatggtactatgcaattggtagtaacgcagatttggacagctgttcttccgaaatcctggagctcttcaataaagccgaggataacattgagaagggtatagagatgtgggagttaatggaagaacagcgtctgaagaatcgatctaaacctagccaggagaatgttgtgctagagaagatgggcttggaggagtatatcaaggatgtgtccactgatgacgcggctgaacaggcttccaatttgaggtctcagataaacattttatggggtatgctcctctatgagcgttcagttgtggaatttaaattaggtcttccaatgtgggaggattgtctgatggcagctattgaaaagtttaaacttgggggagcttctgctacagatattgctgtgctggtgaaaaaccactgcgccaatgaaactgcccaagatggtaagagaaatttactgctttatttttgtctacttttggcgtgagaactacattgttgattttgctggagaatactagaactataaagggattattatgcaaagtgttaattgaattgtgctgactaccatttattttgtgaatcctttatagtagtcacactgagcttgttagattaattattggaccttgacatttgggagttcacctattatcattgtttaaaatattattatgtagcacattcattaactgttaaatcacgttcagcatattttctcttaaaaacattgtgcaaatgatgattgcatagcacaatcattgacgttagtggctgaggattgtatgctatgctgaatgtttccaaatcccacccttattattcaaagtcatccttgaatgttcaaaaacagtggagaaagtattaagtattaactatgattgtccaatttctttgtaggtttgggcttcaagattgatgaaattgttcaagcctggaatgaaatgtatgacattaaacggtggctgcgtggtgttccatcctttcgtcttgagccattatttaggcgaagggttccacaattgcatactgcacttgaacatatatagtactcatgaagctgctctatagcgtattgaatttcaaggctttttttatcagtgccacttttctctttttggtgagtacaataactgcatgtttatcttgtaatagattagttttattcatatgaggatgcagtgtgcattatgatattcattgatttttttcctttatctgcatccttgcactttctaaggtcaaatgtttgtgactagatcttttccatgccatgtggtttgggaagcggttgatgtactttgctttgatttgaagatagctgtagaagtgatttgattgtggtgcaacaagtttgttcttttttttccaagaagaaattttcctaacatattcaagcactaggattccattggtgctgtttccacttttatcatcaatacatgttagtacttactgattaaattcacatcccttggtatatgaacttcattgctttctgattgtgccttcaaaggggaaacactgtatcatcgatctggtcactgctatgtaaaataattttataggcgactaccagttttacagtttcgatgatctgttttagggacttcaacctaggtagtaggcaaatttttccactggtgtgaactctgaatataattttttttaaggtggacttaaagtaaacttaagcatgtttgcttgaagcagctcagaacatcttaaaaggttgtggatttgtggagtccaacaccagtttggtgttcctttgtacagttttactaccagactacaattcattgtttgtgccatgagcccatgatctttgtaattcaagtcagatgatatgtgtctgcccttactgaattttctaattgatttcactctgcaggtcaattgctgcatgggatacacatggatttgttatgttgcattttttttatacatgaaagagtctgcttcctggttgtgaagcaattcatacacaagcctattcttttcacaaggctggtagccctctgcgatttgcattcgctagttcttgttttggtcaggtttgctatgtaacgcacaggaagctgtgcttttgttattgaattagtgattcatattcatatgattgtgacatggtagtccatcgttggaggatgggattggtcgtatcctcctcttgctttgtggtattttatctgttctgcaacacaatgtgcaaacccagttaggcttgtactacagtcacatttagaattcgttgtcgtttaagcttgaaagaatgaaaagaaaagaaaaagaaaaagaaaaggcatagtatgttcatgttgagctgcttttgcctttatgctccatcaaggatttcatgagaatagtgtatttgagagatatatatgtatatacagctaccgtggtctgggtgaggtttaattcgatgtatgcagtttattatcccttgggttgttggctgtttgttgcagcagagtttggtgagtttgggttcacatgtcataccatgaaggagagggcattgcataaatacttggtagcatgagaaggcactcaaagtcacagaacactgataaacgtccacatccgcagcgcacagatgagatgcatcccgtgctctgtgctcaccaagcttg

SEQ ID NO: 4166 - DNA, 5032 bp, Sorghum bicolor
tctgtagcaagatcttgagttggcacttcatactgatcgtacaccttgcattcccgttgtccttattgtctctctctctctcacacacacacacacaaaaaaacctcaggtgctggccgttaagaagtttgatccattgagcttctcaggaagcagtgacttcatggatcttgtgaacagcatttccaagctgcgccatccaaacatctctgagcttgttggttactgctcagagcctgggcactacatgctggtctatgactacaacatgaatggatccctgtatgacttcctgcacttgtccgacgactacagcaagccgctgacctgggacacccgcgtaaggattgctgttggtacagcttgtgctctggagtaagttgacaactagtaatatttatttaggcctagataaaaaaagtaatacatctttaggcacagagtgggtatgatgttcgtagttcaaaagaaaggggtattgacatttcttgttgattcaggtacctacatgacgtgtgttcacctccaatgatccacaagaacattaaggcatcgaacgtcttgcttgatgctgacctcaaccctcgcctcactgactgcggccttgcatacttctatgaggtttgcagaatgtctcttaaagaatttgttgaacaaagcatgagtgtaaaaaattgtgataaccaactctctgcaggatacgagtcagagcctgggaccagggtacgaccctccagagtgcacaagctcatcaggttacgttatgaagagcgatgtctactgctttggtgttgtcatgcttcagctattgaccggtcagaagccctatgacaggtaattaattcaagaaaaaagaagatagcatccttccactatggactgcacattttgtgattccagaacaggcaaagcttgcctgtggaagtggaacattgtgtttgtcagccatgctcagaaacatggctgcagctaatattctgatgtccttttgtgactccagctcgaagcctagagcggagcagtccttggtcaagtttgtcactcctcagcttcatgacatcaacgccttggaagctctggcagatccagctttgcgtggcctatatccaccgaaagcattgtcgcgtttcgccgatgtccttgctcgctgcgtccaggtgaactgatcgaaatacccagtgatgatcttcattcactgatgaattgtttcagctacaacgctgaaggctggcccctgaaacaagcatcatctctgaactgaattactctgaacatcggtttctggtggtgttgcagtccgacccagaattccggccatccatgtcagaggtggtgcagtcgctcctccaatgcgtccagcgcagcaccagcaacaggaggctgggcggcctccgcagcgtctcacaacgaagcgacgattcggattggtgatgcttctgcttctgcttctgcgtccatcttgccgctgcccagttgccgaaactgtaacagaacccaaggtgtgcctcacttgtgacgccattgtacaaaaggaaaggctttattagacaatctggttgctcaaacagtgtggcaacaaacaagtcggttaatttaggtaaggtaaaaatagagtgggtgttctagtgagtagtgacattgtaattgtacttaattctgttcaaattttgttcatataagctaaaaacgtgtgggcacctattttttttttttaaaaaaaacatcctaccgccaccaaaccaaacggcggtatatagttgccgccagaaaatatataggagtatttgaaaaagaggcaaaaaaattaaaaaaaaatgctaagatatgggccacaaggcttgcaggctcaggcttcagcccagttcgccagatgactaatgacggcccagaagtatatgcagggcccacttactcagacaggccgcccgcaggccgcagcacatcgctcgcgcctccactcgtcggaactctcgtcgccttcaccaaaaaccctatagccggagaagaagtgagcctccgccctccgctagtctgcctccacccgccgccgccgccatggcgctccgccgcatcaccccgcggaggagacccgttctccccgtcccccgtgccttcttctcctcgagccccccgttccctccgcccccgcctccggcgaacggcgaccccgacgccgcccattccccgtcctcctctccgccccccaaccccggcgcgccgcggaacccgtcgccctcgctcttccgggacatcaaagatcgcctccgcttgtctcccacgtcgcgcggcgctccttcttcgaaaccgtccgttcaagatgtccgccggttgctcggggagttccgcccaaccggcagcccgccgatccctccgtccccctccgctcccggagccgacccctccttcatggacctgctcaagaagaacagcgtcgcccagggcgccaacgctgggcagagggtgaccgacctcggtgccatccgagagagtctgaagcgctccccgccgcggacgccgcgtcgtccgccgacgccgtatttgactccgcagagcaacatcttcaacccggagctacagaggaacttgaaggctgtaggtgcggggaaggaagagaaggactctaccattgcccttttgaggcactacagccacgaagagcttggaaagaggctagctgagctccggccagcggttgcggccaaagacggtaaggagtggttctcgctcaaggagctgcaggggcggattgccaaactggcggagttggagaagcaggagaaccaggtttcggggtatcgtacagaaatcaagaattgccttgagctcctgaacaataaacaagaaaaaccgactctgtcagtaaacataccttcactgctgaaccttggcggtcagctgacactagactacatgaatcggcctccgcaggaggagttgttagagaaggtgagattgtctttttgttttcctggtcattaaagtattccttagcgtattttacatcttaagatgtgatctactactgctgatccaagttatcttcagtacttccatccagatcatatgtcatctgaagagaagatgaaattggagctccaaagggtgagggatgagttcaagatgtctgagaatgactgtgggtctgcacgagttcaaagtaaacactttattctgttcttgagttcaaagtaaacactttaccctcttcttcaaagtaaacacaagttcaagcgggcattctacttgtgaaagatgtagtcacaattatgcggaaatcagaatagcgaacagacaggtgttctacttgtgaaaggtgtagtcgcaattatgcggaaataagaatagcaaacgcagtatttgttcttaactagatagtactttttcattttttcacacactttgttcgttttgaggttgcataatacgtatacagaaactgtgcgtttattatttatgctatgaagttgatttgtaatgtttggttgtttatttgatgcttatatatatgaaacaaacctgtagctatatatgaactaaatactgaacacctttcagctttgtcaatcccttgccgtcataccttcttgttcactggggaaaaagcatcacctaagcatgagaacttttatcccttttatttttctagatgaggtctcatagcagctctgatgtatgtttaaagatgttgaacattgtgtatttgtatgccttgttgtcttttgtgtgtgaatcatgatgtgtgttactgatatgtccatattttgtttgcagttgcccaactgactctgaaaatcaagcatctgtcagctgttctccacaagaaggtatgcaaaatcctaggcctcccttatgatttattctgctggtttactgcaacatcttggagcgacgattttggaactgttttatcttgattcaaagaagtaacgtgtgtgcacttttgtgatgcaggataaacattctagaaaagggcttcaggagatggtccaaaagaggaagaaatacctgaaatacttgcgaagaactgactgggactcgtactgtcttgttctgtcaaagctggggctccgcgacgtgcctgagtacaaagctcctgactacaagagcaaagcaaccaccaaggctaaatctaagaagagcaagagcaagagcaagggcaagaagagaaaggtgaaggcataggagtggtgaacaaatacaccctttttggccttgaatttcatggtcagaaaatgaatcgagaagacacgcagcccccagatggctcgaaccaatcttgcaacgttgtattttttatttgaagctgtttgtaataaccatttctctggatgacagggtttttccttgttctgctaggagctgtaacctttttgtaacaattgatttcttatttcttttgagttctcccgctcaatttgctgagaagggaatggaggaacagatacgacagtacgataccatcacgttgtcaccagtatgtaactttaccataattctttgttcgcgtttcatgtaacttttccaggattattgtacaagaatgcatgaacaatcttgctagcctagcgacgcaaccactagaaatttctgctaatttctactggttttgatagaaaccagaaattgcatatggttttgatagaaattctgctaatttgaaggccgtgagatcagaaagaaggctcccacggccgacccgtcctcggccgaggagcgcgaaaggtccagcaaattgagtatcaacttgctacaggtcggtggactggacgtctggacctgacagcctatacaacgaggcggccatcaggtccagtgtagcctatgtccggaacgtgtagatggctgtcatggagcagcagcaacatggcttcatgctccagcagcaacaacagcagatgacgatggcacagcagcagcaacaagctctttccaagcatacaccggaactggggccttgttccgtgaaagtttttgtgtttgtcatctatagtatttgataattattatctaactatagacactagattcaaaa

SEQ ID NO: 4167 - DNA, 7292 bp, Sorghum bicolor
  misc_feature (3543)..(3642): n is a, c, g, or t
tatttataccaagtatgtgaggaagagctccaaatacaattttgttattatttatatcaagtatgtgaggaagagccggaccgaaagaagccacatttttatggctctggttcctccgatcttccttcaaggagctgttttcaaatgtatggtttagcacgactccacgacaagagccgcaagaaacttttgaatttaataacaagcccttagcaaaatttaataaagtttatacatactgagtacctcctttatcttaaaattactgtatatctttaattattattttttgattaaatatatctataatcattttaggatggagcatcatgcaaacaattccaatcacaccacggagggtaatctgtttgaattcagctgtgcttgtgatggaatggaacttttaaatttcgcgctgggctcggatggaccggtatgtgacaagatatgacaccacgggcccgtgctgccatttttttttggtctagcccgctggcagctagtagtacccgcgagaccgcaaggcccgcaactcgtactcgtactccttctgaacgagttcgaaaacatgtctcttgcctgtgggcccggtactatcgtcacaatttcacaacacgactcccgcatgcgctcccgtatctgtccggtagtggcaggattcaaacaagggagcgaatctccgggcagtgtcactgaaccgtgggcccatgtcatatggcccacatgtcaggtacagaaccacggcgaaaatgcgaatgcccccggcacccaaaagcgcgaaagctgcggcaactcgccacctcgatcgacttcatgaatgtgctccgctcacgaaaagctctcacgtcccctctccgtgacaagtggggtcccatcctctacgtgacccacatgtcagcgcgagaatgccgtgggtgagaagtgaaaaagccgcccccggtgataccgcctcggaggcagagaggtcaggagatgccgaggggggggaagagtctactactacttgtcctcggagttggcgctctcctcggcgtgggagagagagagaggaaaaaaggtgtgtagagagagaaagtgaaagagcccaaccaattcaaatcccctactaggcgtaggcgagggcttccgttccttccaagcctgggcgtgcggtggtgctcctccgggcgggctctcgcacgggagagatctccgagcatccctgctactcccgctgtacgcgctgctcctcctcctcaacctcaacctgcacaacctgcgtggcatttgcggctgctttgtcaagtgtgtgtgtgtgtccttgttccgctacgcgatttagtttctgtgaggttcctcttggagggacggacgacatgcgggagtggggatggaaccggggcaaccggcgatttcgaattttttttccctcccaatggttggtgggagtagtgtgcttccgtttttaggctactctcgtatgcatgtgatttttgtttttcgcttttgatgtgccccgattgctctctgatctctagatttgtagtgtttaattcgcgagcaatgcggcaagcgtaagggggaatacgggcctggtgctgcttgtctgaagttcactgacgcttagttttgcttggttagttttagttagttattttatgtttcggtacatttctgaatcgaactagtgttcatttgcgggcagtttagccctcaactgttcgataagctccaattggatcttcgtgtggatgatgtgattgttttcggactcaaatttgtcattatcttactgaatgctccaatttcgttgtctcccaggtgtatctggttccttatttgaattcatgtatgttttgtgtttcagatcaggtaaagggatgggtgggcaaggtataggaaacactgtctctgttcccctgttggggaaggcactgcccctttccttgtaagttttcctgtgagctctctgctgttgttcaaggggaggctttatcctgtgatagtatcaaagcaccaagatgaagtccagtgcggttactacaaagggcaaggccgtatttgagctcaagcacaagctggtccaagctgttaacaagattggcgacagagacacttaccagattggattggatgagctcgagaagatggcggataccctgccccctgaaatgattggccccttcttgtcatgtgtcattgacactgatgctgagcagaagagtgcggtgcggaaggagtgcatcaaggtgattggcacactggcacgactacatggaaacctattggcaccacacatggcgaaaatggtgtccagtgtggttaagcgcctgaaggacaccgattcagttgttagagatgcatgtgttgacacttgcggtacccttgcaatgtgcgccagaagttatggggatggtggtgcagcgttggtgacattggtgcgccccttgtttgaatcattgggtgaacagaatagatatattcaggctggggcagcactgtgcctggccaaggttatagatgagagcaattacttccctgggcctgtgctcccgcagatgcttgcccgtgttgttaagctgctcaagaatccccatttcatggcgaagcctgctgcgattgacttgataagaagcattattcaggtttgcactcttggttttgtttgtgtaagcaatgccaatccactaaaacctctttgtgtgtaagcacattttcacaggcttttcatgttatacagattcctttgcatgttcatctgaccttataattagtatcatgggaaagaaacattcttctgtgtaatatttgccagtcaatggttagtcagattggaaatactgcaaccttcctacaaagccgcatagctttcttgcttcttcaagtctagattcatgcataggattgctagattgattggtcattaatatatggtgtaaattcagcagcacttcttaatatctttcaagaagtacagtaatcgtattcatcttcagtttggtctcatagcttataactaccaatctaccataagatcttacattgtgttagcgtacttatttttcctgtgcccctctttttcaggctgaaggcgcttctacagagcaggcgttatcatcagctctaacaagtattatggatgccctgaagagtactgactggaatacaaggaaggctgcctcactagctctttcaagtattgcggtcagttctgggtatttggttacctctttcagaacttcctgccttcgctcccttgagcgcagtaaatttgacaaggtattgtatcccttcactcccttgtactgtggaatttatgctgtaacatattcctttttttttttggtttactgacttcatgcctcttatgataggtaaaaccagtacgtgatgccattatacatgcaattcagctgtggaaagctattccagggtctcatactcctgaaccatcagaagctggatcatcaacaaaaggtacaccagatgttccttcaatttacatttaccagttgatattgcgcaaaacagatataacactgtttgtttccttgatttatttcnnnnnnnnnnnnnnnnnnnnnnnnnnnnnnnnnnnnnnnnnnnnnnnnnnnnnnnnnnnnnnnnnnnnnnnnnnnnnnnnnnnnnnnnnnnnnnnnnnnntctcatctgtcactcttcccgattattcatcttaactcagagataattaatcaactaaaagaatcaaataactgaaaaaatattctagtttctgaggcagcaattctactgctcttagattttttttcgcggatcatggttaatgttacacaacccatggattccaaccttttgtttctgagttctattattcaaaaaaagtgtgagtttaaatggctattaaagaataccacaataccatgttaatgacttatggtttgtgattaacgtgtaatgctgctagctaatgagatccttctactattttttttccacatgtcctctttattgcttctgcattttgtctgtagttaatcacagtcactaactcagcttattttctattgcctatcaatgtcttctcacagagaacttctttggagaccatcatgatgctaaaagtatacatgatggaggatcaagagatacttcttttaggagaacagatcatgggccttctgtatctgttattagtggtagttctatcagttcagcaaagcggaggtctcctttgtctatcaacaaagttgccctaaacaatgctgcaaatttgcagcgaatgaagtctggtgattggcgtgttgaggtgtcagttccaaagcagaatatgataccactggttcacaatgatgagaagggatccagtaaagtctgcatcctaaaagatgcaaagagaaatgcatatgaaagcattgatgtagacagtaagtttgactatgacattatggatgataaacaagaatgctcctctgtgtcagaagtagcaagcaggagttgtgagacaaagcatgtcactactgctcaggaatgcactgaagattgtgattcaacacaagttatggaacaatgtcccaggggtcgagaaagtaagagcatagactcgacaattacagatgttactgctcatggcacacatagttgttgtctgaatgctatgaatgaactggcccttgttaggaagcaacttcaagagatggagaggaagcaaacaattttttttgatttgttgcaggtaactgccgtgctttgagttgtgaagatattgtcaatttgatttgtgtctatatttacctaattgttatggagtcatatatacatcgatcaatgtggtaatagtgcaagttataatgcaaggctaataattccagctatatgcgatattgttaagcttcatggttatttatgattttgttgaacacttgcaccctgaactgtgaatctgttagtcttatttttacattttgctttcctcaaactctccacttgccaattcaagtcaaaatgtcaatgcatattgatagtaaggatgatcgtcatcaaattctgtcaagttttaccttgccactgcatcatgtaggaaaaaactatgcaccgtctgcaaattcatatgaatacatcatgtatgtaaagaagtgagttcaaatcttttctcaaatggttacccccctctcattgtaggattttatggccagctcagcggagaacatgtctgtgctaaatttgaaggtgcacaacttggagaatgctgtagacaaaactgtatatacaattactcagagcgaaagccggtatcatcttcctggctccaaatattttaagaaccaaagcgtctcttctttgcctaggctttctacttctacacctagatcatctgtggatgttaactacaagccaccaccaatctcacagttgaaacatgagaagaagtggatgcgtgatctaccaactcggggctcaaatatgtgttctaaagagggagctgaatttccaaaggatcatgttcgcagtaaaattaggaagtttgagcctgtgagctcagagagtaacttgggaagatatgttccaagctcagcaagaagtagagcatcaggggttaaagggacttatccagtttcatttaccagttcctgtgaacaatctggactgcgaaatgcattgtgtgcctctaatcagcctggtgagtttcaagatactgatggcatggagcctgcatacatggaagccctgaactgtggtgattatgatggtctgattgacctaatggatagaactggaccagttcttgagaagttatcgtgtgagacagcaaatgagcttttgagggttatagctgaccagtttcttaacaaaaagttctttgacttggcactgccttggcttgaacaggtaacttcactagaatttgttttacatattaggttggaactcggtttccttgctgtgcaaggctagtcttattcctttcatgctttgtaattgtgtccaggtatccgctatcatacagtaatgactaatgagtctaacaaaagcttgtggaactaacttggtgccactttgatttgcatgtgttgcccccagatagcagatttaagcacgatttataagccaagtcaactatttgcatctgtgagagcacaaaaggagttcctttgtgcattggaggaagctgcaacaggtgtatccacggaaccagccttgaggattgcacttgcacagctcgcatttaaactgaccaaagcttttgaggttggcccatgcaggtaatatatgttgtccgttgccaaaaactaaaatcatgtcatcaatcctcctacttaatctggatgtcttgtgttactgacacacccattctgtttttgcaggaaaatttcaaccagagtgtgcagagaaaatgaaactatcctggccactgcaatgtgaaatgttacttacactgatagataatctggtgcatgctcaggccatgaaatcagtgcacagctcgcatttaaactgaccaaagcttttgaggttggcccatgcaggtaatatatgttgtccgttgccaaaaactaaaatcatgtcatcaatcctcctacttaatctggatgtcttgtgttactgacacacccattctgtttttgcaggaaaatttcaaccagagtgtgcagagaaaatgaaactatcctggccactgcaatgtgaaatgttacttacactgatagataatctggtgcatgctcaggccatgaaatcagtgctttagtgagcttaagttcttttcttgtagctgtacaacctttgtaacgttgtatgatctgtttaaggccctctgtttaattagtgtgtgaaagactagaagatttctatagaggttgatagtttggtagtttaaaacatgcgtgtgtttggttctgtactgtaggtctggaagcttttgctgtgtagcaaaatgtggcatgtctgagcttgtgaatttatgcttggtgcttgtagacgaggccgtacagatttttgcttgaattatctatcacccagaaagactatcgtacctgcatttcaattcctgtccacagcatcagatctgtgtcctttccgtagtttagtcctaacacaattcttacaatggaaaataaatgaaaaaaaaagaatgaaagaacggaagctccagacagcagatcctgtgcagcgctacatcatccatcctaggccttggggccttgtttagttcccaaaaaatttcaagattttccgtcacatcgaattttacggcacatgcatggaggattaaatttagacgaaaacaaaaactaattacatagtttatctgtaaattacgagatgaatctttt

SEQ ID NO: 4168 - DNA, 4376 bp, Sorghum bicolor
  misc_feature (1681)..(1780): n is a, c, g, or t
atataaataaaaaataactaattgcactgtttacttataaattggtagacaaatttttaagcctagttagtctatgattggataatatttatcaaatacaaacgaatgcgctagtgttaaaatccattttttttgcatctaaacaagaccttagttttcaaaagtagttcttcaggtcagtacaattttggaagcatcttgaactttttttacttttatcattctgcttttcaaaatgggtggaaatagagagctactccctccatcccaaattgtaagtcattccaataatcttagagagtcaaacttttctaagtttgactaaatttatattataaaataattattattatggtactaactaagtataattagattctttcttaattatattttcatagtatactcactttatgttacaaatcttagtatttttctctataattttggtcaaacatgaaaatgctttgactctctaagattcttgaaatgacttacaatttggaatagagggagtatttcaagaaaatttctatacttgttttagctaaactgcttatagatttttcacagcatatagcttcacaacaacttttttacagctagcttataacaaatctttcagaacttagacctgaaccaaacgctatatatgtcacgaggaaggtaagcattggataccgactggccggaagtgattgtagagggctacagtgttgtaatatagagtacatgggtcttgactcttgagtcgcatgtagtccctccgttctaaaaagagtgtcgttttagatttttgtgctacaagtttgactcgatttgtagaaaatatatgtaatatttatatctctaaataaatttgttaaaaaaactagacttaaagatcttttcaatgatactaattatgtattataaatactaatattttttactatatatttagttaaagttatttctcggaaagtgaaaatgacacttattttgggacagaggaagtagtgactacaagccatttattactgtattattacaaaaaataaaaactgaaggatggcaagggaccaactatatcatgggtatttgtgtatttagctactagccctacgagattttttttaaaaaaaaaactgctgtaataagcaacagttggcgaggagaaaataataaaagtccaaacagattagggtcttgtttagtttgtggatcaaacgttttcaggtgttatatcagatattttttgagatgttaaaaaaggtgtttgatactaattaaaaaactcactacatactccctccgttctgcaatgtaagttcattctaggattcaaaatttgtcctcaaatataaagcattctaaaggacaaaactatttttgcattaaatatttttctgtttatcaaccaataccactaatcatgtttatgatagcatctgattaggaaataaaatggcggtgcatgtgtcttttgtgttctctcttaattgtcttacaattcttagaatacactatattacaagacagagagagtaatttgcctggaaaacatgagataaatttattaagcttaattaatctatgattagcacatatgtattattgtaccaattagactaattaggcttaaaagattcgtcttatggttttcataaaaattatgcaattagttatttttatttatctnnnnnnnnnnnnnnnnnnnnnnnnnnnnnnnnnnnnnnnnnnnnnnnnnnnnnnnnnnnnnnnnnnnnnnnnnnnnnnnnnnnnnnnnnnnnnnnnnnnntatatatatacacacacacattaaatataaaaataaaaataactaattatatagtctatctataatttaataaatcttttaagtataattaatctataagactaaacaaggcctaggcacattaccagcaagccgcctggtgacatattccgtgacatggctttggcctacgaacttgcatatataaattgaggcgcgaagagtcccacttcactcaacactcgagcagtggagctgaagaagccttccccccaagagccacagagagcatggccgctgctcccatggtggtgccgcgcatgaagctgggctcgcaggggctggaggtctcggcgcagggcctcggctgcatgggcatgtccgcctactacggcccgcccaagccggagccggacatgatcgcgctcgtccaccacgccgtcgccgccggcgtcacactcctcgacacctcggacgtgtacgggccccacaccaacgagctcctcctcggcaaggcgctgcaggcagcaggcggggtgagggagaaggcgcaggtggcctccaagttcggcatcctcacggacgccgacggcaactggggcgtccgcggcgacccggcgtacgtgcgcgcctcgtgcgagggcagcctccagcgcctcggcgtcgactgcatcgacctctactaccagcatcgcattgacagcaaggtgcccatcgaggtcacggtgagttcgcttccacccttaggcaaaggctttagcttcaatttcatatttgtaaaaaaaaactcagccaaggcattttttaatattccatattaagaaaaattcttgaggacactgagtaccataaaggtgagtggacactgcattctaaataatgcagaaggtgagtggacactgagttccatagtagtgatcagaagttgcatcttctgaataaacaaagtattcaatggcttccttgagtctctgcaatgcatgcctttggccctttgctcaagaaaaagaagttccaagattcaaaagcagagacggagtggactgaaccacaatgcactccctaacctgatgaataagcttatgaacctgcttgacttccatgcacaggtaggtgaactgaagaaactagtcgcagagggcaagataaaatacattggtctgtccgaagcatcggcgtcgacgatcaggagagcgcacgcagttcatcccatcaccgctgtccaactggagtggtctctctggtcaagagatgttgaaactgacataatcccgacttgcaggtcttttctttttcatgaccaaaactgcatctatattgttgagccaccaacaaaactgtatccatattgtttatttacttgttcatgctctggcaatttcagggagcttggcattggaatagtggcatatagtccactgggcagagggttcttgtcaagtggtcctaagctggtcgacaccttgtctgatcaagatttccgcaaggtttatacctctaataagcactcttttagtagtaagtaccacagcccagattatactgacgcaccattttaacctttttcactgaaaccatttccaggacctgcctagattccagccggaaaacatggagaagaacgccgtgatctttgagaaagtgaatgcaatggcggcgaggaaggggtgcacgccgtcgcagctggcgctggcctgggttcaccaccagggacccgacgtctgccccatacccgggacaacgaaggttgagaatttcaacagcaacgtggcggcgctttcggtgaagctgacacctgaagacatggctgagctcgagtcctacgcgtcggcggatgtccagggtgatcgctacaatgagtccttcctcgccgcttggaaggattctgagacacctcccctctcgtcctggaaggctgagtaacgtacacgcatcgtttcacaacatttccaatccttggtgttggcaaataagcacgtaccggcagtgtccgccgtgagtaagatatgtgggcgttgatacttgtgtagttgctcatgtctcgtttctgttgttgcattgtgtcaatattatattcaagaaatgcgaaaagcattcagggtatcaatgaattatgttacatgaaaaagctgctatgtccgtgacacaaagtaaagcttcttccaaattaaatccacacactattgttcaaatcccccgaccccttaatggcttaatcccaatatctgttattattgttttctttctcaatgatgatttgtttactcgatattaactagagttatatatatctaatctctttttcttctcttctctacaactagaaagatttaacgtaatttctttttccaaaaaaacaaacaagggagttcagactctttctctgaaactcccattccctaccaccaattccctcccaaccaaatgagatgttagcatcaccgcttcaatccccctcctctctctatccagtcatctcgctggtggttagaggggtggggaccctacccttttgtagatctaggtttgttctcggtttctcatatgttttgtttctagtatcatcgacgaggttgccacaatgatggcatttggaataaggtctctccctacctcg

SEQ ID NO: 4169 - DNA, 3183 bp, Sorghum bicolor
caactttgctcgctctgaaaagccttaaattttaaggagaattagaccttatttggttcactttgctaaattttagctagctaaactttagtcaatttaatagctaaagtttcaaacacattgactaaataaagctaaaatagtttagttccattaatcacctaagagtagctacaataattttagctagctaaaatttagcaaagggaactaaacggggcttagtgtttccgcctctgctttggaggctaatcgtgactttacccttttttcttttgcaattctatgatttttttttaccctcactttttgaatagaaagccatcgtttgtccctgatttagactctattaattaactgaaggctgaataaacgaatcaaaggaaaaaaaattaaaagacagtactaatctctaaccttatcgtaactgtgtcctaatcctagcttccatttatggttgattaagcacatgtaacctgctaaactttgcttaaattttaaaaacttgcaaaatgtgctgtgaaaactactgcatcccctatcgtatattcgtattccctcatctcaaaaaaaaaaaagtactgcatctgctatatcctcgcttcagacccgagcacagttttcgcgattggagctgcaggctatatataaatattcacttctgcttttaccgctttatgtttctacactatacttttaataacaaacaaaagttttacatatttgatatcacaacattttatcacttccctaccccgcgcaacgcggggcttcgtagttctaaaaaatttggaggcaaattcacatgggaaaactagtcgtttctagttgactaacaccattaatttctgtaaacgaaaaatgaaacaggatttaaactatgtcttcgttttgagaaaaaagggggtacaaaatcacagttagatgtgtgtgtcagtgtgtgtgtggggggggggggggggaattaattatttttatagaaaagggagcactttcttaaccagtcaaaggccagggaatcatccgtaatgggctcaagggcagcgtaatataaattaatgggctagacaaagtaggcctgcctcaactcgaacaattttgctgcacttctaacgcttcaaggtcaatcgtagttattcgtagtgcaaagtgcatgggactactcctttggttgaacagctctgaattttttttctctctaacggaacaatttggatcttttggacgagccgatcgagacccaaacctagttggtactagctatccattcacaaatgaatttgagttgaaattatcggccgtggccgtgcatttatatgtatgaatcaaaattggtatcgcaaggggaaaaaaaaatggagtcgagattgtagcaaagattaagaaaggaattagacacctacagtacgcaagagcttaaagaaagcagctacggtagcgatgaccgtatacgaaagcgagcgacgcgagagcactgcttaaatataatctgcaatttgcaagactctgagttgcacgttcttatggaaaaaaataatgtgtttcgtctctacttatgttgttttgaagcaaatgttttgtttatttatgtaggaactagtacatactccgccaagttaaattagaagccctttaattggaatcaggaactgtcatttgtgtaggtgtagcaacaacatggggagcaaaggagcatgatgagcatgcatgttttgcctaaacatagctgagggacgaccaagtcaaacgtttgcgttttggtcctttttgaaccaaggccgcaagacgtggcgccaaaagcaagtgatgcgtcgatcctcctgttatctctctgggctgtccgctgcccccgtgatgtgagcgcgtttctctcccgtcctctcctctcctctcccgcaacaaacacctgctagctgctctcgatccccctctccattgccatctctctctctctctatcgcattgctcgagctcagaaggcaggcacaagcagcacagccatggtgatatgatatgatacctcctctcctccgcatatatcctgatctctctctctagctattagataacttgctaatagctgatcatgcatactatactatacataatattgttgttcctgcatgcaggcgaactctgcgtccggcctggcggtgaacgacgagtgcaaggtgaagttcagggagctgaaggcgcggcggagcttccggttcatcgtcttcaggatcgacgacaaggacatggagatcaaggtggaccgcctcggcgagccaaaccagggctacggcgacttcaccgacagcctccccgccgacgagtgccgctacgcaatctacgacctcgacttcaccaccgtcgagaactgccagaagagcaagatcttcttcttctcctggtaatcatatattcatcatgtgctgtggatgcatgcgtagctcacgtatatatgcagcagcaatgtacatctgatgattaataactaactgaaaataaatttagtggccattactgatcaatgtgagtgtattacaggtcccctgacactgcacgtacccggagcaagatgctgtacgccagctccaaggacaggttcaggagggagctggacggcatccagtgcgagatccaggccaccgaccccagcgagatgagcctcgacatcgtcaggagccggaccaactgatgatcatctttccatccatcaccaagcaacaacaacaacaacacacaacacaaccacctctccattatatattatcatttattaatttcagacccacccactgctaatcgtccatatatgagagattcatccgtggactagctatgctccatctctttcgtacgacacacaatttgaaacctttctattttactaatttggactatgctcgatctctttcgtacgatacacaatttgaaacctttctattctactaactattatgtattccaggttcattttacttgtaaccattcctcaattctttctgtaaggatcgatcggagcatgtacgtggctatgccaattgttgggcataagaatgcattttgtttatgtaatatagaaatttatatattttgagcaacaagttcttgagaacaaattccataccacgtgtccacttgtataaccttagtataaccgtcacaccgtacattaacaaagcaccacggacttta

SEQ ID NO: 4170 - DNA, 11037 bp, Sorghum bicolor
tcgaagatccagtggagccacttcaccgacttcgaccacgggttcgtcaagctcacggccctcaaccactcctccctgctgttcgagtacaagaagagccgggacggcaacgtgtatgaccatttcaccatctcacgcgattaccgggacatcctcgcttgctccatcgacaactgtccccggaccacactggcttcctgaagttgatcccacaggccacagtagctgcagagaagaaatttagttcgtagtttttggagcgcaccaataaatgaggcattttctgtttaatactatatacctgcattgttttgttgcacctacaggctacaggtgacagtgagtgccctcttgtatatgttgcttaaatgtgtaggtgttgcagtatatcaatatgaggtgcagcttcaaatattcttctttaaataatgctctgtcaactaagacgaaaaggtgttactgggcctcaaaatcgagggatatttttttaaaagaatattagaatatactccatctgttttaaattataagtcactttggtttttttggtacgtcaagttttatttagatacatagtaaatttgacgtactagaaaagttaaaacgacatatataatttaaaaccaacggagttatgactatgttgtcatctagggccaagaaaaacgctgttgctgacattgttcttaggtcctccattttcgccgcgcctctgtctaggggccctctcattctttctcttcgatgtgtttggtggcgataagaaagagaggggatatctctctctttttttagtttttatatccttttgtttaaggtttagtccaaataaatatacggataaaattaaatgatttttagtcgggatattattacctgtgataactttgatgattgccataacaaaatcaccattgcatgcatcgatttcatcggtagacgaccaatttgtggccattatctacaaatcggtgctcatgggcactcccaacaaggacaattactctggttcatcaatctcgccgtcgatggtcgcaaagaggaaatcaaggattgaagataatgaatatgtatcatatgtcattgtacccaacgatgtaactattgatattttttcattgattcagatatgttttggaattgtttcagaatattagatcttgcggcaatgtctaattctttgtggttgatcgttgaatctggcataaggactgtgtctgtgttaactgtatcgaaaaattactactccctctgtctcaaaatagaagtttattctcgcttcacgagaagtcagtttttaaactttgactaattatatataaaataataataatatttatattatacaattagtatggttagatagatcaatgaatatgctattataataaattaatttggggatataaatgttacacatattttctataaatttaaatttagttcaggttgagaaagtctgcgatggaggaagtagagaaaaaaacgatgaaaaaaatctggatagactatcatatattatttatttcagatattttatatgtaatttgagaatgtattgtttccagttttaggccttgttcagttcgcaaaaactggtgaaaaacggcactgtagcactttcgtttttatttgacaaacattgtccaattatagagtaactagactcaaaagattcatctcgcggtttacagatgaactgtgcaaatagtttttgttttcatgtatatttaatgctccatgcatatgccgcaagattcgatgtgacggggaatcttgaaaaattttgcgaactaaacaaggccttaacatacttccttaaaaaaactactgtatgctattcgctcaaaaactagtgctgtggagcgcgggccaaaggactcaaaatccgttcacttcccgcatcccgtccgacccaaaaccccaaaattttcgaaaaaaaaaagaaaaacccaaagcccccaaatccaagccgccgccgccgccgcccgcccgcttccgcgcttcagctttttcggagtgaccgcacggtcgccactcgctccttcctcccgcacggccgctccgccgccactcgcctcgccctcacctcccgcaccgccgccagcacgcagttgtagggagcgggtccaaatcgatccccgaggtcaggatcagtgtcccgcctcccgtacttcccatggacgccgacgacggtagccgtgccaccccgccactggacgccacggccgccgccttcaagtctcaagtcatggagctgcaggacctcgtcctcgcacgcagcagtacgcttctcctccgtttacccgccgctcacctaaacccgtggggtactgacccgttcctcattttccacaccgtttttcagtgttcccggccacggcgctgcccgaactcggcaacgtggacgcgctggtgactgcgatggagacgcaggtgcaaaacatccgcctccgtcttcaggaggagcttggtgccatccccaaggccaaggtataaacggtgctcctttgatttgagtcctgatgttcctacggatgctgacctcctcataatcaacaataatcatgttgtcctcctcataatcataccatgtttcacttgcattaactatgatgttagcataaagagcaaggtactcatatccgagagatacatgtggcgattcgaatcgatttacatctagctgggtaaacccagacgcacgatgcatcttcccaaagggatcacacacatcaacctttcccacattcactcactccacaggccacgtcccagacggttactcaaatgtgattgttgctgcaattatccatgtctgaattgctcctaccccaggagccaaggaaacagttcaacaaaccgcatagtggtgcccttagggcagttccaatgctagaaactacatataatttctacacctattaatttctatagacacaatatatatagaaactatggttctaatggatagtttctacgaaacatttttttatccaatcgtctacattctctctccattctccaccagtcacatccattcatgtcttggttcttgtgtagacatggtttctaacttagacctggtttctatgatttttgctctctcttcaagtgactgctgctgtcccagctactagtaaaaacagatttgaatacttctggacagctgctagtttatcctgacctatgtcctcactgttatgtatacctttgtcgtgtatgtatttcgacatgcatgattgttgttggtttgagggctcctccccccatgttcaaatactggctccgcccctggggaggagtggcgcactggaggagtaacagggagggactgcatcttgctaggagggagaggaacaacaagggggcaacatagggagggaggagcagaaggggtggcacagcagctgctgccgttggaggagggagctggacggaggctctaaagagtggatggataaggtggctggggtgggagtagataacatggggattttaattttttttcttctcttatcttgcactttcctatattcgattggtacaagatgaatactagttgagttcaaacaaaacttcaattgaacatcttcgaaaaagactaactacaattcatacacttgggtgtttctcccttgttcttggttttactgttatagttgacatgaactaaatttataaattcatttggcattaaattttgaaatgcttaaacaatttcgcgcagttttccttttcacgtgtactggttgctctaatatttctgcattttctctagaatgaaacccaattagaacctattcttctcacaaactttcatcgttcataattgatattactatccttgatcattctcttagcattccttttttttactcagtgaaggtttgttccataacttaaaactctaccttggctttgccatcttatgggaaaaatttcccccaatgcttagtaacctgaatgccatgcttaagcaatattaaactatgtgcgtgaacaccagtggtgttacattttgtttgcttggaaaattgtttgatgaaaaatggatatatcaattctattcaatctcttggcagtagatgggttattttcttacttgctgctccctcccttccaaattataagtcacttttacttttttggtacatccattttactatgcatctagatatgataatatgtctagatacatagcaaaatagatgaaccaaaaaagtcaaagtgacttataatttgtaactcagggagtactttattgcatccatatgcagaagctagtccagcgtctcttgaagcaggaagagaagctgcagcacatgcttgcgaacttaccttccggaatgcgcaaggatgcttttgctactcagcttgaacagagcacatcaaagtattttctaaatatagttaaatcatttgcttctgccttcatttagcagtaacagcatgctgtttgtcttccaggatgctgcctcattttgactcttattttactgaagctaatgaatgtgatgtgaagattaaggatgagccagttgcagctcctagggtaaagttacatatcttgtggactgttcattgattctagctggatttctttttcataagagttgtagtagttgcgtgaacttatgctttcttgtattgctgagaagaagggaagagcacctgcacctcgttggtatatctcaaccgaggagcttgattcgctctcatcgttagttctcaatctaccttgtctttttcttgcattcaaattcaacaatatgttattgtgactggatgtgaattatgtattctgttgtcatgcaggtacatgaggggaagactgactttggaaaaggttaatatcgcaataaatgaagtggcttcatatgcagaggccaatgctcatcttgttacatgccctaagagaaaggttcatttcattcaattcctcttttcgacagtgaacaactgtttctattatatgattgcctgttgagtgtgttgtcaatgttcttgcagttgtcagaagacacatgggataaagctttggtaagctcttggcatttttttttgaacagaggcattctccagctcttaagcatataatgaaaaatgccagtttgagatgactgaggcatataaccgaggcacagtttgagatgagttcaggcagaaaaggaaaatgccagaagcagatcacctgctttttagttatgacaatctgattcagatcgtataaccaaaagcagcaaaccaatgacctagcgctacacaccatacagtttgagctccacacataaaaaaaaaacaaaaactatatatacagatcaccacaactgccatcctgccttgctggatattaccttctctcttggatgccaggtctgatcttccccatcctgatgcttagtgtctggcagctgcttcaccacctcagttgcttggctaggagcttcgacacaatctacagtgttagcatcatagcatgtttcctgcttccttttgttactagctggctgatgcctaggaacctcccctagctgtcacctatttattccccctctttactgctagtctttacttcttcttagtttgaatccttggtcaggcgaattttttttttctcgaaaacgcaggagagctgcacttcattatattaagaagagagtaaagggcaagagcccatacaacactcacacaagcacaccaccagtctcaagggttactatcgcgccggagactccataacataacacgaccacagctgagccaaacactctaactaccggggaggagggcagccaagaaggatagcccccgagcccctgccatagaccacaagcggcgttcatttccggctaagatcagcgcttgagctaagttaggggctgctccatcaaaaacacaactattgcgatgattccaaattgtccaggctccaagaataataagtgaattcactccttgcttcaacagtccatccttggtgctgctgatggcattttcccaccaagcatggaaggaaagctctataggttgaggggatatggtttggagaccgaacttctggtcggctgtcaggcgaatttctggtcggcggtgtggaaaaacccccctcgcctgtcccacattcccaaagcacaggtaaaatggaccggccctctcactgggtaatggacccctgtgtgcgggcggggcatggggttcgggggtcttctcgggctgggtgaaaagtcctctaccttaagctaaaatagctcgggggtgtttacccccgcagcccaagttttttctactgctagacggctgattacccaaccaagcatcaaagcagcaataaaatctctcaaatactttcctgtcttcaaattctgcattaaggcatactacaactgttgaacctgggttgctcctctaactcagctttgtagttataggtccttgtgtattctcccttcatagaatccaaagcagcattaagtactgttggtgtaaataatagtttgtaagaggatttttatgtaagaatgagaagataaaatagagtaagtctgtgctgggaagaatgccagccagaaaacttcccccaaattccaatatggtagagctagggttagtttacctcaggaggcggcggcgcgggcgagttgctgtgacggtgcgccggcaggggctgcgcggccaggcgaagtggaggtgaagcacgcgcgggcctggctcggtgtgtgcaggcgtgtgcaggagcgacgcgcgggcgtgaggacgtgtgtgcggaccaggcggcacgtgtgtacggacgcggagctgcgggtgcaggttggggcgcgaggcttgtgctcggctactcgtgcaggtgcgggcggcaggcttgtgctcaggctgtgcgtggctgtggtcaggactcaggagcagagaaggaggaggctggcaggctcctggtgtctgctgtcggagaggaagaaggcgttggtatgctgctgctcaagatagagggagaaggagcttgcaggagaactgagaagaggaaggaggtgctgttgctctgtactattgtgtgggctgtggggaagaaggtgtcactgcttgttcagttgatggatccagaaggggaagcaaagaagaaaacagaaggggaagcaaagaagaaaaccgaaccactctgatctgctagtctttgatccatatatgagccaattgcaactagtccaagtacaaatagctctgaccctagccttctcatccttgatgaaattgagatgcctatgtgtcttgagtccatacttgatcagggctttcttaaactgcttgctgcacgccatcccaagagcaaaaacatgaattggtgctttgctgtcgtaccttttatactgactcttccacctctctgtttctccttcactgttctcctcatatgagtactcatcacttgaaatcacatattggacttcctgggtttctaagttgggaatttctgcgaccaccaaagctttctctttgatttctctaggctgactaccatgcagaccaaacttcttagctttgatgttattagaatacagagagtctagaatgtgataagctctgtattctaatagatgttcctcttaatttccttggcaaacatcctcaattcttttatttcttcatcctctgcagaactgtcctcatctgtaggttgcctgtactcttcatctgaagtgtcatctgaaccatgattgccaccctgttcatcagcactgtcacaatcttcttcctcattgccaccctgttgttcatcatcagtgtcacaatcttcctcagaaccacccccttgttcttcagcagtttcacaatcttcttcctcattgcaaccttcttcattctcattctgcaatttctctgaggagaaatatagatccattctatctcagcaccaccaatctcctctgccttgtcatcaaacacttgctctgctatcctgtctaccttagtttcctgagctgctaattcctgaacatatatgtctgcaatttcaccatctgttgtttgatctgccatgagtttacatgaaccatcatcaacaagtagcagtagcccattggacagctccctccctggtttcagccaatgcatgagtgctacattgtcaattttgaagttatcttctaggtgaaccttgatctcaggaaacgaaatcttgtcctgagtcaatgtaactcatagcaatctctcccccctctagtgcatatgcaaatgaaatttgttattttcatacgtatttttgctaaatgagtttgaatctcaaattttgtgacaatgcacatctgcatatgcactattggtgtgcatagtttcaaattttttgaaaactcttaagtatagttttaatagggttttcatggattgcaccgaagatgtggtttgcactgaatattttgccatgcattagtccatcataccgcataaaccttaacaacgttcatgcctgtaatctgatggaccagactacacaaaaaacacaagtatgcatctagaaatcagccaatacttgactacaacaacgattcaaatgctacacaaaatcccattaacccacagtacccatcaaatccgcatacaaaattggggaaatcaaggggacaactggacaaggagcacaggtggattcaccttgacctgctgcaaaaatcttcaatcttctcaggactacttcctcctgatcatggcctcgttgtccgtgttgccggagagagaaggcgtgcacaggctatgaagggaacaagagagagagacaggcggagagggagagaggaaggggcacggtttgtttttttggggccaaacgtgtctgacaggagggattgtctgccacttgcagtgtgtcatttggttccaggttggagcgccacgtaggcaaaaccgggtgccaaaaccacatgtcatttagtttcaggttggagtgccacagaagcaaaaccgggtgccaaaaccatgtagggggttccttaaacggtttgaaaaactttagagtgctcgttagatggtttcgaagttcaggggatggagtaaccatagtgctaaagcggagggggttatgtagactttttcctttttatttatatttgtgtttttagaggcatgcaaaagccaagattttcctggtcttggcttttcccttttacattggcacatattttaatatttttcttattttctattattttcttttcggattccaccaggataaagtcctctgttcagagggctcatcctggaacctggattcactcaactggaggagattgcatttccatattactctcaactgtatcagtatgagagttatgtgtattttttttgtttaacatgaggttatacctagccaactccaaaccttttaacacatcaaacgttctaaagtcaccatgatcagttataactcctatatcactagttaaagaaataaagtaacttcttcagtgggaagcatagaaaataagttgctacgagaatcgttacattccagatttctcttccttgccatcctctcattcctctccatggtagtcaatcagatatatttttcttcttttatttggaaaaataaatttatttttatattttattcaggaactaagggacattgcagcaaaagaagcagtaaagggcaaccatttcttcctggaagcagatatcaaaggacctggtctaaaacttgaccatactggcaaagctattcttactgtaagtatatacaactttggctacttactacaacgatgcgtagatcatgtcactatattttttaaataaccatttacatcactgaagataattaatgttagatagaatgtttggcttttttgcaagctgttatttgggaaaatatgttgtttcttttgtctgtgttttgtcaaacttgaaccaccactgaagaagagaggagaagagaaaatgatactataatcttacattacatgttagatgaacaaatacacaattacaaatatgcagtttcgttatggcttttataccttatgctacaaatcatggataccctgcattccagtctgcaacccttaagaacagtaggctataagatgcactggttagggcaattatcttgcaataccctcgacaaagtttgtcatctcaaaaagatgtaaatatgtttgataggcgtggaaattgaacttgctggtcatggcatactcgttttcttagcagtgtaagttgcttacgttgactttcttccaggtccttcgccatcttgggcgcttccaggaagttcggattgggcaccatcgggtctttatactctcaaagcaggcctgaagatatttcgtttgatttgagttggtgcacattctgtaatccggtagcctccaaaccgtaatattgcaaaatgcatctcacatgtgcttacttgattcagaagatgtctgtgctttcatcagtgatctgcttggcggtgtgttttcatttgtaccggggttatattaggccaaagttcccatgggatgtatatgtgcggttgcaagcttatccatgccgtgcaagctctaatttcctgaatgagtaatgtgagagcatgctgtaatttcagccttttttttttctttttttggagctgtgtgcagagatacctggacgagcgtgatgtttcatagaatagctagtgttgcagattgcagagcatcaagttcttgattgcctgagctacctacatagttatggtaatctttgtttggaagcctgtaccaaggtgtagaggcaacagaaatttgctgccagctctagaaaatgaaagtgagatgtcctttttttttgtgctcatttggcaggctaagctgttacagtatttgctttgaagctaaaattctgaccagtgaactgctttgcattgaattgcgttatgactagcctcatatcccgttggctggccttggtccggtgtcgcctcttccctcttaatgtctcatttaagttatataagcaagattaggtttcgacttcgaagtattagtcaccaattcaccatacatttgtattcctttattagtt

SEQ ID NO: 4171 - DNA, 4740 bp, Sorghum bicolor
tgcaactcgtttccatctgcgcctccctggagggatcggaagtcccacgctgaggcaaccgcgctggtgccccactcgccgtgctgaacttcgcaccagccacgcatgctcgccgcatcccgtgcccgcgacggccagccgcttgccggcgccctgtgcccaggtcagctggctgcccaccacgccgccctccgtgctgggcgtgcacgcgcacggcgctggccacgcgcgtcgccccgccgcccttcgcgatggtggcgtgcgatcgtcgtatcccatgtccgcaacggacgccgctcgccgtgccgaccttctaccacctgcgcacagtcgctgcctcctgtgaccacgacgctggccgctcgctacgccaccatccgcgttgcacacagcgttgcccgcgacctcgccacgccagccgcgcaccttcgtcacgtcgccctccgcgatggcggcgcgtgctcgccgcatcccatgtccgcgacgggcgttgttgacgaaagctagtcggggtatacccacggtagtagtttatcggcagagagatgcgcaagctacaaacttgatggtgacgcaagacacagacaaggatgattttatccaggttcgggcgccgtgtgggcgtaatacctacgtcctgcgtctgattgtattgctgtgtgtcgaattgaattgtctaagggggatcccttgcctctctttatatagtccagagagcagagttacagatctgtaaactaatcctctgatccataacaaaccacacactagggcggatccaacatggaggttgggggttccaagtcccctacccccatgttgccatgaagcctcctctaacttttgttgccatggataaaaaggagcaaggagaaagaagatgaaacacaggagagggagaaagaagacagggaagatgagccctctctctctctctaaaatccatgtgattttgtcgaggaacacttgtcttaaaaattgagtgaatgaaggtataatttgtagatacatattctatactctgtagaatggtatggcatcaaacagatgagcaaaccttgtatatagaagaaactgaactaaatcctaatcaattccactccagactcaaagttgtatccttagaggggtgaaaatactatcgctcatcagaaaatagaagctaaagccaagaactaatatctgtcttttggatatagaaatactcaatatatcttcagttccacatgggtttgttagcttggagccatgagcaatgtgctagggagcataatccagcataaaaaactataaataatttttaaaattatccaaatttttgccctaaataatatgaaaataaaaattataaattccgatttagtcttagaaaatccatagaaaaactattttagcacataatatttggatattttcctaaaagtatgcaactgaaattttctaagctaaaaccatttttccatgaatttcccaagaatagatcaaattttagatttttaattgcatattttacccaaaaacaatttagatagtttttatttttaataattttttaaaatatttctagtttgatttaacttatttaatttttaacttagtctaatttaccctgatgacgttgcgccacaatatcaaaacatcatcaagatcatacaaagtgcaagagcaaacggtttgaaaaacacagagaagtgaaaatattggctttatagtttagagagaaaatcagactaccacaatagttaataaaagagctaaattgaaaaaaaaattccggaaaccaggcctggccaaaatggaggaacctttctagcccaaagtttctctcaaacaaaaacaacggctcgggcgtacacaccgacaacaggctctcaagtacagtactgtactttggcgtccctgggcgaatatctcgagaatgattctgttcccacatcccacctcagaaaagcaagtccaaacccacataaaacaagcccgcccgtctctttcgccaccccaagacgccccacgcctctccttcttctccttccccatccgcccatcgcccgaccccctcctctcccctgcggtctgcgctcccacagcctcacacctgcgctctcgccgatccgcatcgcccgttgttggaaggaacgatggcggagcagaccttcatcatgatcaagcccgacggcgtccagcggggcctggtaataatctcatccgccgcttccttttccccgtttttttcttccatagaagagtctgatagagatagatataggagggagtttgttgatcccggcggcttgatgtctgttttcgggtacatgttttgatttcgtttgggtttccgcgtcatgtttcatgtctggtgcccagtttttaactgccagtttgttgtgcagatcggggacatcatcagtcggttcgagaagaaagggttctatctcaagggtaaggatgtttttttggttctcgaattgtgatctcatactctgtttcatttccaagttatatatatgcattaacttgcctgttgtttaggcaaagatttgatctgcgtgttccggtgaaatcttacatttgtttaatctatctacgttgggttccgttttgtgaaaatagatgttagttatgattgccatctaaaaaagtatattagtcgtgcaagcaggaatattatgctgagatttgatttgattgaaaaccattatctttctgtcactagcccatgattggtcccttttttaatctgggcagctgatggtcatagtaatttggaattaaatgcctgctgttgcgttgtaaagtctaatcatcaattagattgatagactacagatcagcactattgttaaaaaaaaaattgaggatcctaggatatggattccaaaagcagatattcctgcccaccatctgtgcctttcatcatgttttgaacattctctttccatttcagcgtcaaggtaacttttacagcacaacaatataacagaaggcaatcaagccttggcctgtcgttatattggtactgtattatggatgccatagagagaaactattttattgaaaaataatgaagaagctgaacaaaaccttatgggagagactatttagtttagctttcctcatgtttaccatagtggatcttctttgaataatcttataatcaatatgtgctgtgttaatgaattattttgttacttgctatataatgcagggatgaagtttatgaatgtggagaggtccttcgcccagcagcactatgctgacctttctgacaagcccttcttccctgggttggtggagtacatcatttctggccctgttgtggcaatggtgtgggaggggaaggacgttgtattgactggccgcaggatcattggggccaccaggccttgggaggcagcccctggtaccattcgtggggactatgctgtggaagttggcaggtgaacattcctttctttgtaattaattgtactttattgtgacgattttagtagtttaatagctttgctgctatcgaagtccactagtccttgccttggcaattttctggttcaatctaaataaacgtgtggtttatgaatgcaatcaatgtcaatcaaataagatgactcgaataatccttgtgagtgaggatatgctccattttgaaatatctactcaaccactattttgttttttagaaaaaaaaaacagaatatatagaagcaaataacaccagctgcttgtgatgatagatgttttgtttagagtaagaagtattataatctctgacacataacatatcttgcaaaacatagtcttggttgtgtggtcttactaaaaaaatgaaatcatggttgctggaactgtgcatgtttggtcctgtactaaatttgtcacctcttgtgtaggaatgtcatccatggaagtgactccgtggagaacggaaagaaggagatcgctctctggttccctgaaggtgtggccgagtggaagagcaaccttcatccctggatctacgagtcttgagcagttgagcttcgcggtattggatgcctgcttccatgaaaactgagttttgtttgagttatctattggctctggctatagagtcataatttagtgctttgtgctacatctgagttaagtctgccagaacttatgtggcatttgagtttctgtctttgcgcgtggtttaatgtgtactgtgattgtgaaccaactaatgtgatcttaaataaaacatgcatgccaagtttgtgttatatgattgtcaggtcactacgattatacttgctttaagcgcttaaagctcgaggatcctgcctgtggtttgatgcactgtgaatgtcaagcaactgatgtgataataaacaatcctccaatctttttcccccaaattgtagatcggtttgatgcactgttgctcgtcttcattcatttgacacacataaatatatgaggcggccagtcactctggccttgttttcccttgcgcgtattcatgaaacattaaatatagataaaaactaattatacagtttatttctaatttgtgagacgaatcttttaagtctatttaatctataattggacaatatttgtcaaatacaaacaaaagtgctatattaatcattttgcaaaaatttttagaactaaacaaggcctgaatggaaagcgaattgtgaacatacagaacaaaatttcagatagcaagtcgtgcataatagtgtagacggtctagataattaaacgaatcaaaca

SEQ ID NO: 4172 - DNA, 7624 bp, Sorghum bicolor
aaggaggtcttaatagcgagagcgtttcgggtggtcgacgaccgactcacttttcacgtcacgtgcttgacaagttgggccagagctctctgatcctgaattcctgatttttctctttgtgggcggtcggcatcggcaaatggacggggggatccattcatttcctcacggtgagtcggtgatgaagctgaaagcggcatcgattttggccttaattaccgattgctgatactgatactacggccacgtcaacggctacttgtttggcgccaatacgtgcgacggcacgtctcggtaatcatgccagtgcatctctggacagtctgagcgcctgggtgatctaaccgatgagtgtgcctggaaatgagagcaaaacgccgccaggtgcaggtgcttttgggcttttgggagaacgcacgtccttgcttttgggcagtggctttggagtactacaacaacttttcagacgactggactgacgaccagcttgaagatctggacaggatgtagccctaatcgtaggccgctgtgcttacattctcctcgagagcgagaacactcaccgaagccccagcgacacggccattggctgttgccccaccgcgccccggggaacgccacgaattcttcgcctcgagcttgttgcgaaggtcttgtttaggccttgttagtttctaaaatttttggattggataccgtatcactttcatttttatttaataattattatacaattatagagtaactaggttcaaaagatttatatcataagttacaactaaattatacaattagtttttgttttttgtctatatttaatgctttatgcatgtgccgtaagattcgatgtgactgaaaattttaaaaaatttttggtttttggcgtgaactaaacaagaccttagttcaaccaaaatccacctcataccaaatctttagacacaagtattaaatgtagataaaaaataataattatacagtttgactataatttgtgaaacgaatcttttgagcttagctaatctataattgaataataattgtcaaatacaaatgaaagtgttatagtagccaaatttaaattttttcaccaactaaacaaagcctaatcgcacccgatcgaaatggctgcagctgcaagctttgttgtgctggcctctagtctacaggagattattgttccttggttctttgcagctccgcagccacaggtttaccgaacaagccacccagttgatcaaggaagctgacgatgacggaccaaggcacatccaagtgaagaagctgcctccagtgctgtggcgatgtgctcgacgtcgtgctgttgtctttctgttagtcgctctggcacgtttctggcctttactgttgtttttctgaaactctctaaacgctggagtatttccattcctatgcgtaataatggatggaaattggggaccctcgcttataaaaaaaaagggccgaggccgggaagggctgccccccgccaaggttgcccgacccctggacgggcgcgagcgaaatcatcggtctatctttcaaaaaaaaaaaaaaaaaaagcaaaagcaccggtctggacgcgacgacatcgccctgtaaaccacgtggcaacccgtcgcccgcgcgacgccaccacacgtaaaccagaacggcactcacgtcccggcggacggcggccccgtctgcggcgcctaaatttagcggccgccagcggagccaagccagctgatcaaatccactcgctcgcctgcctgccgtttccctccctccctttccactggttgaacggagcggacgaaacctccccctgctgctgtctccgccgcgaaaatagcgagcaggggcagagggagggagggaaacggcaggcaggcgagcgagtggacttcatcagtagatctgccaccgcagacgcgtccgccctccgttcccctcgggcgcgggcgcggctttcacctctccccccgccctgcctcccgctccattttcccacggccatggcctcttcggtggccgccatgccccacgagtccgcctcatggagggacccctcccgtcccaccccgtccaggggcttcttcaacatcctcgtctccacctcctccccggacgccgccgccgccgggggctccgcctcctcctcctcctccgccagcgagcccacgcccaggcgccgccgccaaatcctcgaccgatgggccgccgcggccgccgccgtcacggccagcgccgcgccggagcccgccgaccagccccgccgcgccagggacgcagagctgtccgagctcgcctccgccacgcgccccgtcaccgcgcgcgccgccgtcttccgggagccgtccccggcgccctccgacgcctcctccacggccgccaacgccgccttcgccgccgcgggcgcaaccagcgcgccctccgagctcccgcccgcggggccccgggcctcgtcgctcatccagcgctggcgcgagatcgaggccatcggccccgtcacgccgcgccccggcaccgctgccgccgacccgggagcggcctccgcctccgactccgacaccggctccccgcgcggccgcgtcggatgcatcgtcaagaagctcagcggggcgtcctcgctgcccgaggaggagctcgacgaggtcgccaagtccgagctctcgttctcgcagtccgcgcccccgtcgcccgcccgcatgcgcgacgcctcctcgcagtgcgcgtacccgtacccgtacccgacgggcgcgatcaactgcccccgcccgccgcacctcgtcgtccggacggtgcgcggccgccgcgccatggaggagctcgtcgccgccatggcgcaccgacggaggcgcgaggtcgccgcgctcgccgagaggcacgccgtgtcccgcttcgcgcacaagggcaggatccaggtaacctccacttcttgtcgcgttctgcggtttggatcatcgtctcatgtacttgtcacacttattaatcatcatcactcggatattgttccgtttctcgatccacaaatccttgtttcaaagcgagccaaaatggtgggagctgttcattctgactcccacacatggcgtcggatgagagtttggtggatcggttccttcccaactggcgttgctgatcaatgtcatgtgcgaagtccattatcgtgcttgcattgtttcgtcgggttcgttgacaagtcatcaatatacaataaattgagggctaaacttttttaccgttaaatatttttttttccgaagaaaaaaaatgcacctagtcttatttgcttatttatttgtcagttgggactctggggcaattatatagaaagttccaccaaaagatcctgaaattgtttgcagctacatggacagtacttcactttcacgtttcacagatctgttaggttgtcatttttggaccagaagaaaaaagggagtcaattaagaagatgcaaacttgacattgtattttgcaaaaacacggatgaaatggaggtgtgcatctaagacagcagtgatgggtcagtttacaggttgtgactctgcatatctagtggttgagatgtctggggcgagtaacatctcccgtttgtctggctcttctgtttcgtacacaagctgacatgttattggagatgtgggtgctgcacggttgtggtcaagaggccacatgacttgacaggttcattgctggtatatcatctcatgtacctgaggcaaataaataggagtaatgtcctggtggtttgttaagagcaagtaccatgcaaatttcaacaatccttaatgccattgtcttttaggtttggtttagttgttaccgtacgttcagtcacttggaacccctttggttattctttactccaactcttgccaatagtgatgtgcatggtactggcaccaatgaaagctgaattgctgtaaaaacacaacacaggttcattggcttgtcagcagtgatatgatgtgttgcggacattgccagttttagaagcagcccttgtttgtggatagtattgtgcaagtattttgattgcttgagatccaattgtatatgctgggcacaaacaaacataacaagaatactctgtgtcattattcttttctcaaggacaaaagcattctttccttttcatcaaaaagaatattctttcccctgaggcaaagattggttaaatcatagtgaactattgatgctgtcatttctgatggaataataattgtataaatgttctctcatcatagagcattgtaattttttttcttatatgggagaagctgcacttccattttaccacgctgtgcagtattcaactgtagctgattccagatgctgtttcacatctttgcagtccatgcttcgtctgagattgttacgccagagaggtacagttgaggatgaactgtggagtcaactaaaaccggtgaggccacaccaaccaaaacatgtgggcgagctgaggtattatcacattcatgtctacgagttgagcttccaggaagtttagtggacatgtagagagctagacattagctgattttatttcttcaaatagtgggtgcaggtatgatagcagggacacaaacttacgagaagcaaacaattacagccaacaaaataatgggtaaataattagagtgcattgcttgggtagagcaagttatacttaatttgaaatatttgttggtctatgccttattattgctaaccaatgcctcttgtaaatgttcttttcagcaagtgcaggcctgacgaacacttttgtaatgatagagttccagctgaggaaaagtcaactgatgtatccgctgaaggccttgttgatggttcaggaaatctacagtgtgatgagcagatgaaaaccaagggggatacgtctcagaaagattgtaaaaacttttgtgttcatagtcagaactattctgaagcatcaaactttgcaaggtatggtgagcatagtactatcgatgagaatcagtttgtggaagatatctccccaagcaccacaagcacgttgcatgaactagaaaccccatcatctagaggagataatctacgcgaagaagacaaccaaagcataaatggttcctgggaagagagaggattatggataagtagcctaggttggcctgcaccaatagacactatgagtccggatagctggcatcaggatacaatgggtgatattgagaatcataataatcagattcaattcaatgatcgcccctggatagactccccaaactcatggagatcactatgtgttgtcacgcaatctgactatcgtgctttgtcacgcaatgctgacatttgcaaccttctcgagaggtaaattggtcccagtctaactgttttgcatattgcttttgcaaaatcagatgcatttaatcacacattatccccacattggtgacagcagtgggattcatacgggccattctacttttgttagtttggcattcatctcaaaactaccagttagcaatagtagctttatatagctagtttctgaagttcaaacatcaaaataattttgccaccttgttaaaaatggttatcatactgttcaaatgattttgcatgtgcttgacttatatttttacaggcttaactgaatcaattcatgctatctctttcatttcctgcagcaaaaaggtctcaaagtctcttgagagtgacttcagcaataaaatgaaccagctgttgcttacagctctgcaaaaacaaaggcaacaacagatgatggatgattttggaggatactatgatgaacgcatgtactggagacaaaatgatgaaattcatgatgctgataaggaggcatctgctccatgttcattagctcctgtctcacatcttggagctcatcagcaagagagctggcagcattcttcatttggaagtcaacatcacgataatcaaaatttacttgtaagtgagttgctgcttaatgtcaactgtggaaagttatattcttaccatattctctatcctaggaaatggaagtcagggtaaggggtgaaatgtcccagattcatcatgaaatatatgaactgcggaagttggtggaaagttgtattgcatcccaagtaaagatgcagcactccattaaagaagaggtgtgcagtgcacttcgtgaggcaggtgagttgtgccacattttttttttaagtttgtgttttctatacgcaacaaagaaaaaatagcactctattaaagaaacctagtttccatatagaataggaactgctcctatctctttgcaaaaagaaagaaatatagaatatggtaactatcacgcatagcctcagtgtgaaatgttacaattggctttcaaggccacactctgctcttttctgagctgccagagaaagtgagctaggttgtcttaaaagtccagtcagctgaggtctcaagaaagaagggcatagctatgtttggggaaacaatagagggaaggagctgtttaagtctttgaagcaagactatgtgctgcagtcttgttgcttagatcttggcctggaccagcctactgctgcatatcttcaatgcttcgtatggtacttttggtccagtttgatgaattaactgattgtgcaatgaagtctgtgaacaaccatatgaactttgtttggttatttgctagtgccccaccatccattactaccatcttgactgtattttatttgtaatcattgatgcacatcttcatgcttttttctgatgccatttcgtgaacaggtttgatgccaagccaacccgacacaacagcagcaaaaaggggtgattgctgcatctgccatcgaatgcaagttgactctctactttacaggtaatgatttgcagggatagatcatctcgtactttgagtaactttaatcaagaagtcatatcttattcttgttatgattcgtaacatctttatccacacgaacctcagacctaataatagtctgaagtgcacaaattggtgtgtgaagtgcttctaaccgcgttccttatgatgcatcaggtgtgggcatgtgtgcacctgttttgactgtgccgatcagctgaaaatgagcggcaggagttgcccaatctgtcaatctcctattgatgatgttgttcgggcgcagctgaatttttgagcttaggatttaggaaaaggccaagagaaaagagccggcactcccagatttagatgtggagtttgcgaagccctggttttgaggaggcttcttaccttttgataaccaccactaaagatatacgagctagttcttggagaaatgtaaatatgtcttttttgctcaagagcggtgtgcttgtatttccctaaaagaaaacagagttctaatcataatgctgatcctgtttctgatggttcttggttgtattctgtatgtatcacagtatttgttcacagcgagaatgtagtgattctgtttgcgcacaggattgaactcacggcctggatacaagtcatttcggcctatttgaacaaagccgttgctgctgaatctgcctcgctggactggcatttagttcaaataaacgtgaaactttgaattcagatttagcatgcaggaatagcaagtacttcaaaagttttgaaaaatgaacatggaatcgctggacagagttggga

SEQ ID NO: 4173 - DNA, 7871 bp, Sorghum bicolor
ccttgctagcaccaccctgcccaacgcagcagcaggcctcaacagcagtagcagaaagagacctaggcgctaggcggtagctggcaacaggcatgctattgggctggcaccacgccgaatgagagcgagcgagcgactgccggtgaacgatttactttcaccctttttagtagtaggatgcttcatgtattcatctaaagacttaatgtgacgagaatcttgaaaatttttgaaaactaaacgaagcctttgtcgtgtttagcttcggcccaggcacgggcgcatctcgttactaccctgtcggccttcccgcatctcatttttttgctgtcgcgcccttgcgttgccgttgctgcgctacagattctgggttaggcaccggtctgtcctccgcaaagtcatgaggcgcacgacactgcacgaccgacgactgattgggcgcgcaatccgcgcattactcgccataacagccggctgttagggccgccgatgacgcggtccggcacagggcagagggcccagccagcagccacccgcgcccgcgaccgcgaggcaccgaaactgctcgcctgttcgtcagctactcagctcaggtccgccccgcagctgtcgttccctttcattcggtcttgtgttgcggcctcaggccttgtttagttctgaaaaaaattcggatttcgctactgtagcattttcgtttttatttgataaatattgtccaatcatgaactaactaggattaaaagattcgtctcgcaatttacagacaaactgtgtaattagtttttgtttttgtttatatttaatgcttcgtgcatgtgccgcaagatttgatgtgacgaagaatcttgaaaacattttggattttgaggtgaactaaggccttgtttagtttccaaaatttttcaagatttcccgtcacatcgaatcttgcggcacatgtatgaaacattaaatatagataaaaacaaaaactaattacacagttttgctgaaaatcgcgagacgaatcttttgaccctagttagtctacgattagacaatatttgccacaaacaaacgaaagtgttactgtagcgaaatccaaaaatttcacgaactaaaccaggcctaaacaaggcctgggctcgcgtcgcgtcgcgtcgcacgtgaccttgagtcacgttgccgatccgtcagctccttgcccggctgtccccctctctcgcccgttcgcacgtgacccaccgaaaccagctttggcagctacggcgtccggctagattcgggcatttcttttagtaaataatgcaaaaaagagttttttattattatttggaacgcaaagctttttccaaaatcggcttactaatccaatcgaatgccgcctaaacttgttctgagtttagcttaaatcctgaccccacatcctggcactttcgtcattatttttgtgttaaaatcagggtaggagtgggacattcattctcacaactaggaaaatcagtgcagttcttttcaaatcctcgagggtggctcgtgagtcgtcatcactcatcaagatccaggaacaacgtgagctgctccactattctacaactctagagcccctgcgcggctgcgaccaaaataaaagaaaagaaaaaaatcctgcgaccacatcatcgtctcctgcctccattactactgtcataaaagcaaccaccttagcaccgcctaatcgccattgctctactcaattctgctctcaaatccagacagctcattttcggtttttaaagcctttttttttctaacggaacaggaaggagcaaggcgccgttgagaaaacacggggggccttccttcctcagatttgtaccgagatggagcttcttccgtaatccgtgcgaattttcagcgtgctgtaaaataaactctccaggcaaaagccttgtcttgtccaaagccagaggaaaagactcgtacttggagagccagtgaaaggaagaggaaagagcgcaagtgcgacggaggcgcaaatgcggtggagatcccctgccgtgctgcacctgctgcggctgtggctgctcgccgcctccgcgtcgtcggctgcccttggtgttcttgcgtctgatcttagcaaaggtgagctctcttgcttgcgtctagtagcttgagatttggcccccatgctgaaaatcttgctaaatgtggcacggtggcagccaggtccttgcatttgcgctggcggtagcgaaatctggtactttctagccaatttttgtgtttattttgcttgcttgctttttttcttcttatacatcgtaatccagcagcgctaggttcctccagttcctcgctcaagaaaaggaagaaagagaagccccccttagttcttgagttttcgttcattggtgtttgcattcttggtcaaattcgttgttgtttggacccagcctggaaccatgtttgtttagctataggtctatttctgtggcgtgtaccagatgaagaactgagccttatccattttgagaaactttcgtgtccattcagctaatactggtagcttcttggctacttgcaagtagtacagtacagtttctgccctttctgggtgacatgtgcatacatttgacaattttgccatctttaagataaaagtttgctcaggctaggacgaaataggaaggaggcatgtgaacctaaatatagtgaacaaaaggaaacacagaagccttccattcagtatcctagacattcctgattcaaaggaacacttgctgtgtatataacttacacgttacatctgtttacagcagctgtttggtttaatttccatgtcctgtagttcctaatgcatgtttattttcagaaccttttaccatccgtataagctgtggaagtttcgatgatatccggacggcgcctacaaacacattgtggtacagagactttggttatactggaggcaggtttgcaaatgccactcgtccaagctttatcattcctcccctgaaaacgcttcgatatttcccgctatctgatggccctgaaaattgctacaacatcaacaatgttcccaacggccactatcaagttaggcttttctttgcgttactggacaaccctaatcttgacagcgagccgattttcgatgtttctgttgagggtactctgttcagttctttgcttttgggctggagcagcgacgatgagaagacatttgcagaagctttggtttttgtccaggactcaagcttatcagtttgcttccatagcacaggtcatggtgatccgtcaattctttctattgaagttctacaaatagatgacaatgcctataactttggcccaccatggggaaagggggcagtgcttagaacagccaaaaggttgaaatgtggctctggaaagcctgcctttgatgaagatcttaatgggattcgctggggtggggacagattttggttaggattgcaaactttatcatccagttctgatgatcaatcgatatcaactgagaatgttatagcagagacattgctcgcaccaaatttttaccctcaaagcatatatcaatcagctatcgtgggcactgataggcaaccgagtttgtcttttgaaatggatgttactccgaataagaactattcagtatggcttcattttgcagagattgataatggggtaactgcagaagaacaaagagtatttgatgtactcatcaatggagacactgcttttaaggatgtagatataattcgcatgacaggagagcgttttactgcacttgtcctgaataaaactgttgctgtcagtggaacaacgctaaaagtcatcttgcaacctgtgaaaggaacccgtgctattattaatgccattgaggtgtttgagataatcccagctgaaaagaagactttgcctcaggaaggttgttattcaaattctccatactcgctactttaattttcttttaggtgtaccaaaattgagtaaagtttcaagcctcttttgtttagaatctcgcaaaggatcatctagcagtgcattaatgttggaggcaattaaaagaagatttaatgatgcatggggatagttgataaaatgtacaactgaagaaaaatgctttagttgagtctgaatgagtagcacaactatggattcttatttttcatagaacaataattcacacgagtgctacaaggaactggctattggttttatgctttaattgtcttgttttcaatgacctacagtgagtgcattgcgaacgttgaagggttcacttggtcttcctcttcgacttggctggaatggtgatccctgtgttcctcagcagcatccatggagtggagttgattgccagtttgataacaccaaagggaattggatcattgatggattgtacgttctctagatcatgctcattctatgattcacatcacgagggattgatatttttatgattaccatgccagaagtgatgtaacagattttgtttattgatcatttgaaactaagataaacctctgcccaaatttgctagtatatgtttagataaaaacatagcaatattactattatactatctacttatttatttgaagcataaaaattaaatgtagcagatgcattccagtaacgtcaaactagtacaaatggaaaattgaacgaataaaacagtctctaactgaacttccaaattttccatgagctgacaccagctgacatcctatattttctgttctgaagtattcccaaatggaagttgaatcaagtattttagtggcttgaggcttacaacatctttttttgatcccgaggcttacaagatcttgctcctcgtcttgttgcataatgcatttaaaactgtcaggcttgcttaaaaggtcacagagtttttttcttagctcttgttgtatgtcatatttatgggcctaaccataatgtttttgcttactgttatatgcattaggatttcaaaattattagtcaatggtagttcatacttttttgctgcatgtttttaatactactccttgaatgtgcagaggtcttgacaaccaaggtttaaaaggggtcatacctagtgacatatctaagctgcaacatctgcaaaacatgtgagtttctttatagaacactggcatgaatgactgaccacttgatattattctgtttatcaatagttttcattatctgttacagtgaaaagcctgtaacattttcacaacaataactggaattattatttttaaatatgtgtatcttattaaacctgtgcaacataaaagaccactggaaacgggctgaagcatcaagaatcagcgtaatgctgctctgtaattgctccatgtcatctggaagtagatgatgcagaattttttagtgttcaactatgtttttatgcacaatacatgaaaacagctaatatggccatcacatatttaacatgctttcgatagttttaattatgggactgattttatggcatatgctgatatagtaataataaaaaactgcaaaccccttgcagcacagagtttaagctcttaagaatatcagttgctggccagaactggttgggttatggttcatggtgacatggctaagtagaatatagagtaatccattattgtttaagaagttaaatccgactgcagattgaagtagtcatttagagttcttactgtcataactcacaaggaagtgctagcacttctggttattctgacagaagtaactgcctatcttgtgaaacagaaacttgagtggcaatagcataaagggtaacattccaatctccctgggtaccatctctgcactgcaagtactgtaagtgcacttcagtgtatctgttatatatttctgttctttcaaggacgtcctaatacgtatatgattttctgatgaaattaagcaaaaatttcgtaaatggtactccatatttattaagttcccagctggttaatttgcaataccaattgaacttggataggcgattgttgggaaaatttatttatttgtctgaatatttgcccttaatagctggatatagaacatcagaagcggtggttgcagttattgtatcttgcatcatcatatcaaaattgctagtgtccttgatacttcatatttgtagtgacttttcagtctgcttatcacttttctcagtgcacatggagctaatctttttaaatgcatcttgtgacacattacaagtaggaaatcaattgctgttttagttggaggattcagctcatgtaattagcatgtcaatactattttggttttccttcttttaaattgtcttctaggaaatatgtttggtcacttatatttgacaaatagttttaaattttcttcacagggatctgtcatacaatgagcttaatggatctattccagagagcctaggcgagctggcattgttacagatactgttagtgcactagttactctgttttaggttggccttttcacatttgtttttccttccccaaaacctaagactaatagaagttctgctatgcaggaatctgaatggcaatcgtctttctggtcgtgttccagccagtttgggaggaaggcctctgcacagagctagatttaagtgagaaatgacttgatttgtaaaatttctcttccctttttcacggtaaggaacataatgattgctgtgacaaaactgcagcttcacggacaatgctggattatgtggaattcctgggttacgtgagtgtggccctcatctatccgtggctgcgaagattggcatggcttttggtgtgcttttagccattctgttcctagttgtattcgctgcgtgctggtggaagagacggcaaaacattctccgtgctaaaagattagctgcaggtaaaaaatgtgaacagtcgtccaatgaaaaaaaacattacaaaggtttgtgttgtaacggatttacatttgaccattgcagcaagggaagctccttatgcaaaatcaaggacccagttcacccgggacgtgcaaatgaccaagcatcaacgcacacatgaaagtgttcggagcagcaacaatgaaagctcaccgcatctgctttcctagctcggcaaaagactgcaacggtgacttggcttccatccataattcagttctttgtatgctcctccgtaggcttgaaacacgaagctgtacatactagctaggtcattaatgttgtatatacttgtatttttggtgacctagaactcaggagaggcatcagtctatcagataggagaaattacccattccatcctacttactgttctgactactgctgttgaattctccttcactgttcaagtatgcttattgtcagttttgtactcggtggtctgaagttctgcaaaactgctttttaccagaaggtggagccccttttcctaatagattaagtttttggattaaactaattggtgcatgcaactcaatattgttcagagatcttgaggtttgaatcctgactcttatcaggagtgttgaaatataaagtgaattgtccacctttttctatccgtttaaactttttggccggtgcatgcaactcaatatgctgaatctaatatccagttcatcctatctgcaatgttgaagcaaatagtagtttttttagctctacatggtgatctactgataaatggctttatggaaatgtgatcaagacggcacataactgcagtatggaatagcttcacagatgttgagaacaaatgtcttttgtggattaaaaaacccccccgcagaaatcacgcagaagcaaaagtgaatacaggcattgctgccagtgccagtagcatgagccttctgcatataccttctgcaaacacgcattatacacatatcataatatattgtagtaaaatcagctgggcaggcgtcgc

SEQ ID NO: 4174 - DNA, 6824 bp, Sorghum bicolor
gccagatggtcccaaccacctgttatttcatttgttgtgttcatggtgaataacatatttcctgccccttttccggtgtaactgccaccaccatacatgtatgacatctcatgaacattgtagacatatccaaaatttaccagttgacaatacttgaagcttggtgaattgtttcaccagagttcagttatattatgtttctttgtacttcaaagctttaaaggacaggtaagaacattctatccgtgcaaaacataatctggggaacatcacggcaattgtgcacgcaactcttggtgaagcttgaacgatatggagctcacttctaaagtaaatttgatctcacacctaaagtactagcacgtttgggtttgtaccgcatcaggatagctctggctggtgactgctcaaggatcaatttgcagcgaagcaagggaaaacacggctggaatctcaaaacggcattgtttttgagatgtttggatgggagtgttaaagtttaataggtacttcctccatcctaaattgtaagtcattttaagaattttggaaagtcaaacttttttaagtttgatcaaatttatataataaaataattattattatgataccaattaagtatcattagattcttccttaattatatttttatagtatactcactttacgttataaatcttagtatttctcactataattttggtcaaacgtaaaaatgctttgactctccaaaattcttggaatgacttacaatttgggataaagggagtattgtagtatttcgtcttatttgataattagtgttcaatcatggactaattaggtttaaaagatttgtctcacaaattactgtctagctgtgtttttagttttgtaaatagtctatatttaatactttaggcatatgtttaaatattttaaacattcaatatgatggacgataaattttactgaaagcaacgaaacgaggccttagcaaattcgtcctgaaaacctaccgacgcttgctcgaaatgagtctcatcgacacaagcagacgatgatgtgccgcatcctagttaggccagctaaggcatcctatcatgccatggagacgagagaaatgttgaaaaagtaagatagaataagataaaaagttagatttccttcaatcggcgtggggtggacttatccatgagaggggctacaactctttcaaaatctaagatttttttttgaactagttttaagctaacaaaattgtaatggccaattttcacggttgtaggtctctgaggcacaattctctcatacgaattctaaattagacatttgacagttaattttgtcaataaacaatttgactgattttgggaaacagggcatcctagattaatcggtattagatattttttgttgttgttggtatgtggttcctggattggtcgaaagttccatgatagttgatccattgatcggccgtggacattctgtgctaacttggaggctggcaaggcatcaagagcggcaatgtgttgtcagacgcgcggctggctggacggtggcttaacgagttgacgtcttttgacacatcctagacctctccgtgatctgccagcaaatctatgtaccagtaccgttaacccccccggggcccacccacagcctcgcccgggaaatagccgttgcgcgcagcgggcgcgggcgcgtccgggcgtgagcccacggcccacacccacccaccagggcaactcctctatgaagcctggcctggcacagtgttcaaacctcccgaccgttggagcccccctaccccctatgcccacccccaacgttcttctcccgatcggctccacctgatccatcatcccccgccgacgtttccttcttcttctgcttcattcactccttaccgcttcaggaggccgccgcatagttagagagagagagagagagagagagagagagagccctaggcgtctgatcccccaagccctaggcgtaggattccacgtccatccatggcgctggacacggggacggtggcggcggcggcggggatcgacgaggcgtacgagttctccgcgcccaggttcttcgacttcatcaccgaggagacggaggatgacgtacgcgccgccgagagctggttcgaggctgcccgcagccacgccccctcgcgtacgtaccctcgcgccgccgaggccttcttcctcgtcgatcgccctccctccttccctcccagttccgcctccgcttcagcccttatttccctcgctgaatttttccttatttttttccccatattcccgattccagcgttcaaccacaggatcaaggaaacgagggcggaggccaaggtcgcggtcctctgcgatttcgcggaagccgaggagccggctccggaggtaaacaaacggaaggggattgctctagttcctaattcctagttccgccctgattttgtctgttccgcctcgtttgtctcgtctggcgatttatgcgtttgtaaattgtgcaggaggtgcccgtggaggcggtagcaggaagcgtcaccgttcacggagcagaggctattgatgggtaagcacaccggacacatcccctactaaagttcatctgagttcatcatggtggcaagttaggcaagtttgtgtgccatatgttttggtcagtgctccgtgtcctgaggcaatgtcggaatcgccgccggctgatgaaatgtcggggtcacctccgactcaagaagagaaagatgaaccgtcccaatctctcgagttcttctcggcgacggaccagactcaacaagagaaagatgaatcgccccaatctttcgagttcttctcggcgacggaccagtctgtaaaacgtgagttgctatttgctaactcaactctgttatttgattacttcgggtggaaaattgtggtgtcttagttctgacttcgacactaccatgactttagcagcagatggtggtgctgccagcacgcctaagatgcagacgcgtcctccttcccctcctatcaaagttgcctctgcgatttcgacatgtgacagttcttcagtgaatactggggggcgcacgccgaagacggaggcaaacatgggcagagcaggtcctatggctgcttcaacgactgccaagaggagcgtgagcaagtaagattcaagctcatctgtgcatattgaaaaatcttaagattgtttccgttgtctgagttgttggcttttcaggggtgctcgtgatttggggactggaaaggcagccagtgctggtgctgaaatttcacaagaaaaccaagcggtgaaaaggcagaagcttgatgatggaagagccagacaggtaagggaatgagaatagagacaaacttgtagattcatgtcactgttgtgttgtaatttttctttttcgttgctcttgtgctcagatactgaatgtcaagactaaggtgctgcctcataagggaagagctcagttagctggaagcaatgaggtgaggaggtcccgtgaggatatgagctctgtgaaggtaaaaattcctttcctgctactaaggaagtattccagtttagtggggattggatagagataaaattgaagatgcagtgttactgatgtgaatcctgtggttcttttaggaagcacttccatatgtatcagctgctgaattggttaagaagtttgaatcagggactagaaagctgagcattactcacagcagatctcgttctcatgtaagtattcatttcccatatcagttgtacattagcttgtcattattacattattgcaactccatttcaccgctcacgtgcctatgaggattaccaacatgcatatatttattacaactcgaatactgaatcagtaaaacagtcttgaatcttgataaataattaagtggcttgacatccaaaatgcttatgcgttatgcaggaggatgctgcattacagggaaggcctaagctgcttatgttaactagaccgaaggatcctgagtttcaaacttcccacagagtacgagcagtcaaggtgaagagctctgcagagctagaggaggaaatgttggcaaagatccccaagttcagggcacggccattcaacaaaaaggtgtgaatttgcttacatgaaagaagactttcttactttaactgcatgctgactagttgcttcatttttccttaagattgctgaggccccgtcgttccctccacttccaaggaaagccccacaggtccccgaattcaatgtgcgtattctatcatagtggcaaattcatgaatggaagactctttttattgattaattcatttatgtctttgcatcaactacaggaattccatcttaaaacaatggagagagcaactcgatatgcagacacctgttcagaagtttcttgtgcagatactgtccgggtaagttcctagttgcctagctgctacatcttaggatgctagttattattaattttttagctacaaagttcaatgtttcaatcttgcagagtcaaaataagccactgaaattgaaggaaccaaagccaccacaacttcatacagcaatgagagttcggccaccaaggtttgcttttgccacacaaaattgatgaactaaagtcgttttagcagacatcagtcttttttttttttttttttgctagattctaacatcatctttcaacagtgtgaagagttctcaggaacttgaactggaggagctggagaaggcccccaagttcaaggccagaccactaaacaaaaaggtactagcacttgtcatagataaacataaatttgattagagcttcacttttgggcctcatgtcttgcagattcttgagagcaagggagaaattggtttgcctcctaatccaaagtctcaggtcacagctcccaaggagttccatttctctaccgatgttcgcttgggccctccatcagttgctgacttatttgacaaggtatttatcgatagccatacggtagtataataaccactatattgttttttggtcaaaatcttattaagcgctttcctattttgcagctgtctcttcactctgaatgttcttcgaacagcaacaggcaagatgtgcccagatgcaccataccaaaccctttcaatttacaaacagaggttcgtgagatgtgttttttttttttttgagtcatagcatttctcatcatgtttgtgcaacagaataattatacatcccttgttgcaggaaagaggtcatttgaaagagaggcagctagaagcacagctcttgcaaaagaagatggaggaggaaaaggccagggttcacagagctaatccttatccatacaccacagactatccgatcgtatgtgaaaattttactctgaacattttcagctggcaccattcttgattcatcccgtctaacacaaatccttgttcagatgccaccgaaacctgaaccgaagccctgtacaagaccagaaggctttcaactagagagtttggtgagacatgaactagagcagcaaaggctgatggaagaacggcagagaacggagagggaagaggctcagaggagaatcgtcaaagctcaacctgtactgaaagagtgagtaacacatgcagccatttcccgtaagaatacgtccttttttgtgaacgaggtgtataaaacagccttttgtaatcttgtcacagggatcccatcccacttccggagaaagagcggaagcctctcactgaagttcaacaatttgtgttgcatgttgatgagagggcagtacagagatcagaatttgatagcatggtcagtaagctttcccctctgcttttcttcattggtactctcgcactcgctagagcatgctattcatttattttggttgacaccttgtggtagataaaatgttcatttattttgtgtgcgatgcagataaaagagaaagaaaagaattacaaaagattgagagaggagaacgaattcgcgcaaaaggtacaaatatctcccctgctccttgaatgctccgctccaaatgttgcacgcattctttttacacctgctcctgctgatcgaccgacgcaatctctgtgtctgaagattgaggaggagaaggcactgaagcagttgaggagaaccatggtgccacatgcccggccgctccccaagtttgacagaccattccgaccacagaagtgagtacagcaaaacttcctcttccccagtgtccagccttctcgatctcatctcacagattggcgatttctgtcctcacagatcgacgaagcaggtgaccagaccaaagtctccgcagcttcaggtggatgagcgaggggcaaggaggcacgctctcatcagatgatcaccaccatcctcccctccagatctctccgccgctgtactacactgatcgagttattttctttgctttgggcggtcaagatcattcccgatcttgccgtcgatctgtttgtcgggttactatgattctttctctgctgacccatgtgtgtagtctagagcaggccagggccctaataacagcaatctttgtcagtccaacacagctgacacggtgtgtgcccagatagataggatcggcgatcgccgctagtgtgcgttaggttggtttgtgtgtgtgcgtgtgtagtgtgtgtttgtgtattatgattatctcgattatgacacttgttaatcacttaatccgatgatgataccttcatatactgtgtggtgtgcggtggtaggcccttgcttctatggatggagagccatccaagagattcgttctcctgctggcatatggaacgcacgaactcagaacaaattgtcaccctgacctgacctgaacaaagcgccgcc

SEQ ID NO: 4175 - DNA, 4882 bp, Sorghum bicolor
gcaaatggaaagttttctattttagtaaaaaaaatcgctacttttcttttttgaaaagttgtactcataacttttacgtataacttatggaacaaacttttacgtataactcatatacatgactttaacatataccttcactgtgacaaagttatacacataaaagcatctccgaaggctttggcacagaatataagttaccagaaaggttaataactgcaagttaagcacaaaatataataaaccaaatagcttatgtgcaaaaagttagacataaaagataatacttataagttaatatctactagttacatgtagaaagttagatataaaagttgcgtacagaacgttagacataaaagttacatgcagaaagttaataattacaaattatatggtaaaaatttacatctagcattttaaaataaatgttttactttttttatgacatcagcggttatggaaaagcacgctagaaggggaggtagtttgaacctttgttacatcaaatctaagtgaacgatcgcctaaataaaataagggttgacagcatatataaaaagaaaaaattgatagactaatataaaataaaaagagaaaaaaaccaaaagaaaattttaaaaaatgttttataacttttgtgtttcaaagttttagcaaaagttgtaagttatatggtataagtcatatggtgataagttttgcaaagtgttataccaagttgttagtataaattgtagaaataagttatgttctataacatatatgtataacttagttaccttctaaaaatagaaagttgtggaaattatcatttccaaataaggaaagttgcaggagtagctgatggttcgctgtattcgttaccagtgaacgatcgtggaattagatttgggctaaaccgcatatctacttctgccaaaaggagctttcattgtagtacaaattcaaaagcatatttccctctgctttcaattgttttgggggcaaaaaaattacccaccagctattagttttgttcttttatttttatcgacctttctctcccatcagccgcgactcgcgatcgagcacatgcgccgtcgccgctcgtcctcatcgtcaaggaaataaatgggcccaatggatggttagggtctagaagttgatttattcgtggacaaaatttttagtctagatctactgaagggaatattcacattcaactatccatacacctattagttaggatcgaaacaccccaaactagtcgttagctaagctaaactagaagggatccaaagatagactcatttaaagttgaaagttagttcaggtgtcataataaacagagattgctggaagcagtttacaagtggagtctatctcagacccaaccgagaaaaaggccaaagccaagtaaagtggcaccttttgattttgctgtttacacttccaacgttttaactggtttgttgtcccagactcccactgcctccttaatttgggctctgtatttctcaacctgcaactcctgtaggccatagctttccaaattccaacagctttggtcaatgcctatctccataacaacaaagaaattaacaaagatgatcacaacgtgcgttctgaacgctattagcactttgcttttgatcgtagaccccgaattgacacggcttgtgaacctgtggtgcccaaccgccgaacaggtttcccgtttccataccaaaccaactgcatgtccccttccctcccgctgcgtcggcacaccacgtcccggcaaattgcggcgtttatctcagacgacaactccaactacgcaaggtccgtcggtgatccagcagtcgccttggtcaacaagagctggcggcagctctttatttctgaagacggtgaatctgatcgtcctgactcctgtatggagttctggaggacttgtgcactttcccttcttccacacaagagcacgatcgagttcgtttccttgctaatattgccactactgcgctggttcggcaatggaggcagtgaagcgcgtctgctcgctgtcccagccaccgctggccaccttcttcttcctcgccgtggctgccttcgcggccagagacaccatcctcccaggcgagggcatctccgggaaccagactcttgtttcccggaacggcgtgttcgagctggggttcttctccccggggacggacatataccacttcttgggcgtgcggatcctgaacatgccgacgaacgccggcaccccgaaattctggttcggggaccgggtctacatctccgacctccccagcgcggcgctgcagctcttcggcgatcgcctgtacatcaccgagaacggcactaacctctggtggtcaagcgtggcgggcgccggcggcggccccgcggcgccgacggcatccgtcgtcgcggtcctcctcgacagcggcaacctcgtggtgcgggaccaggccaactcgtcgcgggtcctgtggcagagcttcgactaccccggcgacgcgctgctccccggcgcgaggctcgggctcgacggggacaccgggaacaacgtctcgctgacgtacaccaacaccaactcgtggcacaacagcagcctcagcgtcgatccggaccgccgcaggaggaacgggttcgtgctcgccaccgacggctgggacgtcctccgggggaccttcccggaatggatggtgtcttctcaaggaaacggcagctcgctggtgctgctcaataatcgtccgggcgcaggcatggcggagcacttgcagctccatctggggcaagtgagcctacggagctggtcgagttctgctggctgctgggtggccagttggaccttcccttccgactgcaaatccagcgccttcttctgcggccgtttcggcgcctgcacgagcaacggcacgtgtggctgcgtcgacggattcgagcctgcaaacccatcagagtggcagcgtggatactttgtgaacggttgctcgaggtctctgccactgagctgcacggcagacaatggcggccgcctgacggcggaacacgatgactcgtttgtccttctagacaacctgcaagggctcccttacagctcccagaacgccacggcagagggtgacgaaggttgcagacaagcctgtctgagcaaatgctactgcgtcgcgtacgcgtatgacgacgacgacgactctgggtgcaagctatggttcaactacctgtacaacgtgagcttcgctgctacacctccgtacagcaaggtttatgttcgtttgggttcgaagctcatggctcaaaaagcttcgaaaacagtagggatcgtgttcatggttgtcggactgacagcagcagtttgtgtgatactgatactggcgcttctatggagatacaggggaggttttttgtctactactgcttgcagaaagttccaagaagtggaaggaggctctcttgctgtctacacatatgcacaggtcaggagagcaacgaggaatttctccgacgagcacaagctcggcgagggaggtttcggctgtgttttcaggggaacaatgccgggaccaaccgtcgtcgccgtgaagcgtctgaaaggctttgggcaagcagacaagcagttcagagctgaagtgcagacgctcggagtgattcggcacacgaacatcgtccctctcttgggattctgcgtcacagggagcaggaggctgcttgtgtaccagtacatggacaatggctccttgggtgcacacctcttcccggaaaacaaaccatgtctactgaactgggatcttcggtaccggattgcgcatggcatcgccaagggcctagcctacctccacgaggaatgcgaagactgcatcatacactgtgatatcaagccagaaaacatactcctcgacgcggaattccgcgtgaagatcgcggacttcggcatggcaaagcttcttggacgggagttcagctctgcactgaccacgatccgaggaaccatgggatatcttgcgccggagtgggtgtctggacagcctatcaccaagaaagcagatgtctatagctttggcatcgtgctgctggagataatctcggggagaaggactatcaggagactgaaatttgggagccatcggtatttccctcattatgctgctgcccagctgaatgaaggaaatgtgatgagcttgctggatcgtaggctgggaggaaatgccagtgtcgaggagcttgatgtcacctgtagagttgcctgttggtgcatccaggacgaggaggatgacaggccatcgatggcccaagttgttcgtatgctggaaggtgttttagacactggaattcctccggttccgtcttccttcatgaaccttattgagggtgagagcagcagtacatcttcggaagaaggctaatattttctttactgtatatgggtacaattgattaagatatggtccatgtttaggcgctgattttttttttctgttataatatttgaccatgcgtggaaatttcaattatttttcttggtttatttactagctaggtattaatagcttaatctgttcagaccattgtcaacaaggatgaagggattgcagtatgtaatagtccactaacctacactcgttacaaagggacataattattaggagttcatgattatgaaatcaaaaaattttaaacctattctatcatcatcatcacatagtaaacgagcaaagaaattaagaataatcttatggcaaaaattacacttataggaatcttacacgttcctgcggagcatccaagtttccctttctacacgccggtgttttcttcaaacaagccatgagcatggcggcgtagctgtcagggcgcatagaagcaaagagcacataacttagcatcacgtggccatggacctcga

SEQ ID NO: 4176 - DNA, 11367 bp, Sorghum bicolor
catcgtctcgccctatactgaaagatgattgttcactttactgaaaagccacggctaaaaatattgtttgttgatttgttgtaagagaaaaacactatccgttcgctgaaaaatatggcttaaacttgataagtcaatcagtaaggcaaccctactttgaaagagaacatacactatatagtacatgaatgcaatggctattgttattctcataggagatatcattacctaactatcaacacatgctccgtctagcaatctcttcgttgttgttcgaaaaaaggaaaaatatataataagacattccagtaatcaaattggtgtccaagaccaagatggcactatatactcatttggtatgcctggtcttaggttagggtcaacccacctatctagggatctcagatcttctcatgagaaaacttatgaatgaacaatcacataatgagaaaacataagatcagattgttgtgcggtgagatgagtaaggaaacatacttgcggtgtgatcgatgtgaaagatagaaaagggatggtcatgatgccgtgatggaggatatactatgtgattgggtacgcgggtgggtaaaggaattcttaggcttttatttgggccaggtatcatttttgtgtgttgctacagaatagttaaactttattttaaaattacactgaccgcataataaaataacaatactataaaattaaatatcaacattataccgcacgtgtgctggaaggaggaccgtaggggaagaacacgattgatcgcgtgactgacagcggtgtaaggaaagagcgtgtcaagatgggcaaggtagcgtcatcaaggcagcgtgggctgggcatcgatcgcggggaggactccacgactttccttctatgagcgttcacgcgcagggcgtcgatcgtggaatcacatggtgaaagcggactgctaccaggttgagggttggatgtgggagcgtgattgacctgcttttctttgtcaaatcgcatgagacttgcagctttcctttacggacatgggattgcatgggccaacacgaaggtgaggtgaaattttattgcaacaaaatagtctcttatttgtaatctttttagttgtgagagattgtgagagatgagagatagtgtgtatccgattcaatccacgtgggttaaggtccgtatataaacatccaatcaagccatcaggtgagaaaacatgggtcgacaaaaaaattgtcaaacagtttgagatagttttggatgtgggctttttgtccatccgttggtagatttcaaacaaatatgattagttacttcaaactttcgagacacattcaagagacaagataaagagatggatagaaaatcttagagcagatgacacaaaatatttgctgttagagaaaaacaccattaaaaggaagacaaaaacaaggcggactcatttgttttttatagcgtagataataaatagatagaagtagataatgcttcatcaccaacgctaattcaggcgtgttttaatattaaaataaattaaacgaatttagaagggaaattgcgctcacaccgaccgcgcgaatgacccctcgcgccaagcggccgtgcacgatattcttctagaactagaaactcgagcgcttgactagtggaggccgtcctaaaacgaaacaggtgatgctggccggaggacccgcctgtacccgctgtacgtactgtacagtcgtcgtggattttggatgctcgtaaacccccaacgaaaagaccaaataaacccagaaattccacagagacgaaaccaaacgaaccaaacacaaacgcaggcacgcaaacgcaacgaggcccccttcttccctccgttccctccctcctccgggacacccgcccccctcccgtgtctcgactctcgagctctcgacgtcgccgtcctcgcaccgctccattttccggcatccgagccgtagccctgccctccgcatccacaatttgatgcggagggcgcggccgccatgtcgtggggcctgggctggaagcgcagctccgagatcttccacctcacgctcgactacggggactacgatgacaacgacgacaatcagccctcgtccccgccccatccggcgtcctcttccccttccgcctcggcatcgtcgacccctgtatccttctcctcgcccaccgccggatgcacacgcaacggcgacctcggcttccgcatcgagctcgactggtcggcgggggacgacgaggatcaggtcgcgctccgcctccagtcccagctcatggtcgcgctgcccccgccccacgatgccgtctccattgacctgaccccgatggacgacgacggggaggaggaaggggtgcggatcgagatgcgcgtggtcaggaggcgggaggcgctgcgatccgtgcgtgtgtcgcgggcccccgggtctgcgctgggcagcggcgatggcgcgggggtgctcgcgcgcctcatcagatccaacctcgctcctgcgcctgctgtggatggccccacagccgccgcgggcgtgcccgtgctggcggatcactggcgcccagtcgccatgctcagcctctgcaactgcggaatgtcggtgagttcgtccttcactaccttgcctctgatccccatcagtcatcatttccatgcgcgctagattggctcagaattgaagtaatgctgtagctgctaggctatctcagatgttgcgttgtgctaccttaggtgtttctgtgctagttttagagatcctgatcagttttaacagtgggttgtgttagtttgttacttggttaatgttacttgtttgaaaagaccttggatgcagtaaatttcagcaaccaaatccaactatttgattgttctgatgttgctcatgtgaattatgattgctatggttgccccagggtgatgtatagtcacctggttgtatgagaaatgggaacgattgcttcctgtatctgtttgataaacattccctgattaatttacagaaatgtgtattatctatgtattcaccaaacaaaaatttaatggcaatgtgacattctttgcagttaggacctgtatcttttttgcgaattagccttaacgttgtacctaggatggtgaaatggcattaggatctttttgggtgatctatatcatgctgagtatgcttatacctgattggctacggaaaattttgaactacctactaagtataaagtatgttaacaagctgatcaccttttcacttttaataaaatatatatctgatctgtaagaagtgaatcatatgggagttgggacaccagtttctgattgtattctttattctttttaaaaagatcagcagtcaactgaattgaacttggtcgaaatggactaccccaccccccaccccaccccaccccaaaaaaaagtgagcattctcaatttgaatgagatgatttagtccatcgttataccattttttttaattcattcatggcagtgccaagacattaaagaaatggaccatgctacaaaagggtcattctatggtggacaaatgaatcttgctgtgagcccattacttaaattgcacagacctgtatgtttactcatgcaaaatatattgaatgctaaaatatgattataaagggtaaagtgaaatcatttttgtaatgagctgctaagtcagcattaaaacggaggaagaaataattgttactttgctaaatcatcttcttgtatggcacactattatctgacataagcttactatttgatgaattttttgttgggtgggaaaaaggtgcattcaaggtctcccataaatggaaggaaacagatagtggatttcagtttattgatacagaaaaaatgctaaactagggtttgggtagtcagtcagacctctcgaatgactacaagtgtctatgcccgatgagagtttgatggcagccttttcttttgggtccaagagcacaaatcaccatgttctcactgtcttaatagtactgctgcatagggctgaaatcaacacctagtcttgctccctaaccaatatgaaccaaaccatctatctatggatccgggcttgccttcagtcactcaaggggttgccctttacctccttcccggcaatggaaaagcctatcttgactagttacggggattgatggagggcagcctgccaagcggcgtatgatgatcctagcttcggcggatcctgcctttctattttagtaccttgccttggtaggaagcagaaaagctgcatgccatttcactaaagaagagtaacaagttacaaaaccaaaaagagaaaaaacaaagaagcatccctgactcaaacctaagaacatgcgcaccacggaaaaacaaagaaacagccaaattgaaccgtaaactggatgtcatttgtttcaagaggctgaaaacatgttttcaggtaaatgagaggtaaaacagaagaggatgtaggaatgctgcatttctaattactattgctgtttctgctttgcaaacatacattgtatgtattgtgtaaatccccaagtttcatgttgccgtgtcagctgtctatttggctatgaaattcgagtgatgggtggaggatattaatcagtctaaccatgaattgctacaaaaattttggcaggtgcttccagttgagttaactcgccttccacttctcgagaagctatatcttgacaacaataaattgtcagttttgccccctgaagttggtgctttgaagaatatgatagtgctgtcagttaacaacaacatgctagtttctgtccctggttagtgtgcacatgcagttaaatttatattgctctaaagctggtgctttatatcttcttcaagcttgtgcagacttccatttgctcaggatcatgcctaatcaattgcccttggcccttgcaacaatataattttttttcttctttttgtttctcacacaagcagtagaactgcggcaatgtgttatgctggaggaattatcattagaacataacaagcttgtccggccactattggatttcaggttatttaatgtttaactgtggagttctttgttacagtgatggcttctaattggtgctatttcctcatgattcattatctgtttcccacaggtcaatgcccaagctccgaattttgcgcttgtttggaaatcctctagagtttcttccagaaattttgccactgcataacctcaggcatctcacacttgcaaatattagaattgaagcagtggaaagtcttaaatctgtcactgtacaaatagaggtatggccttctgttgttctattagttaggtcatcccacaactttcaacttttctaacaaggacgtttggattttatttcagactgagaatagttcctacttcattgcggccaggcacaaacttagtgcctttttctctcttgttttccgtttctcttcctgtcaccatcctttgctagcttctgctttggccaaaataatggaagatcgtagcaaccatattgcaattagcaaagaagagaatgctgtcaggcagcttataagcatgataagcagtgataatcgtcatgtggtacacactacacaccccaactatctttctgtagtgagtcatgttcaagcatttaacatttccttattcttttttatttttaaattgcatttgcaggttgagcaagcatgtcttgctatttcatcactggcatctgatatttcttcagcaatgcagctgattaagtgtgacattatgaagcctattgaagctgtactaaaatcatctgatgaagaagaactagtatcagtattgcaagtggtagtcaccttaactttcgtttctgatcatgttgctcaaaagatgttgacaaaagatgtgttgaagtcattgaaagcactttgcgcacacaagaactctgaggcaagatgagctgaatttagactctggttgatgtgttatttggataaccaccagagagctcatcattatttgcttctttttgctaggtgcaacgtctatctctgtttgcagttggcaatttggctttctgcttggagactcgtcgcaccctcatgcattctgaaagcttgcgtgaccttttaatccgcttaactatttcacaagagcgtcgtgtcagcaaggcagctgcacgtgctttggcaatcttaggtatactagtttttggtccttactatcattccttgcgaacaatcagtagccataacatgtcttgatgtgtttatgaatcttttcaaaccatttaggggagaatgagaacttgcgtcgagcaataagaggaaggccagttgcaaagaagggtctacgcattctatcaatggatggtggtggcatgaaaggccttgcaactgttcaaatgcttaaacagatagagcaaggaactgggaaacgcatacatgaaatgtttgacctcatatgtggtacatccactggtggcatgcttgcaatggctcttgggatcaagcagatgactttggatcagtgtgaagaaatatacacaaaacttggtgcttctcttttgcctcttgaagtttccttgccaatgccaatgtgttgccaactgaactgttgattttcctaggaaaacttgtatttgctgaacctatcccaaaggatgaagctgctacgtggaaggagaagattgatcaacttttcaaaagttcatcacaaagtttcagagtggttgtacatgggtccaaggtattaatgaagtgataaatttggtatcatgtttcatgttgtgcacaatggactactgactaaggacttaattacagcacagtgcagatcaatttgagaggttactgaaggaaatgtgtgccgatgaagatggtgaccttctaattgaatctgctgtaaaaggcattccgaaggtttttgctgtatccactttagtcagtgtcatgcctgctcaaccgtatatattccggaactatcaggtttgtcctttatccttcctaattgctttttctcttttcagttccggaatagtttgtaaagttgtatgatggaaccaaattaatcctcataattaaataggaatatattgtcaaattgtaccttctatatttcgttgttcataacaatgtatactgtccagatggacatagcttcaaagttgtggcattccttttccctttgctgttgagatttggaatatatatttgtatggtaacttgatagcatggtccagtatcctcctggcactctggaggtatcaccaggaatggcagaaagtccatcaattggtgcaatcggtacggctgtttctggtgcgccagtgggtattaaacgtggtgccttcatggggagctgcaagcatcgcgtgtgggaagcgataagagcatcgtctgcagcaccatattatctggatgatttctctgtaggtaatatttgtagactcaactatggcatctattttgtgtaatatagactatgccttattttcttgaaggccttttgatattgaatgttcctcggttgttattttttcttatcatttttccagatgcaaatcgttggcaagatggagctattgttgccaacaatcctacaatctttgccattagagaagcacaacttctgtggccagatacacgaatagattgtctagtctcaataggatgtggctcagttccaactaaggtaattcaatgcttctcgctttgtcgttgaaattatctaatactcagcaactggtgcaattctgaatacttcagaaatttacttatgaaaataagttttattctccctgctgttggaagatgtcaaacgcatatacagaatggtatattgtcattgaggagtttcattggttcaatatcgagcaacagaggaccagacttttaaatttgtaggctagacttggttcatttccaattatgaccctgccttttggatttgtgatctttaagtacctcataagaaaactacacatctattctatactctgatctaaaatatatggcacttaggaatattgatatggcttacaaggtgacactttgactagcagtttttatgaaaatatgctttcaaataaataaaactaaatattgtggaagtactttgcttgttgaatgtagcaacatcttacgtagtcagttacgtagttctttatatgaatatgactggtcaacgttaagcaagattaaacgacaaaaatcctaaaatgacagtttgagggaggattttagcagcacatactcgtctacatcttgtagagaacaggcatacatctattactatgagatactgaaatgatcaaagatgagtactggtttcttgtaatttgaaatttaacttgtacactacaatacatttagactcccagtgaactttgatatgaaatatacatctttggtccaacttatatataggtttattccatgtctgtatctagagtcgacgaggtggatggcgctacttggacacagggcaagtgttaatagaaagtgcatgctcagtggagagagttgaagaaactttggatacactgataccgatgcttcctgaaatgcaatatttccgctttaatccaggtaattcaacttcaaaggaactcttagcatttgctagaagagaaactattatgttgggatctgtagcaacatagccataatttgttgtgtactacttttgatatgtttcaatctaattagcctgcatattcaaatgagtgagcttcttcctattttggcagtggatgaacggtgcggtatggagttagatgaaactgatcctgctatctggcttaagttggaagctgcaactgatgagtacattcagaagaactttatggctttcaaggatctttgtgagcttctggtcccaaggtaccaagaggaagaaaagtcatcagatatttacaaatccctttcattttcaagactgacatcgttaaatcaaggtttgtctttcccgaaaatcagcatttaaaacaaaataaaaaaatgttttcgaatctagttgatatgtttcttatcctcccttaacaggtttcagcgaaagtaatcctaccttaggatggaggcgtgtggttttacttgtagaggcttcatttagtcctgattttgggaagaaaataaatcatgcacgttcccttgaatctttctgctcccagaatggtattaggttagctctaatgaatagcgcttctgggtttgggaagccagccactgcacttcctaccccaatatcttctcccttgtttactggaagtttcccatctagtccacttctatatagtccagagggcactcaacggatcggtcgaattgacctagttcctccacttagtttggatggccacccaactacaaagtcctcaccaccaacatcaccattgaagtcaagacagccatctgcacatgttcggtcgttgtatgataaactgcagaatatgcctcaagttggtgtgatacacttggctcttcaaaatgattcaactggttcagtattgaggtatgtttcacatgcttcagcaatttttagtttgttgctggtttatagttatgacttatgagtatgacacaaaactactgttgcagttggcagaatgatgtattcgtggtcgctgaacccggggaacttgcagacaggtttctgcaatctgtcaaaactagcttgtcaaccttgttgcgtgggcgtaatagaaagggtgcatattccctgtccaagatttcatgtttatctgagttggttgccgaatggccatcttttgaaatcggtgggatacaccaccgctatataggtcgacaaacacaagtaggaattgcttttgctgtctccttgtttccaactaagtaattattatgcacacttagttatcctttgccgtaggtaatggaagataaccaagaaattggcgcatatatgtttaggaggacagtgcctgctgttcacatggcacctgaagatgttcgatggatggtaagtcaatttgtgtagcatgcatgcactgattcctcagatcgcatgccagctgtgaaagttgccaagtatggcaatcaaatctgtgtcttaggaaaattgtgaaagggattcaagtataaatcatgccagtggcaccttattggtttttggttagctatggaggaaacactagccaaattgaattttttctgcagagtgcggtcactcttccaactcccaaagacccaaactgtgtctaaaatgaagttgctgccatgaaactattctttgtgcacctctttgattagaccctgctactaccttgtatccaaatacctgtgattgagctcaatgatttttaagccctgcaaatagaaacctgtttcctggaccaaggcagctaaaagtagggctgaatatgttttttttaacttttacactgcactatctttcttttctattgcacttcttcgcacatcaataagcttagggcattatgattccttacatatgtgatatcccaggttggagcatggagggagaggattattgtatgcagtggtaagtatggccttgctcatggcctggtcaaggcattcatggattgtggtgccaaagcagtcatctcatcgtccatcgagcctccggattcgcagacaatagtctaccatgggatggatgtcaatggaagcctagagaatggtaagtttgtcatcggggatgaagaagccgacgaatcggagcctgaacctgttagccctataagtgactgggaggacagtgatgtggaaaaaggcggcaaccatgacgtggatgatgaggagtacctggctcagttcatgtgcctgatgtatgacaaattgttccgtgagggtgtgactgtggatacggctctgcagcaagcactccgctcacatcccaagttgaagtacagctgccacttacccaacgttttgtagttagggacattgacaagccatacaaaagtatagcaaaatggacatggataacaggaaatgaataaggattcggtggattcgtagtggggttatagaggtctatatcgtgttcgttgtgcaggcgtagtgacagagtgttccccttactgaatctttgggcaagaaagcctatgtaaaactatgcgtactcatgatcagtgtagttaagctgacgaataaaagtatgatgaaggcattgcaatctggatccgcatttttgcttcagctgtgagaatgggtattcgcaatgttttggtgtctacagtttgtagttaactatcttcagagatccagttccgtactctgattttcttcaagcccgcccccatgatttcatttgaccagctcttaacgaagcatgaccttattgagcgatttggccggtcgcagtacaccctcagagttcagtaagaactaagaactaagaatgcagcttactacggaaagctactacctctgca

SEQ ID NO: 4177 - DNA, 4965 bp, Sorghum bicolor
ctcgctggcacgggtcaagactttaacatatctaaactatatttgaacataaaacgaacttgtatcacatgatgtgtgagctcaatcgttcttgaacatgctgataatcgagagcgtgacatttcgaaatgtttaaatcaacaacctccataaacggtaacttatattgtgtcaccttgctagctagtttcactctatatagacgtgaaacaaaatggagttttagctgcggatcgaatttattctgtgcaaagctactttcacaaagaacgatctaaatttaagctacaggtttgtacttgccaacacttagcgtacgtaccctaagttgttcctcgattcctggggctgtcatcgctcttgttagtctttataactttattgattcttgatcatgatgatcctaaccagtgaggttctgtttggcagctttgtagctttattcatatatgcacaagaatataattgtaatacggtggtaaatttaggctctgtttagcagggcttcttcagcggcttaaggagctgtttggagttattttctaccaaacagaagtaaactgaaatgactccaccgatgaagctccttaaaaacatgatctaagagcttttgcggtgcaaaggtgccaaaaatagtggcttctctcggcttcacctcatcctaagtggtgttctgtgagagtattttaaggaatgagctgttttgtcgaacgatttaccaaaatggctctaactgtttatggagcttaagcctctaaaaatagctttactagtgaagtggagccgtgtcgaacgggtcttagcttgttcttcataaggcatgcactataatttacattggtatttggtaagtacgaaaccgtgcttgcaagttgcaaagaggatgtgatgtgaagccagacgttgtcggtgacggtgctgactgctgacgggccgggctccacggaaacaaactcgctactcgccgcaccggacgtacgtacaggtcggcagcttgctcggccccggccgcgcgcgtctccgtgtcctccgcgactgtgcacgtttcgtcgggagcggcgtgcccacgcccaccccccgtccaccagccagcaaccgacggcactggtgacacgcggctggtccgctcggtccgccccgcggctccagatcacggcaagcgcgcccgccgcccgctgctgcgctgcgctgcacgtcccgccctgacgccacgccacgccaagcgcgacacgacacgacacgacacgacccgacccccgccaacgaaacgccgaaacgcggcaacgcgtgacgggcgcgcatggtcgatgctctacccgcgcgtccgccccacgccaatctcccggcgggtccctcgtgggacggggaacgcgatgcggctgcaggctgcgaccgcgaccgcgaccgcgaccgcgcccacgtgaaggcaggcaggcagccccggagcgggcgcggcggtgggccaacgacgcgttgccgtcgcgaatcttcttctggccacggccaagggccaatcgcccgctccgctccgctccgcactccgcctccgctagggaatatggaacccgatcccacggccctctgggtctggtcgacgggtcctctcgccgtggcagctgcttcccggaccggaggatcgctgagcgcggacgccactgccattgccgtccgactatagttgttaattaccataaaataatttgttaacgataaaacccgtgtcaggcaccgtcgtctggacgctgctatgggataaccattcgcgtacgtcggttgtatgggtgggatcctctgcggcacgccattctggtgctgctagtggaatagacaaaaaaagggccgacggtgtttgctcgtggcaggccacacagagtgacaaccagagtggttgccgcaaaaacaaccaatcacacaaaaagtgttgtaccggtggaggacagccattaatcagcaggccggcttcgcggccaaaagaaacggagaagaggaaaaaggggggcaagcaaagaagaaaccacggacggagcgagctccgagcgtcctcatcctcccgtctataaattcccttccttttcttcctccatatatagggggcgccatccaagccaagaagagggaagagcaccaaggacttcccggcgcccgttcaggatccacatccttcccgagcgagttcttggttgacctcttcctcttcgaccacctcctagggtatgcatgcactgcacccccgttccccctttctccgtttcccttttctctgaagaagaaatctgtgattattgtgtcctggtttacgagattagttgttttgctgagtatgtgctaggctactgcgctgaatttgtgtgtcgatcttgcttttttcttttaatcaaggtcagccctgtcaatgaacaaaaggtcgttattccccccccagaagtttgcgatcatgcttgattttttgttagatatcgtttttcttgtctggatcttagtatgactgttgttcgtgaggctgttaagtaatcgtaatcagactgggtacggtttgctggccctgaattccaacagtcagcttgctctggtttcagaggatttatgttcggcaaaattttgatcatggctgtacagaaagaattaatcttgatggaaataatttagatgaaatccttcatgacatgaaagcatgtcatcttatgcccccttgctttgcttattctacagttatgtgaagccaaagatagtgacctaagcagatcagtactaccaaggatgcattttttagctgttcgtactttgtagtataaagaccaaggggtgctcattaggtttgtatgtatgttagagcataggaattgaaagggttggacttgatgcttctagtcagctcaatttctgttttggacttggggtggttgatttgattataactaactccttatttctaatgtggatggcatccatctatccctggcatcttctctacaattgagatgccttcatttaaagcttaggaccacttaattgaaagttatctggactgtaggaataaatagttgctgagaggaatgatgaggtaaattacaatgggcccatgtcatagacacttgcacagacaatgatataaagtcattgagatcttatagagatggtcacatggtggggtttgtgactgaattcttcaacataacccatttctgctagctttattttttaccccttagttttaggaaaagctatatcatatagtctagatatgcttggctcggtacaaattgctcctagattcttgtatggaagaatgtcgtcagctgtgttcagtattgacctctactctctattgtttcatggtgtgcacccctatgactctagtagaaacttagcctgtgtttttagtagtgtttgatcacagaaaatgtagatgtttgaaagtgtgttgtggttgcctttgtctgcactgaattttctctaatatctatatcattcctttgtacagctcttggtgtagcttgccactctcaccaatcaagttttcatgtctgatctcgacgttcagatcccaactgccttcggtatgttagttaattgttttcgttttcttttagttcagttgtcttttggttgccatgcctggaatacatgcagtttattctaatctgtgtcacacatacagatccctttgctgaggccaatgctggggactctggtgcggcagcaggatcaaaggactacgttcatgtacgcatccagcagcgtaatggtcgcaagagtctgactactgtccagggattgaagaaggagttcagctacagcaagatcctcaaagatctcaagaaagagttttgctgcaatggtacagtggtccaggacccagaacttggacaggtatggtgcttctgacgaacttgtgttcctaggtcatctctatgcattttttagcttcgcctgtctacgatagaagctaattatcctgatgaatttgttctgccactataggtcattcaactccagggtgatcagaggaagaacgtctctaatttccttgtccaggtaggtaccatttggtttttcatcttgttcgcatagacatgcagcgttgcacgaagatggttaattccgttcctgttgtgtcctggcaggccggcattgtgaagaaggaacacatcaagattcatggtttctgagcaaccgccgggtccatagcaagccctgcatgcaaagcagctatatatctgaggtggagcatatctatctggctgtgtacaagcaggcctactactacgcctgcgcgttctcctatactacacataacacatagccccctccctgcgtgtatgcttgttaccgttgtgtcgaatcttgtacgaggctccatcgaacttcgatggctcgcttctttatcagaacaagattgaataaacaatatttggtatgctgtgtgtcagaatgctttcgctgaactttgctttcattcagtttctgatgacttgttcacatctactgggccggtgacgaggataagtatggtcgaattggagaggtgtagtgtcgaatgtttttcctgaactttactttcattcagtttctgttgtcatgtccacataccacatctactgggccagtgacgaggatatgctgaactttcgctgaaggatgggaattggagaggggtagtggttatttcattctcttctggcacaattattatactagtttcatggctttcaagtcatcatgggttatagccgaatgtttaaacccatctgctaggctttcgctttacaggagtcgtttgatgccttttaaaaccatgatggacttggtagcactaatcgcaggggtagacttcactaatcgcgtttggtgggtgtgatcactgtaatctttgtgacgattgggagcagttaagagttgttgcttttagttgtatatcgaccggtaggagaggcgcacgagcttttcgtgatctcgaaaagagag

SEQ ID NO: 4178 - DNA, 2689 bp, Sorghum bicolor
tttcttatcatttatactcatcataaaacataaatatctgacaccaaaattcaagtgttggaaccttctaagattcaagtgagattagccttttcctttacaaaaagatactttcaattgacaactatatatacccaaaaccgaataggcactttcttccgtaaggacgaaaataagcacttctgaaaagacaccctaatgtcaaacaaaaccacagcaaaattagtcaaagcgtattggttattttctcagcttagttcagctcaactccaagtaaatcatagagaactctcggagttcacaaaaggaaaatgaaccgagttgaatttaataaataagggtcgatgaaatcagtcaaaaaaaaaagaaacttaagttgttataacggtaatgctacttgtcgagcgttcgtccgcatcggacggacccactccaccaagcgaaccagcgaaaggacacgacgcacctcgtggcttctttatccacctgacgcgtcctggcttcttatccattcgttcgacgaccactgcttgcgctgccttcgctgctgctcatcaatacagagacacagtcagatccagctcgcttgttccctctcccttcttccctccctctgacctccatgtcacacgaagaggagggcgatggcagcaacttccagcgagccacaccatctctgcctccctcctcttccatgtgacctccacgccgccgaagatgagcctctctctcctccttccctacgacatccatggccatcggagtggaggccacggcgggtggcttccagtgagccacgcaccctccctccctccctaatctcgcatcctcgtgtgctgtgccggctccgacgaggtaggtagggagggatctagatctgaggtctctctccccctcctttctcccactagacccagatctgggctcccttctgctgcacctcctcctcctcctcttcttccccttctcgatctaaggatttttgtggtagctagtgttccagtgagtcagatctcgtcgatgttttgcaatggttcattttcaatgttgcaacatatgatgtggaatgttgcaacggtacctttttttggttgttgcaacacgtatttctctgatgttgcagagcagttcttgagatgttttattttgttttttttgttgttgcactagattctcctccgatgttgcagaagattttttttgttgcaacatgtgttttttttttatgttgcattagcagtgattgagatgttgtaatagttttttcttattgttgcagcagattctcccccgatgttgcagtagattttttgttgcaatatacgtttttttgaatgttgcattagtagtgcttgagatgttgtaataagtttttatcaaatgttttagtatattttcctcgatgttgcaatagactttttttttatgttgaagtttatttttttttgtttgttgcattagatggtttccaatgtttcaatagctttttctgtttgttttagcagtgttttctctttgtgttgtatttttagatgtctttcgatgtttgcaatagttatagctagaggacagactatggtggtgagctggtggttaggtcggaggtgttgggttggcgaggttgtgggcggacagatctgtgcacgtggggtcgcctttcttctctgtgcgggcgcggggcaggagtcgttttcggtagagaacgagttggcggcagacggatatgctagggtgcggcggggtgagggacggacggatcccgtgctcgtgggggtggggatgggctccttgtgcggggagcggacaaaaggtggtcctttacactgggcgagttggttggggagctgacggtttttttttctatgtggtgcggatagaaagctcggcgtccggacgcgctgctggcgccggacgtccgggtgctggcagtaccgttgttataaacaagaacatatatctatgatttctattgaattctctggaaaacaatataacttacacacacaaaaacaattatattgatcaaagataagagtattgtgattttacagtgccggcactctgctgtacatacctctcgctccctcaaacagcaactcatctcaaaaaaaaacaaaaaaggaacacagcaaggcagagttgatacagaaaaatttcaagcctcggaatcaaacctgtgtgacccttgaatcaatgaagggcacttgacaaaaaggaaaaaggaaaaaacacacctatgaattggaagaataagagaaacctagcaaaacaaatccaagctaggaaaaaggagacctatccaggacaatgtgaaaactgatgtgtcattgcagatggtgattgcgttctgcaaaatgacggcagttgccatgggctaatcagatatagaacacaacgaatttcaccaaatggccatttgacccaaggattaaatgagacattggaagcgttgatgatcaggctaaaaaagttgaagagcaatttttagcctattctgcttccactttggaagcttgctaaatgcttcctttgtcatcccaaacttctctttgaattcagtcgaagacaagtaggtctgcacaccaaattgaaaataatgtgaacattacactttttttagaacaatagaggattgtgagatcaggaaatcacctctcgcctcgtgacatcaatttcagtaacaggatca

SEQ ID NO: 4179 - DNA, 5712 bp, Sorghum bicolor
attatacgaactaaataaggccaaaatacgttggaccgacgcctaccaaaataactaccgattgaccatctgaaaagtttgaaagacccagtgacaagacggattggtcaatggatgttggcatgttgtgttgcattagctgtcatcatttaagtgtcagcaaataatgcaaggaatacactgattctttacatagaaaatctttacagaaaaatggtgtcaaccggcgatctccactatataaatatgatgagagttaggccttgtttagtttctaaaatttttcaagatttcccatcacatcgaatcttacggcacatgcatgaagcattaaatatagacgaaaacaaaaattaattacacagtttacctgtaaatcacaagacgaatcttttgatcctagttagtctatgattggataatatttgccacaaacaaacgaaagtgctacagtggcgaaatccaaaatttttcccaaactaaacaaggccttacaaaaacacaaggaatataaggagtcttttgcttttccaatgtgatttacaagatgtatatatatggcgaatgaactacggtctaatataaaaacaaatccactaattaatataactcaaatcgcatgtcctccaagcatccccgtaagactaattaatataactcggatcatactcactaagcatgaatcaccattggtggatctactctcggcactcgcacaagacattagcacgatgcaggggcgggtctagacatagggccatggccctagtcgcagcccaaatttctcaggaacagaaatttatctttggcccaacaagaacagcccgttaaaatggacagtaggatagatcacgacgtcaggcactgctcgcgagatcacgccacttcttccctacgcgccgttgctgccacctccctctcgcatctcgcattcactgtcgccaacgcagtggcatccagctcactcggcccccatggcccacgcctgccagctgccgccatcgtcctcatagggccgagcctcgctcctcggctgctggcgcccatcgcagcgccgtcgccgctcctaggctttcgcgtggtgcctatgcctgctggatcctgcgtcgccgagcaaagtagccattgtgaaggtatttcttctctatgcttctagtaagttgtgtgaaggtatttcctcggaagtggaagatatgcgaatacaccaaattatcattagcactaggtattacttttcaatgttccatgttattttttatgagaatcatgtattatattgttattgtatggtactatatttgcaaactttccttgagaatgtctatgatgtagctatcggcgtttcgtcattgaaatttggccttagtcttagcaaaatcctgggtccgccactggcacgatgatatgaggagtgtgacaatcggctagtagtaggatggagcaatctctaatcacgatggcatagggtggcaaggtgcaactagtggtgaagacaagggggctagagagagccggcactctaactttgtcaattttgtattacaaactttaacgctttagttaaattattatgtaattaaaggataaatgacccctctattgacacccccaccctccataggtgcaaccaaaaagtaggggcagatatatgagcttagggccattaggccacggccctagacatgacccaaaatatcatttaaagtacatataaattcctgggctaattaaaataagtcttaaacattgggccaaattataatcccaaccagcccagcctcagtataagcatcgtcctactcgcctgactccacgtccacgtgagtacgtgacttcatgcgtgcgacgaaatcccaatcacgaccttgcttgccgatgctggcttgttctccgttacttctttacatcttgtagttctacttcagtggggatgggtcggccttaacatgtgtcggacgatgactaatctacccttgtctacataagctggctcgaatcgatctttctcgttctactatcacgaacaatggctcatcacgctctatctctacctctagccaccatcctcgcggtggcggtggcactactactagcccgccgcgctgcgggttacccgtggtatgtgtgcggctcaagcagcaacttcgtggctaacagcacataccaggctcatctcgacttggtcaccgccacccttcccaagaacgcctcctcgtccccggacctcttcgccaccgccgtcgtcggaaccatcccggagcagctctgggccatggggctctgccgcggcgacgtcaacgcctcgacatgcttcaactgcctcacccagggcttccaagaggtacccgacgattgcccctacgacagggacgctagcatctactacgacttctgtacggtgcgctactccgacgtccacactctacgcaacgacgacgacactggcccgatgataaacacgtacgtcgaaaccaacgacggaaatgtcacggcggcggacgcggcccggttcaagagactcctggccgacctcatcgacgccaccgtcgaatacgccgccaacagctcccggcggttcgccaccggggaggccgacttcaacggccaggagacgaccatccccaaggtgtacagcgtggctcagtgcacgccggaccagacgccggcggagtgccacaggtgcctcgagaggatggtggaggctaccctggaggcgttcaacggcagcatcggaggcagggtgcttggggttgattgcacctaccggtatgagaccgcgcccttctacaacggacaggccatggtgcggctggcacaaccaagctctagtagagcgccggcgccagcgccggctctgcagccgacggccgccggagaaggtgagtacgtgcgtcatgaaagccatcctttggtctttttgtttgacacataacacacgcccaaacactttgactgactgagttgcttgttgtgcaaccgcttgaccgtaacgtacgtattcaagtttaatggtccaactaatttagaagaaaattctaaaaggggtttgggtatgtttgggatggttaacaatttgaatcttgactccacgttatataggatatcagtgtgttagtagaggatggatcatagacgtactatatagtccctttgtttccaaattatacttcactttaagtctgtcttaggtcagaactctttttcccctttgactaggttttagaaaagagtatactaatatctataggtttaaataaatggcacttttccttccaagaaagtgtcatttctgatgatatctaataagctgtgacacacatttgctgtgacgttttgctaacacatttgctagttcacagggggacgaaagcaccgtgtgtcttgggtggttcttgcagttgtgctaccaactctagccgccatgaaccttgttgcctgcctctatttgcggcggcgccggcgactactaattggacaggccaaacaccaaagtatgttgctttaacattatctgtttgcacagcgttaaacacacttcgaaggatctgaaaacaaatgactcatccaatccatacttgaacagagccgcccatgtattacactgaagcagaggacaccgaaatggtggactccatgatgatggacgtctccaccctacgagccgctactggggatttcaatgagagcaacaagctcggcgaaggcggctttggtgccgtgtacaaggtagcactgaacaaacacgtaccacatgattctgaactgacaaaaaaaacatgaaacattgcacctaatgtatgtttggtttcgagtttcgacatgtttagggtgtcctcccagatggcgaggaaatagcggtgaagcgtctgtctagcagctcatcgcagggagtggaggagctaaagaacgagctcgctctagtggccaagctgaagcataggaacctcgtcaggctcatcggcgtctgcctagagcagcaagagcggttgctcgtgtacgagttcgtccccaaccggagtctcgatctgatactcttcggcactgataatcgtgagcagcagcttagctgggagcagaggtacaagatcataaacggcatcgctcgaggcttgcagtacctccatgaggactcccagctcaaggtggtgcaccgtgatctcaaggccagcaacatcctgctagatgagagcatgaaccccaagatctcagacttcggcatggccaggatctttggccaagaacagacgcaggccgtcaccagccgcgtcgtcggcacctagtcagtgctttgctttttcagtgctgaaaaacacaccttccattaatctcttcacctgcaagttcagtattcatgtgatggaataactgcatgaatcatgatgatgagcttttgcttgttggtttcctcgtttatttcagtgggtacatggcaccggaatacatgatgcgggggaactactccgtgaagtcggacgcgtttagcttcggtgtcatggtgctggaaatcgtaacgggtcggaagaacagtaacgaaggctgcaatctcttgaccacagtaagtaattaactaagtacaatgtctacaccgatcacacctgcagtagtcgctacagaagaacacgtacacagctctatccgttagttgtgttgcagcttgctgatggctcagtggctcacgcgtgacacgctacaaatccatgagcaggtatggatgcactgggaggccagaaagatggcagagttggtcgaaccgagcatgggcaacagtttcccggagggcgatgtgctgaggtgcgtccacatcggcctgctgtgcgtccaggcagaccctgcggcccggccggtgatgtcgtctgtcgtgatgatgctcggcagcgatacggtcaccctccaggttccatccaagccgggattcttcgccaggaacaacagcgccaacacagccgcgtcgacagtgtgactgaatggtaacatatatgtaccgttaccctgttaccaaaatgtatgcatgatatcaactaataagccgcgtaagcttgattcaacatgaaattttgcatacgcttactataaaatgtgcaaacacatggttgatatgtgtccatgtataagtgatgaatgattgtagtgtgcgtgagactaactatggcctgagatgtgtgtgcaatatatgcctcttggcttgtgatgtacaggagttaagtgttggtacagtaaattgcaatgtgcaaggtcaaacaaggagttcgtgtgatggacagggagcggtgaagggctgacgcgaaggtttggaccaagggaagaatggaccatggacgactagcacttagacacgccatggcaatggggatggtgttgactaaagtcaacatgacgatcagaccaaatcaacacgtgtgcgcaagcacttggtgatcggacggtcgaggatgagtgggacatgccaacatcatgaaaaaggtagtgtctacgcaactccaagtgggtttggcggtttgggtctctaaatcacgagcggtaggtttgtcggatttgcgcttcaaaacgcgacatgatcatatggcgcggcacgtggcgtcatcatagggcttgggctcatggccattcgattcatcgaatccattatagaccattttgccctagtggctaagtggttcaaggtaaatacctagtgaaagtcttggaacgtataatagtcctataaataaggat

SEQ ID NO: 4180 - DNA, 3761 bp, Sorghum bicolor
aagaaaacatactctgggtcttcagaagcctcccccttttcatctatctctctttttttttgtgaaagccttttcaactatctctggtcctcctacagttgtgtgctatgcgacagagggactgaggaaacctgtcactattcgtttttttttaatgtcccttcagtagtgattgttggaattctctatcaatttactccaatcactagatatgttgatagaagcaagacaacagcttttgggtagttgcatcttcatcaaaataatgatcactgcctcttgggtgatctggaccccccaacatgcattcttgaatggcaaacttcgaacaacttggccagtttatatatcaaggccaaacaaaagttgagaggagccctaaatctacgtagagagtactccctccattccaaattgtaagtcattccaagaatcttggagagtcaaatcattttcatgtttgaccaaaattatagagaaaaatactaatatttgtaacgtaaagtaaatatactatgaaaatataattaagaaagaatctaacgatacctagttagtatcataataattattattttataatataaatttggtcaaacttagaaaagtttgactctccaagattcttggaatgacttacaatttgagatggagggagtactttacatagctttggtcggtctttttttttcttccttttggctatttggactatgaaacctgtgctttttgttcatactttcttttatatatatgtacaaaaatataagtagggggtaggaatggcaacgggtacgtaccgatgggtacttgccacccgtatccgcacccgccaagtcaaaatctattccatcgggttacccgcgaaagcagacgggtaagaaattcattccgtacccgcacccgacgggtaattcttacccgacgggtattccatacccgaaaatatacccgagttcaatagaaatataacaactttcagcaagttaaatatcacaacttataggaaattaaacataacaacttccaacaaattaatagtagcactagtaacacaccagacgctcaatacttcccacgttcagccaatcagttcatgggctatatgggctaaattgcgtaggttgcttactcattttgcgggtatttcttacccacgggtacgcgggtatgggtactactattccacacccgtacccgccatacccgatgggtaaaggatttcacccaacaacgtacccgcgggtacaaaattcattccatacccgcgtttttatcgggtaaaacccgtcgggtactcgggtttcgggtacccattgccattttgagtagggggctccgtgctaacccgtaaaaaaaaggaaacggagagcgctccatatgaaattcgtatgtttcagttctaaacatggtctaaactattggcaggttttaacagtaaggcacttgagctgcaaattttgtccaaatatgcgaaattttaccttgtgttatttttttaagggcttgtttggttcccaaaaatatttgaaaaaaatttcagattcccatcagattgaatcttaccgcgcatgcatgaagcattaaatatagataaaaataataattaatcttttgaggctatttagttcataattgaaaaatatttatccaatataaacaaaaatgctacagtgtcgattttattaaaaaaaaaagtcgaactaaacaatgcctaagtcattccttgtgttattgagtgctgctaccgatcggtaccgaccaacccagcaagggcatgcaccattgagagagtgatcacgagcgctggctgacacgtgtcggcgccccattggcagtggcgcaatcctgaaggctgaaaggaggccgcaagtgattcacgcggccacatggcggtcacacagtggccatcaacttatccagtcagataaggtggcgcctgcgactgcgagcgacatatatctttgccacgcatgactgctcgtgctcgaccgaccgaccgacgaagcgcacactcacggtcagagaaaaagctccgacgacagctgagatggcacaagccatggcgtcgatgaccggcctctcgcagggcgtcctgcccagcaggcgcgccgccaacagggccagggcggccgccgtcgtcgtcagggcgtccgccgagggcgaggccgccgcggcgcagccgggccgccgcgccgtgctcgggctggtggccaccggcgtcgtcggcggcgccttgtcgcaggcggtgcacgccgcgaccgtcaattccatcaagatcggagccccgccgccgccctccggtggactccgtgagttcctctgcctgcccgcgcgcgccttcatacagctttcctcttttttttttttgcgagcaaagctttcctctttctttgatatgcttcctatccaccaaagccttttttatatacatctctcgaacctttgattgcgagttcagaatcgtctggagctgatttgtaaggctttagtttcaaattttagcttaaaaacatttatatttcctccacttccaagattaataaacaaacatcagtaggccgtacgagccgggactgaaaagatttcatctgacgtgtcgacttttaatttgctatggcacacagccgggactgaaaactctgaccaggcgagggacttcggcctccccttgaaggatcgattctacctgcagccgctgccaccggcggaggcggcggcgagggtgaagacgtcggcgcaggacatcatcaacctgaagccgctcatcgacaagaaggcgtggccgtacgtccagaacgacctccgcctcagggcctcctacctgcgctatgacctcaagaccgtcatcgcttcaaagcccaaggaggagaagaagagcctcaaggagctcaccggcaagctcttcagcaccatcgacgatgtaagttgaatcctattgatcattgatctatctggaagcaattcaatttccttcccctcaacctttgacaagaattgttggaaaatgacacgtgagcttctcttcccgttttggcagcttgaccatgccgcgaagatcaagagcaccccagaggccgagaaatactttgcagcaaccaaagatgtgctcggcgatgttctcgccaagataggctagacggaagggctaataatggccatttaatttcgaacttgtgtttgttcatatggagccggcaatgtaccattttctgttgatattgtatcagaaagcacttaactatgatgctatcctgagttcttgagacaagtactgttgcgagctgatgcaacaatcagaaacaggtaccaacaaccttaatccgtgatgaggtcatcaaacacatgcctcctgataaagcccctagtccagattccttcaatgggctttttctgataaaatgttaggacactatataagaagagatatgcactctgcgctttgatttcttcaatggcagtttgagtctggaagccatcaacaattcactcgtcatactggtccctagagtggacaatcctacaagtgtcagtgacttcagaccaatttctcttctaaatggtgtcatcaaaatgtcacgaattaagctcgaggctaatctgctactagctaaaataataccattgattgataccaaccagtacgattttataaaattggacttttacaaaagctgttgatacaattgaacacaatacaatcttgccggtgatgaagagcttggggtttcctgatgtttggacgaactggattgagagta

SEQ ID NO: 4181 - DNA, 5586 bp, Sorghum bicolor
aatttgattagtttcataaacttcaattaattaaggtgcacttcttgacattattttcaatgcttcttattcttaatttaaatattattttattgcagccaataatttgaatttttatttgtatcaactactccctccgtcttcaaataaatcaattcctaaaatctatactagtcaaactttaattaactttatatatataaaagggtaacaacagtcaaccctgtcgtaactatgttcattttgtaaaagctgtaggctgtccagacttacttcaccaaactgtctgaactctctcattctaaagtagtaactagataaaaatattaatttcctgttagctaagaaagtttgccaccaaccgagagacatagtagacaaagtcacaaagcacaatgaaaattagttttgcagtcgcaaataattgcagttgaaatagttatatcaaaacgttttttccttcttccatgactgaacccaggatctaatttttgttagtcaccgaattcaagtacccctaaatgatgagtccctcatatatgttatgcttagaatcttaatctatgactcttgtatgcatgattaaagccgcagccatatatataggccgtgtttagtttttttttattttgatattgtagcactttcgtttgtatttggcaataattgtccaaccatggactaactaagttcaaaagatttatctcgcaaattacaggtaaattgtgcagttagttatttcttttatctatatttagtgctttatgcatgtgccgcaagatttgttgtgacaggaaatcttgaaaaaagtttttggattttaagttgaactaaacaaggccatatagctaagcagagatcccgctacgcataatagatgcatagattctcctcattttttgattagcacgtgaatttacacccttatttttctgggatcaactggacaaatttctatatctccccctcctatcgatcaatacgcacccggaatcacagcagagcacccagcacttagatctgatctcaaccgctgcgaaagatattcctgtttcctgacatatatattaaaaaatggattcataatgccctcgcacagtactagtgtggggaaaaaaaccaacggtagacaggagcatgcaacagatcatgatataaactaactaaatccagccatccaggccaaacgtctacttgcacttgaaactaagtggccttagatctgaaaggagaagcgaacaaacaactgcgtcaagaaaatggttttctttctccccttccatgtccatggcagctgctgctgatgcttggctgcgtgcccaagcaggcagatccgatcattgcaactgcgctacccacttgcgtggttgctccagataaaaaacggaaggagagacaaattcatctggtttccatcttccattcctccttcgccgatgcagggagcagcgctaaagaagctcactttcacagcgcccaacctcgcacaccgccaattgcatgcccagtagtagaagttacagaaccagcagctaactaatcagccacagaggcacagacggtgatgggtgacgaatatgcctgacacagatgcaaatgtataacagcgctagctccagcctcactctagctacttgcaccacgacgtgcactcccgtgaattccggccgttgcgttgcggtcagctagctcgcagtcgcagcggcacatatggacggggcttgatctgtgcctgtcctcgctgttcactgtccatagtccacgttttctgcatgagcttgtgtagtttttagtctgtacacaccgccggatcgagcgatccattgcccacagctcgcacacgttgccgccgcctatataagcgcggctagctcctgtcttcctcccgtcgtgccccactgcactacctaaagtgtcagtgtccccacggtaccaacctctggtcttggcaaaggagagaaaaaaaagtagcagttacctagggacctcacctgctagccatggcttcaccggcgccggcagacggtgacaatggtggcctcactgacccacttctagtgaccgcaaccggccatggtgccaccccgaggaaggctggcctcggtgccaagggcaagtactgggtggccgccgacaaggccgagaggatggctgcgaaggaggccggcggtgaggacggccgcgcgctgctgttccggaagtataaggtcaaaggcggccttctgcacccctacaggtaaagccagctctgcaaaatcgaatgtgcatggcatgaacagcagtccaaatatgtgtacttagttatttacagtttactatgtaaacaggctgtatttttgctaaacgcgcatttcctagttgcttgttagacctttgcctgcttagatcctagtactggcttaataaaaaattgccagaaaaaatttctttagtggacaaaccgttgaccagagcatccaccgggggctcatcatcatccaagcactaataatatagtaatatggattgccaaaaggagatgaaaggatcttgcagtaggattgcaatttcctattctggctagcttgcatttctatggcctgagaactgacgacatgttttcatgttacaggttgctgatcatcatccgattaatcgctgtcctcgtcttcttcgcatggcgcatcaggcacaacaaatctgatatcatgtggttttggacaatgtccatagtcggtgacgtctggttcggcttctcgtggctcctcaaccagctcccaaagttcaaccccgtcaagaccatcccagaccttgcagccctcaagcagcagtttgccttctctgaaggcacctctaggctccccggcattgacgttttcgtgaccactgccgatcccattgatgagcccatactctacaccatgaattgtgtcctctccatcctcgctgttgactatccagtcgacaggcttgcctgctatctctcagatgatagcggggcactcatcctctacgaggcattggtcgaggtcggaaaatttgcgcctctgtgggttccattttgccgcaagtactccattgagccaagggcgccagaaagctattttgagcatgtggcgccaccacaagctggaagggtgacgcaggagttcttgaatgattataggagggtgcaaatggagtatgatgagttcaaggtgcgcctggacatcctccctgatgccatccgcaagagatctgatgtttatagtagcatgagagctgcagaaggagatcaaaaggcaacttggatggcaaatggaacacagtggcctggcacatggattgatccaacagaaaaccatagaaaaggacaccacgctcctattgccaaggtatcaatgttcagatttgttgttgttgaaattctgaaaatgagaaactcatgcaatccaattacttcttgcatcggaaattctgcataatgtttgcttgttacagcaaaccactaatggtttcattccttctttaacaggttgtgctgcaccatccaagcagtggacaacatcttggttcacaacccatcactgaaagcaatctcagcattaccaccactgacgagcgcctcccaatgcttgtttatgtctctcgtgagaagaacccaagttatgaccacaacaagaaggcaggtgccctgaatgcacaactgcgggcctctgctctcctctctaatgcccaactcgtcatcaactttgactgcgaccactacatcaacaattctcaagccctaagctcggctgtgtgcttcatgctagatcaacgagatggtgataacaccgctttcgttcagttcccacagcgctttgacaatgttgaccccacagaccgctatggtaaccacaatcgtgtcttctttgatgggaccatgcttgcccttaatggtttgcaaggaccctcatacctcggcactggttgcatgttccgtcgcttagcactctatggtattgacccaccccattgtagagcagaaaacatcacagccgaagctagtaggtttggtaactccacaatctttctagattcagtgtcaaaagccctgaaaaatgacaggtcaatcacaccaccaccaattgatgacacattccttgctgagttagagagggttgtgacatgttcttatgaccaaggttctgactggggcaagggtgtagggtacatctatgacatagccactgaagatatagtaacaggatttcacattcacgggcaggggtggcgctctatgtattgcacaatggagcatgatgcgttttgtggtgttgcaccgatcaacctaacagaacgcctccatcaaattgtgcgttggtctggtgggtctttagagatgttcttctcccacaacaacccattcattggtggtcgccggattcaacctcttcaacgtgtctcctacctcaacatgacagtctacccagtcacatcagtattcatcctgatctatgctctaagcccagtgatgtggcttatccctgacgaagtatacatccagagaccattcactaggtatgtcgtgtaccttatcataatcgtcgtgatgattcacatgattggctggcttgagataaagtgggcgggggtcacatggctggactattggcgcaatgagcagttctttatgatcggctcgacgagtgcatatccaatggcagtgttgcacatggtagtgaacctcctcacaaagaagggcatacacttcagggtcacttccaagcaaacagccgcagatgacaatgacaagtttgcggacttgtatgattttcgatgggtgccaatgctcatcccaacaatggcagttctggtctgcaatgttggtgccattggtgtagccctgggcaaaatagtggtaaacattgaaacatggacagcggcgaagaagatgcatgctgcattgggtctgctgttcaacatatggatcatgtttctcctctacccatttgcactagcaatcatggggcggtgggcgaagaggccaatcatccttgtaatcttgctgccagttgtccttgtacttgttgccattttgtatgtaggtctccatatcttacttgctggtgtaattccactctaggcgatatagaaggcaatgtaattccttgtgtagttaccaaggaaccaattattttccttttatcaataaacattgcattcttacttctaataatataaaataatcctaattaaattcagaccatttggatttttgctctatatagcttcaactgtacagtactgactataggctaaaagtacaattttgctattgatgttaggatttaattttcctaccactgatgacttatattataagccataatatggtgaacatatcctaaaaggatacaatcaactgttttttatccgagcttgcatttcttattattaattggtacactaaccatggtccaataaccccacgtacacaagtaatggagtgatagtttcttttctttccctctttcataaggggtatgtcattatttttagtgggcactctataatgcataatggtatgttttcacgtatgacttttggtggattccaagaacaaaaaggttcagatgatcctaa

SEQ ID NO: 4182 - DNA, 5338 bp, Sorghum bicolor
aaaaactttttcatctaaacaaggtcttggtcacctcttcaagtcttcagtctccctgtgaatgcctgattgcaaagggcaaggcagacctgtccagctgtcctcatccctagtggattttcagcgattaagtactgtactcgttttgaataaggtttggatcaaacattaaaaatataaatcattaataaattttaaattgttgagtttataaatgtgaaaattatatgaatagtcttgaaaaatacttttataaaattatacatatatcattttttctaaatacttttataacaataagaggttaaattatattttaaagaacgtatcgtcgttttaaacgacttctaaatcctaaccaatgccaggtctcccccaaaactaagagcatccacaatagtactagctatgtagctagcttacatagagttaagatataaaaacaaaaactattttatacattcttattttatttatgtattattagatccacatatttctctttcagattcttaaactacataagggcttgtttagatcggagatgaaaaatttttaggtgtcacatcagatgtgtcggaaggatgtcgggaggagtttttcgaaattaataaaaaaacaaattacatagctcgtctgaaaactgcaagataaatctattaagcataattaatctattattagcatatgtgggttactgtagcacttaaggctaatcatagactaactaggcttaaaagattcgtctcgtgatttttaactaaactgtgtaattagtttatatctatatttaatgttctatgtatgtgttcaaagatttgatgtgatggatgtaaattttttaggtgggaaactaaacagagcctaagaatgctcaaatagttagctgttgtcttttcttaaaaaaaatagttagctcttggagacgtcttgttggtctagaattgaatgcacgaaaagactcctcccagagaacatgcttttgacaggcaaattaaggaggattgcgaccagactgtcaataatcgccaaactcgttgggcccgcgaaataatctcatctctgtacatgtattcctgtaccaccaaatatctcctcggttgaagggcaaaagagaccagaccacggccaaaaactaaaacgtaacacattcgtcggcgcctcagtctcacaaacagcatctctttaatcgatgacaatgcacgacaccggtatcatgtgacaaatgacagcattagcattgtacagagacaggcacccaaagccctggtaccggtagtccggtactcaccgtgttctttgggctcgtccgaccgtgccattctagacgacctcatcagagaaagcaggaagacagttacaccaagattgttcaacagtaaggaggtgaccagatcaaatattgactaatcagccgtgagcacctgacctagcaaagtattagcaggacacgatgacgaagtcctgaaggattggccgcgaacgaccgtgccgttaaactagtccaagtcaaccctgcgctctggctcttcagccacccgccagccgcaacaaatcagcaacacgtcctcttctctggcttcacaccattcgctctcaaattctttcctaaaaaacaatttcaaccaacggtcagcatcacataacagatattagcgtttctgttcacaggtatgaatcaagaaaaaaaatactataataaaaataatgtgtgccgtgttccacagcacaacaaaacctgcaaaaatcaattaaaatgaccggtgagttttcagcagataaaaatccaagaacacctttcttcttacctataattcatctccttgtgtaatcattttcagcgcaagattggaattatgttaatcgatctttccacaatagaagggcattgggtgtgtacctgtcaaaaagcatagcaccaggtcaaatacggcaccttttgtcattagtccatgaagtggagccttgctgtccatcaaaacctctgtatccaactaccaccaccgcaaccaatttactccagaagtccaaactcctctccccccagaatcccagccctggctgctccaccgagctcccatccatggctcctgccttcttccttctaccgctcctactcggccagatccttctctgtgccgccgtcgacagcatcaactcctccacacccttgtccggcgcgcagaagattgtgtctaagggcaacaagttcaccttgggcttctacaccccaccccaaggtaccaccacctcctccaatcccagcaactactacatcgccatatggtacagcaacatacaactgcagacgacggtgtggatggccaaccccgatgtgccggtggctgacccaaccactgccgccttgaccatcggcagtgacggcaatctcgtcctccaatcccagaatcgcctgctgtggtcgacgaacgtaagtattagctccaattccaccgtcgctgttctccaggacatcggtagcctcgacctcatagatgccaccaattcatccatggtttactggcgaagcatagatcatcccacaaacacttggcttcctgggggcaagcttggactgaacaagaccactggtgtgagccagcggcttgttccatggagtaacactgccaaccccttacctgggccgttctcactggagttggatccaagaggcacgacacaatacttcattcagtggaatgattccataacatactggaccagtggtccttggaatggaaacatctttagccttgtgccagagatgacctctggttacaactataacttccagttcatcaataatgtcaccgagagctacttcatctactcaatgaaggacaacaacatcatctcgaggttcatcatcgatgtggatgggcagatcaagcagctgacatgggtgcctgcctcccagtcatggatcttgttctggtcccagccaaggacacagtgtgaggtgtacgcactttgcggggcctatggtagctgcaacctcaatgcactgccattctgcaactgcatcagggggttcagccagaaggttcagagtgattgggacctccaggattacagtggcgggtgccaaaggagagtaccactgcagtgccagaccaattcgagctctgcacaggctcagcctgataagttctataccatggaaagtgtgaggctacctgataatgctcagactactgtggcggcgagctctcaagactgtcaagtgacttgtctgaacaattgctcttgtaatgcatatacttataacagtagtggctgctttgtttggcatggggatctgattaaccttcaggatcaatacagcggaaatggaggaggcacactcttcctcaggcttgcagcttctgaactgccagactccaaaaagagcaacacagtgaccattggtgcagttgttggtggagttgctgcagttttaatattgctttctattgtgtcctacttcttgtttcagaaataccgccgagaaagaactctcaggatatccaagactgctgggggcacaatgatcgcctttaggtatagtgatctgcagcatgtcactaacaacttctcggagaggctgggtggaggtgcctttggctcagtgttcaaagggaagctcccagattcagcagccattgctgtgaagaggctcgatggagttcagcaaggggagaagcaatttcgtgctgaggtgagcaccattggcacaatacagcatgttaatttggtccgcctccttggattttgctcagaaggatcacggaggctgcttgtgtatgagttcatgccaaagggctccctggacctgcagctattctctggtgagacaacaacactgagctgggctaccaggtaccaaatagcacttggaacagcaaggggcttaaattacctgcatgaaaaatgtagggattgcattatacactgtgatgtcaagccagaaaacatactcttggatgagtcctttgtgcctaaagtggctgattttggtctagcgaagctcttgggcagagagttcagccgtgtattgacaacaatgagaggaacaaggggctaccttgcacctgaatggatcagtggtgtggcaataacagcaaaggcagatgtctttagctatggcatgatgctcttcgaactcatatcaggcaagagaaatgctggtcacggagaacagcatggatccacctttttcccaaccttggctgcaagcaagcttcatgaaggagatgtgcggaccttgttggaccccaagctgaatggagatgcaaatgttgatgaactcacaagagcttgtaaggttgcctgttggtgcatccaagatgacgaaactgctagacctacgactggtcagattgttcaaatcctcgagggattccttgacgttaacatgcctcctgttccaaggtcattgaaagttcttggcgaaagccctgatgttataaacttcttttcagatatatcttcaagtcagacttcccagacacagaacagcacgacaacttcccagacgcgcagtgctacttcaggcagttcacacccccaaagtccataaatcaaataacctggaatttgttagggcaatagttgaagagtatgagtaaagctgtacatgattagaacctaatatgctcagcttttgtatcacgctatgcttcagtactgtaaatttagtgcagaatgtcaaccgatacaagaaaggtactactgttgcatttacattacacatgcaagatcccccattttctcttactaaatgtaaaatatcaagttgcgttcacttttcaccgtctactggaatctgaatataggtgcttttgttatgtttggaagctacacttatgttttgactaattgcttctaaaaaagtttagggtgtgcacatccttctttcgtgagtgaggctgagattgctttcaaaaataaaaatacaatactagaaaaaagcaagtaacccccaaaaatttatgtgcacatcaatttgtgttactatttccttgcacataagaaaacttaagcatctcaatcaatcaacttcgatgagatagccagctaagtgagcaaaaaaaaaaaaaaaaaaaaagaagaagaagactacatctgtaacttggatatgtatctgttaactgaagattttctatttccaacaggggctgaatagtcatagcttgtcatcattataaaatagggtggtgtccataaatgacaaaatcactcttgcactactcacaatggttccggtgttactatgctaatgctttaaagtattgctcatcgagtagtttcaagatgtatgtagagtcatgggatcattcagagagtgatgaagatttgg

SEQ ID NO: 4183 - DNA, 3869 bp, Sorghum bicolor
ataaccagaggaaagaacagctttactagctaaatgaattaatattcaggttgtcaactcttcctgcactattcaattgagaacttctaactatggtgtaataccaaacaaactgtgtgcaaatttcagcacgtctggataaagtctttttttttcaaaatctaacaaatattttggcaaaagcatttgagcagtttagatagtgcttggtgttgacgtcagaattaaatgtcttccattgttgcaatgctaacattggcaaccgatactgactttatttcttgattgatagctttgcactgcactaaacgtcagtaaaagaagtgtggatagggaccttgatgtttaccgtaacatactctcaaagttggttcaagccaaggaacttctcaaggaatacgtggataggtaatgccatatcccaggagcatgttattttttgtcacctctactgtcatttaagtttaaatgcgttcagcatatgattctctgctaagcgatttgagaggtttctgtttgaattaaatgctccaaatacatgacttcatcagtaaatgttacccttttggccacttaaatcactactatttgtagtaaggactgtcaattgcttggtttccatggtccacccctttgtattgtccatctttcctataagtatactgttttcgactgtcattccagtgaagtaaagcttgtccaacatataactatattggcagggaaaagaagaagagagaagaaagatcagaaaccccgaagccgaatgaagctgtcacaaaatttgatggaaacctttattccatgaggcattagatcagcccttgcagaggagagtttcccacgataacagaattaacagtaacatatgaaccatgttgagaaactaccaaatattcccctttcatcacagacatctttggctgctcgtcgtgtggtgtagcattctgccgtacaaaaggatccagattattcttactattggacagaaatttgtattttctcatgtgtcttgaaatcagatgtattcgttttctctgctagtccgacagtatatgaagagatatgtgggggtcaatgttactcctaagcagagaaatatagctttctcttttgtatttcaatggagatttgagaggttgtgttcacttatatatttgtggcatccatgaaatcagttgatgtgttctttatctgaatttgtatgtgcggggcttagtactggaaaatatctgaggtggaaaagtccaatgaattagaccattttgtgctggattcacgagtcaggaagacagaaactgtgtaacctttttcactttgctagcatgaatatgaatagaataacgcgcaactcgaaataacatagaatttcacacaatttaacatcaaatgaactcatattgaaacaatgcacgtccaaaacttagtggagcacattttgctcattttcctttaagagcacaacaatgtagcaacatcagtaaaggttcctttttttaatggctttttaaaggtacctttggttgccaataacagtctaacggtctaacatgagacttcaatatcggtaaaggttactttggttgcctctaacggtctaacattataatccaaaggtttctttggttacctctaacggtctaacctgagactttcagttatactggttaccgtcagcgacagaaagacacattttggggtccaaaaccacatgatctccaagattattttgagcgatattttccagccacagcccaccggcactccgaagaccacaaatcagaggcactccaaatgccctcctcccaatcatagccttccacgtgtcccatggtccttcacgagcagcccatccattggaccatacagataagacccggataaggcagagcccatcttggccgtcaaatagatcacttccgtccgacggccgtccgatctgccacccagagataacacgggaatttcctataaggacttttctatttgtaggccgtgacgagccccgcaccacacacccaccaccaccaacctcagcacaccaaaggagaggaggaggagcagcaggacagccatggcttcgtcagtggccgccgcggcgagcacattcctgggcacccgcctgtcggacccggcgccgcagaacgggcgcatcgtggcccggttcggcttcggaaagccgaaaaaggctgctgcccccaagaaggtgtccaagatctcctctgaccggccgctgtggttccccggcgccgtggcgcccgactacctcgacggcacgctggtcggcgactacggcttcgaccccttcgggctcgggaagcccgtggagtacctgcagttcgatttggactcgctggaccagaacctggccaagaatgagcccggcgtcgtcatcggcacccgcttcgagtcctccgacgtcaaatccaccccgttgcagccctacagcgaggtgttcggcctccagcggttccgcgagtgcgagctcatccacggccgctgggccatgctcgccaccctcggcgccctctccgtcgagtggctcaccggcgtcacctggcaggacgccggcaaggtatagtttcatgcatgtatccatggagttcgttcgttccaagcgcatgcgcttcaacgatctaaccatcctgtgaattgatcgatgtgacggccggcgtgcaggtggagctggtggacgggtcctcgtacctgggccagccgctgccgttctccatctcgacgctcatctggatcgaggtgctggtgatcggctacatcgagttccagcgcaacgccgagctcgacccggagaagaggctgtaccccggcggctcctacttcgacccgctcggcctggcggccgacccggagaagaaggagcggctgcagctggcggagatcaagcacgcgcgcctcgccatggtcgccttcctcggattcgccgtgcaggccgccgccaccggcaaggggccgctcaacaactgggccacccacctgagcgacccgctccacaccaccatcttcgacacgttcggagcatcctcttaagcccgccattaattgctccgccctgttcgtcgatcgaaacgtgttcttataaattaactatgatctctatgagcctggagagatggatggatgaacccgtcgtgcgtggtttcattttgtgatgagtgagagagagagagtgtatgagggttgggggcaggacgatcgatcctttgctaatggagatctcgttaattaggagagctgcagcagggacttggtgatttgtaatatatgaaccagtgatgaattaatgcatcattcacttgtacacatctatcttgaggtgacccaggatataagatgcgccatggttagttttgttagatcgtacgtatcaggcacaaatggatgcacgtaatgacgatggaagttttgagccaatcttcttatcaaatactagcaaatgcgttcgaacactgcaacagatgacacaatgtatcttgaagttggattccatacacgagttgttctaacatgttgagcacgtgcacagaacatagagatattttgggaataaaaaagattagaagaaaccttttgtgtctaatataggtagggataatggattttcaattatatatcctaactcttaataaatgaaaccatcattaaatttaaccaaatttatagagaaaaatattagctatatatatcgttattacattctacaaatttagtgaaagcaatgtgtccacctggcacattgcagagcttaacccaagacaaattaaaatacatgacatgatcattagataaatcaccaaatctctcgtgctcatacaagttagagcaacacacgtctagacacataatatgacatc

SEQ ID NO: 4184 - DNA, 6654 bp, Sorghum bicolor
ttgtgtattgggtttccatattttcaatctcctgtcgaaaattgaagttcaaggtgactaatactttgtgtacctgtcaacgcaggcacattgtttatttgctttccataatttcactcacctgtcgagaatccgagaaggctaatgtgaacgtagcatattatctactataatactttatcttgcgtactagagtgccataaggccacaatgtttggttgtttgcaaagttcttccaactatactcatgtgatgtaaaccgtactctttgtagcctccgccacatcattttctggtcaagaacaaaaaaaaaaaggtggtgagattgagtggcacgtctccaaatagcgtgagaagtgccattatacatatatccatggtgacatggtctatgattagagcacccgcaatgtgccgagacttgaaatgtcctttcagctctatgtaatccggatgctcccaacaactctcttacggcatcccaaacaaagttctcctagcttgccaggatctggaaagttcgtgccgacgacttctgtcacaatcctgatcttaaaaacaacaatatccatttcataggcgagggtgggggagaagcaagccgaacctctgatcgacccgcacacgtaaaaaattctcggcatcgagagatttgcctacatggcaagagagagaacataaaactggagcagctagcgacaaactcgtcgcctatctcgcacagtaccccgggcacttaccatctcacaccacgaccaactcatatatacgatttggctggactttctttttttttatttctaatcaacaggcgattcagaatttctcattggctgataagccatgatagaaagtactgttgactgatttgttgtaagaaaaaaatactattgaatggctgacaaattcggctgataagttcaaacgaataagacgagacctaaaaaatatggatatttttctttgttccttcacatgagacaaatctccatctgcagtgatcagcccgctgcaaaagaaatattattttgttagattagaagcccgggcggcaccgatagatctacgtaccgtattctccgatgctagaatttgttgataaagcatcggccctcaagtgttgaagatcgatgcttgaactcttcttctttaagcattgattatctagtacactgcgggtgctcctatagtcccacaagggaggggacgtgacccgttaaatcttgaaatacattattttgtgtagcgaaggacaaacccagtgccggaggccccacatgaatgtggtctgatgaaatgaaaaactgaggcaagccttcctatcatattaaaaataaacacatttttagtaaccttgcaatactaggctaagtcaaacctcgcatcatattatgagatggagtcagtattccatgtaaatagtttatttgacaatctaaatttttttgacaatcagtatttcataaacagttgaaattctaagactcaagggcgaacaaatttgtagaggtgcaagtacatgggtaatgtagcactttcgtttttatttgataattattgttcaatcattgactaatgaggcttaaaagattcattccatgatttacagataaattgtgcaattagtttttattttttatctatatttaatgttttatgcatgtgctgtaagatttgatatgataaaaaattttgaaaagttttttatttttacggtgaaccttagtccacaactcctcatcgaggtgcccgcgagagttgactcgtgtacgcgttgatcgaaaatattgacctccgcgatggcgccgcacactcgaaacaaatttgacgggcccacgagatacgggagcaacaacagcgaatcaaagaaaagccaaagtttggcccacgagcggttactggccggacaggtggtttccgcgtgtgcacgttcacccgcgtcctctccttcgcaagacggcaaagaggagtcgccatcgcccgcccccatctagtctgtgtcggtgtggtcgtgcgggggcggtgctgcgctcctctctctgttcggcaggactcctcatcgccgcctcactactccaatccccatcgccattgccggcgcaagcaaagcaagagggggcggagcagcatggcggggcgctacgacagcaaccccttcgaggaggaggacgtgaaccctttctcggtacgcccgccccaatcctccaccccttcctcttggcgatcgcaccattgccccggcggcagatctactttcctttttcttccgggtatccgctacttcgctcctgtttggatctggacggggcgcagatctaaccacgtcccggcgatggaaaaaacaaatgcatattccccgttgcagtatcaccgacgctgctagtggattttttttttaaaaaaattctggcctgatgatgcaatggtgcttgaacgtcttgtgtgtgtctgtggttgaagtttttattggttccttttccatataggaacaagcacgcggcaaggctggtgggcagtccaacttcggtggtggcgcgttttacatgcctgtgagttgtgtgctattcttatgagttatgcgacttctatgatatggcacatcagttaggggttcatattcttgcctgctcaatgttgtgtggtttatgctcagttgtgtggtttatgctcaaatgtagaacccaagaaacgtgcctcctgcatccaattcacgcctttcaccacttcctcctgaaccggcagacttcagtgctacagtggatataccccttgactcgtcaaaagtgcgtataaatgcgcattgccttcctagttcccacatgcaaaatgcagctgttacgaacacttactagaaaatgttgttcagcgcaaccaataacatgtgcttgtggatatacaggacctgaagagaagagagaaggagctgcaagctagggaagctgaattgaacaagagggagaaggtatgctgcacatgacacatgcatatacatctccctttcagttttgatttaaaacaagacagtcatagctcactttttttaaaaagattgaggtaattagttttgttgttattgagatcattggtttaattttcattccaagcataagaaattgcttaataggcttaaatgtgaagtcgaatgcaccggttaaatccccactagactctactttgttgccgcaaattgtatttttttgctctactctgatatacttgcagtaatctttaaaaattagcctttgaaaaactgttgccagtttctgactttatgttatattgaataggagctaaaacggagagaggaggctgcagcaagaggtaaaatctcgtttttttagtttatcaatgactcagtacaagcattgtacctttggttcccattaaaggagaaataagtatgtgatacatctaatgtgctttgaacattgatacacctaatgttggcatgttagaagtatggatattacatctgatgatctgaaagagtgacatggtagctaattctatatggcaaattttgtaaaaccagggtctaatttctgtcttaaaggaaaagggtactgtggttaataatcctacataaattgtgtcaaacaagtacaaatagtgaacgtcagaaagtttggaaggctttcatacatttattctcttttccactcaactgggccttggcaacaaggtatttgatccatgtttttaatataaagttcattttgtttcagaagttgctaggcttacatttcattattttgtttggcagctggcattgtcattgaggagaaaaactggcctccttttctgccactcatccatcatgatatcaccaatgagataccgagtcaccttcaaagaatgcaatatgttgcatttgcgtcctttcttggtatgctgcctctgattctcaacatcatgaaaactttcactctgatgaataatcttcaatattctcctttatttaatggtgcaatggacatgccttccacacatatattggatgatattctttaagttctacattttggattttccattggttttatcttctcactggtggcttgtgaacctatgtgtaagacatgcaagtgatttgttccaacctttgcatcaatgattcctgcattcctgtaattactttggtcagaatattttagaatggaaaactgatacttcaattggtacatttcctatttttagccagaatacaagtataaattggtatgctgatggaattatcagtgacactaatggttatattcttatatgtctgcattcgccaaatatgttaatttaatgtcttaaacatagggaggagcttttagtaagatattaaggtactgaaaagtagcattccatttgaagttatacagagctatatcgcattgagaaatctacatattttattattttcagcggcacagaccgaaggattagcaatttatcttattaatttgcctatgatttgtggaagcatattattttaacagttttatttggtattgaataggattgatttgctgcctcttctggaatgtcatagcagttactacagcttggatcaagggggaaggtatactgaatccttttggtgtttttgttgttctatcaaattatctcatgctcacacttttaaaattgtattaaccgttttcaggtgttaagatctggttattggcaataatctacttcatatctggtgttcctggtgcatatgttttgtggtatcgtcctctgtataatgcaatgaggtaatttatttgaaatctcatcacattattttgtgcctcttccatctttttttgtatgcatggataggtaatgtttgctggcaacttgttttgcaggactgatagtgcattgaagtttggattgttcttcttgctttacttggtaaatataacaagtttcttacttaagcatctatgaattttgattttatttatattaaataattaatttaattacgcattaatgcttgaacctcctgcacttacagttccacattcttttctgcgtattttctgctgtggctcctcctgttgtatttgagggaaaatcattagcgtaagtttcttgcctgccttttcctaaaagcttttggcttctgtaaacttgcacccaatcaaatgtgtttttactatgatgcaatctgtatattctgcacatttcattgtgtctgtaaagtaggattgatgttaaaattagtttagttggcttatatagaataactgtccactgccccatttcctggttggacaaccccatcactggatgaagataaacacacaaaatgttttactgatctggacaatggcatcccaagatcttgtgattgatgtttacagggacaatacataaccgagacatcctttggaaaaagtagcttgatggatccttggcatgacctaactcctgttgtttactcttgcaggggaattttgccagcgattgatcttatcagcgtgaatgctttggttggggtaagctaagcacctttttatttgctaaactaaatgagatattcagcttcggaactttgataaattatcttcatctactgtcatttgcgactgatttgtttagtaacttagtagtccatacgattgttcgtgcagatattctactttgttggatttggattgttctgtctggaatcgttgctcagcatctgggtcatccaggtcaattttctatgatcaactgttctaattttcctgaaccaacttcagtgcagacatatctgagccctttttggattctcctcgtgcagcaagtgtacatgtacttccgtggaagtggaaaggctgcagagatgaagcgtgatgcgacaaggggtgcaatgagagccgcattttaagtgcggtgtggtatttttgtgatgataatcctagtcccagcgcatacaatacttccggtggacaggttgtgccacaaacaaaagcatgtctcttccttggttgctgactataataccaaactgccagtaggttatcgtgatgttacaagtgacatcactcgccgtcctgttttaactaatatagagaatgtgcagcttttacagctttattacttaatcgttttcttcttgctagttgaaacgcggagtggattatgaattatctttaattaagttgtacagtgctgttaagtatttatcctactttttgagcggctatttgtacttgttgaaagagtattatagtgaactggtgatattggcggaagttgaaagagtattatagtgaactggtgatattggcggaagcatttgggggcaaggcagcaaacgactagtgcaaataaaattctagcgtgtggggggtgcacatgcatgatgcatgtgtaattgtgtactagtttgaatgcggtatgtgaagtgtgtgcgtcttcaatagaaaatggatttgtcatcttatttgacaacctttcagattctttgatttgaatcgaacaatccaaattagcgggccaacaactgcctccaatgccatgccccaggctcgagtaaaactcacggtagtgtgctgctatataggtagcacatatcgaggtcttcggtagtgctatataggaactacatatcgagatctccaaaaattacttttgtgtgataaaccacctgccccaggacctaaatatacaattttagaagtt

SEQ ID NO: 4185 - DNA, 7439 bp, Sorghum bicolor
attgacactgactaaaagaactcaatacaagtctatcaccggtccctaaacttgttcggatatgtcattcaagtccctaaacttgtaaaaccactatttgttcagttgtgtcatcctaatctctaaacttaaaaatttcatatataagtcctcaaacttgttcaattgtgtcatcttgacccctaaacttgcttttaagtcttatctgagttaaaacatggtgaatctaagaactctatatcaaaaaataactcatcactttttcctacgaactcaaatgaagataaattttatatcaaaattatagccaataatgcgatctacaactttgtagttgaaaagtttttaaattaaattcatttagagttccaaaatattttttgtaagtttatagattttgaaatttaaaattaaatttgtgacattaaacgacttcaaatataaaacttttaaactacaaagttgtagatcgggttgagggctacaactttgatataaagtttatcttcattgaagtttatatgaaaaaaattatgaattattttttgatatagaattttagattgctttattttgacccacacgagactcaaaaccaagtttaggaccattagagaccgggataacacaacgaacaagtttgagaacatggtcgatttgcgagtttagggaccgggacgatatgacggtacaagtttaggaacaggtggtgaactttactcttttgtaaacctttttagaatgcatgaattttataggaatgtacaggaattttatagaaatcaattcattttcatagggaaaatgtagaaaacaagatttttcttctctatatgttccaaagaggccttatattgcttctagaattaagaagtcctagagaaactagagacgtacaatcataagaatttataattacaggctgttgtggctaatttaaataaaatttggccggattttattgggaagattgaactgtattcttgcaggaataggcggtggaaatcgagaagaacagaaggttgctaatcctcctgacgccgaatcgtcgacggcccacagtttctcacctattgcaggaccaggaggtccaggacacgccaagccagaaaaccccctacaaagtagccccgcggtcgctgccggtgggtggctacccgtaacggcactccagtccccttccacttccactccaccgccgccgccttcgtcgtctcgtcattcactaccggctagccgcgcgccgagcaatctcaccttcccagattctgccctgtgtaaggcttccgagatcgtgcggaggtgccgaatggagagcagcagcggggaggagctggaggaggagttcccggggcacgagtggatcaccccgcagtcctccgtcaatgccgcctaccagtctcagaccgagaaggttcgatttctccttccttgccttgctctgcgctccagctgtttctcctgcattccggcgagcatacagtggggaatttctcctgctgctgtgcccggctagttcctgcttctttcctcgctgtgcggctggggctgcttgggcttgaaatcacgcaattttggatctagacccgttgcgatggtgttatagtgggtaatatcgcgtagggagaggaatttatcccgcatttgtccctagacaatttcccctcttttgttttggaaagaattggcactagtatttctgatctgttatccttgaacccctgtgtttttgttctctgtaacacagcatgttctcaccgagccttgatgcatcaaaactagaagcataaccaaacaaaaacatatcacctttttctacgaaataaatgcaagtaaaatttggttaacttgtcttttttttatcgagatggaccaaagggtttagtgtttcatgcatccttgtctgccaggactggtacagagaggtgttctagtggttgccattgccaaaatgttctcatttgtatggtgatggtactcatcgattgttgtgcttgcagggtatcaggaaaatttgctctgatttgttggagttgaaggatgctattgaaaatctgtctggaaataggcaatcaaaggtcctggcttttctcaggtaattacaaaattcatgcctgatttttcttctctaaaaataaatgaatcaactgaaaattcagaattcaatatgtgtctatggactcacccccccccccccccccctgctctctctctctctctcaaccattttcctaatgtttttcctccttttcactatctgcatagaatttctgaggaggttgttgaagcagaacaagagttaattgagctacaaaagcatgtttcttcccaaggaattcttgtgcaggatctaatgagtggtgtgtcccgtgagcttgataattggcacaaatctagcaaggaagaagaagcaacaaaaaaggatcctgaaactgaacttgatgaaattttgtctcatggtacccaggatcccaaagctatttttctagataagttagacgttttgcttgcagagcacaaaatggaggaggcggttcttgctttggaagctgaagagaagaaatatttggttgcagatgaatctggtaaagaatcaaatgcagagaatacagcctttaaggcagcactgattaaaaggaaagcaattcttgaagatcagcttgttaggtattgtggacagccatctttatctatgaccgaactaaggaagtgtttgtctggtttaattaagataggcaaaagttctttagcccatcaagtacttctgaaagcttatggttcacaactgcagaaaaatgttgaggcatttcttcctaactgttcaatctacacgcagacttactctgcaactttgtcgcagcttgttttctcagctattgcaaaagcagcaaaagaaactaatacactacttggagatagccccatgaatacaaaccggattatccaatgggctgagtatgaaattgaaacctttgcacgtttggttaaagaaaattctcctttgcctgagagtgtttctgcccttcgctctgcctgtatatgcatcgaaactagtctccatcattgctcttgtctagaatcccaaggtctgaaattctcaaaattaattatggtactattgcgcccttatatcgaagaagttcttgatttgaattttagaagggtgaggagaaagattgtggatggggcaaggaatgatgatattctgcttctcacccctcaagaaggatcaccgctctctggtgcagtttcaccaaatgttatgcttacaagcagtggaaagaagttcatgtccattgtcaatgtgagttcttcgctgattcttctgatatctcttttaagtgaacttgccttaatgcaaccttttattttaacttgtctggaaattcagcttgctgtcatgttggactgtgcattttgacttctgtgatttgtcctaccatatatctatacctatatctctatatgtctatatctagatatttatatatctatatctatatctctacatctctatctatatatctatatatatctatatatctagagcatgcaattatggcacctatctatttatgcaagctatccatgtcagcaagccatgtcatccactaacatacatttattcttccacgtcagcataccacactatccactaaaattcattcgcgatccttgcagcaacgagcgcgcggggtacccttctagttttttagatgcaccactacacccattgaattcttactgagttgaacaacttgcaatcaatgagcatttcagtatttctaggatccactcagtctctaaattctaacagacacaagcagtctgcacactctttagtctctacatatgctaggtacttggcactggcaaccatacacaatagcaataactctctgcatgaaaatatctaggataaatagatgcaatgcattttcttgactcaatcagtgatgagtttgtgtacaaaccatgctacttcagtcagtttactggttatgcacttatgtgccagtgttcaaaatatgaataaaataaaaatatgaataaaataatctttcactggaacatggattactatacttcgtggtttgtttgatagtttcacaaatttctctacttcacctgctatctgatacactgaagcagctgatatatatatatgcatatcctccttacaggatgttttggatcaaattcttccaatgaccatagttcactttggtggagcaattctgaataaatttctccagctttttgatagatatgtagaaacactgatcaaagtcttgcctggcccttctgaagatgataatctactggagtcaaaagagcctgttgaatttaaagctgaaagtgatgcgcaacaacttacactaattggaaccgcatacactgtagcagatgagttattgccagctgctgtatccaagttctttgacatgcaagctgagaagaaaggagctggtggatcaagcgaaggcctcggccctgggtccatatatgccattgaatacaaagagtggaaacgtaatttgcagcattcgttggacaaactgagggatcacttttgtcgacagtatgtcttatcttttatttacttggaagggaagtcacgattggatgctaaaatgtacttgggacagaaagacgatgatcttttatttgatcctgatcccttgccttcactgcccttccaggtgattgtttatttaatttttttgtgtgacgatgcctaagcacattttcatttagagggtaattgcatatttgaatatcaatgatttgatatcaaatgtttatatatgggcacttgttcctcttttccatcttcttactataatgatgtgctcctgcgttttcgagaaaaaacatatggtactgatggaaggtataattttttccttacctttctggaaaagtattttgtatgtttatggcataggtgctgcatcatatatttcgttataccccccccccaccttgattgaaagtacaagtcagtttggggcattgacatggtggctaagatgatgcttagccttgacaaccaatttctataaaaatatatgttattaaaataaaaatatatattatgaaggtaattttcgtgatgtatctggcggcatccatcttagattcccaatctacattttatatttcagattggatgtactatactatgcatcataaggaaaaaatgtattataacttataaggtattttcgtgatggacccggcagcatccatcgcactttataaatctacataactatgtataccttgataatcaaaaccaaaaaaaaaattccatagcatccaccttacaatgtcaatctaccaaaacaaaaaagtttgaccaacatggatcctagaatgacttctataattatctatacattatcaatctcattttagactagaacaaaaaaaattaaattttagaacaaaaaactacgcaccataaacacatcgtgtttatttgtgttaatttgttggcgagcaaatgtttttaaatgaaatgggtgcaaatccagtccttgcaaggaccatccctgtgacgttgaacggttgaagtgtggggaagggcaaattgtattgcatattaatataacaaaactatgccaataaaatgtacacatctttattcagggtactgcatttgagttggatggttgtaaagtaacttaagagggaaaaggaagcgcgagatgtattgcatattataagtataaagaaacaatgccagttaaatgcaccagtacacatctttcttcagagtattacatttgagttcgatcagtgtaaaatctgtaggttaagaggggaaaaggcaatgatgtttcattgtcatttagcttataagtgccattttgtggttcctttgctatccattgcttattctgctgaggaaaagcatgtgtgaaaaatctaaagttctgtttggcaaatcagattgaagttaaaggaattatgttttccagagttttacattcgactcacttattctgttacttgaagtacaacaatatgtccattacaacttggtttagacaaaagttatttatccaaacacccaaagatttgaatgttgatgttccaaacaaagttatctcacccatctgtttttgttcttctcaggcactgtttggaagattgcaacaggtagctagtgtcgctggtgatgttctactgggaaaggataagatacagaaggtcttactctcaaggctaactgaaacagttatcatgtggctctccaatgagcaagagttctgggatatatttgaggaccggtctgtccaactccagccttcgggtctgcagcaggtatgtattattgagttttcatgctactttgatgcaaatgctgaagttatcaatcataaccagagctgtctgtggatggtttctcttttcttgaatgctccttgcagcttattcttgatatgcacttcattgttgagattgctgtctgtggaaggtttccacataggccagttcagcagcttgtatccacaatcataaccagagcagttgcatctttctcagcaaggggtgttgatccacaaaggtcttaaccagaatcctttttctgttcttttttgtagtattctcataatatttaaggctgtatgcttgcctagtgtttaacatcacctttgtatttccactaaaaacgatttcagtgttcttcctgaggatgagtggtttgtcgacaccgccaaggctgcaattcacaagctcatgctggggaattctgggtctgagtccgagcccgagcctgaggcggaagaacatattgctttgcatggtgagatctctgattctgaagagagctcaactccgtcgacagtaggatcagaagactcgttcgcttccgcaaagaatgatgatctggaaagccccgtttacttcactgatcctgagagttaagaactgctcagaccttcgttggagatgttgttacccgtttatttgaagttttattatcccgcatagttggcagaattcagaaccattaaacatcgttgccctcatgataagaaaaaaaaaaagaacccagaaataccgttggtaattatggtcgttattattgtaccttgtcgcttatctgtttattttccagattgtctgtatgataaatctttatccctctgttccaaattgtataagacgccgtgacttttctagatacatggtttttgctatgcacttagatatctatgtctagatacataacaaaaataatgtatttagaaaaaccaaaacgtctcattatttggaacagagagggagtaccttcgtacatgtatcgcaattcacaaatacaaacctcatgccaacataataaaaatagatggtacatgagttatcgcatttcacaaattcaaacctcatgccaacataataataaaaacagatggtacgtgagt

SEQ ID NO: 4186 - DNA, 4250 bp, Sorghum bicolor
gaagaatatagcacatctataattattaggcatctctcaagaagtttgtattcaaagaaatgcatcacctgatcaataaagctgttgttacaagggctaactgattatctgaaccaatccagtcttcactcatttttaatatttaccctgcagaaatatctgcacatgaacaaaaactgtttctaagatataaacttatgaaactaaaaaaataaaaatgtatatttaatccattagcaatatatccatagtaaatctactctgtatgtataaacctttctttcatataatccaaacaccttcacatggcaatcatataatctctcatccattcacccagcctgtatgattctgtttaatgcagtatagctcaaatttcttgtgtacaaataagactggtcccttaaaaaattcagtagttcagacaattggaagacgcaagtaaatttcttctaactgtttttttttcttagaatccttgataacctaacttgttgatagtttaaaaggtatgatatgaccaaaattagtgaatcttttttgtggtatctttgtgaagcattctatcaaacacatagtgaacagattcttgtgctgatagagaaagagccaaaggaggggagatagcacatgaccttgtagatcaagggaaatagcgtcagattgctgacagaatccaaacattggagatgagttagcagtcgccatggtcagccagaaagtgtatagaaacactaatcttgtgatgaattgagagaagagagaccatacctggatgcacatcttcacggggagatgcatggacgctgccttggccgccaccgcatcctgatgcccgttagtggcagacagcgctgctgtggttggccgccccgtgtgggccctgcttagccccgcgagtaggcctcgcgtcgcatcgtgcgccactacccttgttgcgccatgagggagccctgcgtcggcgttgcctaccagccaggcctccagttgccgctgccaaggggccgccccccagccatggggccgaccatggcggaggtctagccagtagtgtccctagccaaggagctagccagggtgcccgtggagccaaccacggtgatggccacgactgcgactctagtcgtcaagggctagtgatagtgctggccagtcacgacctcggcgggggcgaggacggtgctcttaatgtgatctcaccgtggacggaggcagcaagagaggaagaggaggagcgacacggatagggagggagggatgaagggaaaaagcagagtttttttttttccagagaaattcaattggagtaggaatcgaacctagggtggtgcggggatgcggggaggagtagggctcgttacgtagagaggagttaggagagttggaaacggcttctaacatcttaatctcagacgttggatttctagttggtgtgttctgagccgttgatcttgaaggagggaggtgacttgaagaagattttaattatagtagagatatactccctctgtccataaaagaattaattcctagaattcgtactagtcaaacttttttaagtttaacttactttatagaaaagaataacaacatctatgacataaaatgtgcatcatataaaaagtattctatgatgaatctaatgatattaatttaataccataaattttagtattttttatagaaatttaatcaaaatttaaaagtttaatttaagacaactttaaaaaattgacttttttttagacagagggagtacaacgaaacgattgcatgctagtgagagatgctacccttgtggacctatggtttttgtttgggcccaaagccgagagcctgcccatcaataacttacttgaaataacatgggccataaggcctggtagctttatttggcccgtttaggtcgtcaaaatcgttatccacacgcgcgcgctcggtcactacagtccacacgccgctgacactttcgttcctgtcctgggcgacctctggcaaggatgcaggtgccagtccgcctccgcccgctcgtcccgagcgccgtcggaggaggaggtgcgttttcggcggttcttgcgcagtccgtgcgtgagcggagggggaggacatgtcggaaggtaatcagcttctcgtcggcgggaaagggtggcgacgaggcggcgcggcgcgagacgccggaggagacgcggaagcggctggaggagctggacgcgctgctggaggggctggtcgagcccaagatgcggccaccgacgccacctcctcctccgggtaatcctaattccagactctgcctacccatctcagcatttgcatgcagtgtgtctctgtccattcccctaatctttcagttcgaaattgaaaacttcctggcatatcttattcaatgccaacaattgatgctaagtggtacaagtcttctcctaaactagtgcttgcttgcttgcatgacgcatggtttagttttcaaaacctttcaaaatttttcgtcacatcgaatctcgcggtatatgtataaaatattaaatatagataaaaaaaataattaattatacagtttgtttataatttgcgagatgaatcttttaaaactaacgtcatgattgaactataattattaaatacaaacgaaagtacttcagtaaacaaattttttgccaactaaactgtgagtaacagcatcagcattaaagtgtgttgtctcagggttgaatctgtgttttctgaaacggcaacagtatcagcattaaactgtgagtaacgtgcaatgcaggattgtctctttaatactgaaagttttgacctgcctacgggctacggcatgaagagatagaccagtcctctgtgttctgtaggaactttggttttttactttttaggtactcataaattgcgagaatgctacagtatgcagtgtgctgcacagtgtacaactcctgtcacttttatagtagaacagtacgtagtacatactacacattggtgctgatgaacttgccgtactgtcatctcttagtgagtacagtatggaagaagcactgttgtcatgtgttttaattttaaatgctcggtcaaaaaagttggaagagattctttttaaaaggtcgaacataaaataatgcttcaataatctttagccaaggaaaatgaaaaacctctactgatcttgaaccatccgaagactaagattactatttactccctccattcctaattgcaagatattttagctttcctaaatacatagcttttgctatgcaatcagaaatactttatgtctagatatataatataacaaaggtaatgtatcaaaaaagttaaaacatctttataatttagaacggtccaagtgctagttagtactgcgaacaggtatcaattgctttgtaacccaactcaatttcctttgaaacagcatacctgcaaacaaaactcaaattatgtaaagttgctgctcgattacaacgttttgacgtcatattactgtatttgtagtatatttattgtggtttgcttgaaacagatccgtacttggaccgagccatgataacagggcggggatcaaccgatgaactgccagagatctctccaacatatctggcattctcgactcttggacttgtcatcctcaccatcttcaccaacgtcatgttcaatctgtacgtcaaaccttctgtggacggcttcgatccacctgaaaggattcagagagcgcctctagtcaatccagcagatagaccatccgagtagtctcagcacagtgcacaacatacagttttgttaaagatatgtgtcccaagtgaaacggaatactggacagtggactcacattagcttcgtatactagttttctcaagtaaaccattatttggtgggatttagttttcttggtacatgactgggagatttggtgtgttttgcatgctccttcatctctgctttaaattacattacacaagatggcatgtggatccaccacatctgtggaatcaacattctgagtctaataaaccatacgcaactggtttatgagttacattcactagggaatcgagagtgaacatggatctgcactatagaaacacggacatgaatacaggcgttaacaaaggtcaagtgagaggaaggggtgctctggtccctagatctaacatgtcctgcctgtatttagggattgggtgttcatttttatttttatttttattctgatcctccaactcctcgttttttttaaaaaaataaaacctccg

SEQ ID NO: 4187 - DNA, 7402 bp, Sorghum bicolor
gaatggttattagttattacacagaaagtctggttctagaagctcagaatactatactatttagtttgaactaaagagtgtaattaattctctcttaacctgctccatgcattggattttgtcttactgttaattgttatttgctaatttgctaaactctgttacaattgcgcaggtaaagtacacctttaataaaggaaaagcggtgcttgtgatgccaccctcttattcttcagagattcaagtaagtagtctattttcaggtgttttctagagcttaatatctgctgttgctcatttcatcttcattgcaggagtcagaaatgggatcttggcacattccgatggaagagaagtctggggatgagagaggtaggatttggctttgtattggcaggggaggttcctgcaaagaacatggtgaagttcccacaactaatggagttgtccacgaaattcctccaaccgaggcatctaaagtggtgcagcagaggctggcagaaaataagaatgagacgatatctggtaaaagaaaggatagagattgatcacttatccaggagcagcatctacctgggagtttgtcatcttgtgagcaattgtggtgaactgtgtttctgcagtctactttgttgttgattcagctaaggcagttcaagaataggaatgcagcgatagtgccgtcccagatctgcaggatgctgataattgttaatcactttcactggcttgcagacttgcattctccacaagtttggtgtgattctagacaattttgctgcaccatgtattctggttgccatggtcatctagtgtaacaccagaatactagataacctcaaattggctgttcctagagcttttatctcttcagttaaatgaaaaggtgaactttattctggatgtatgataaacatttccaagtgcatttttgagctactgtgccgtttagaaacctgtatcagaatgttacgaaggccattgatgttgttctcatgcctggggggattctgagagcaaatgcacattttttcgaggttactcctaacgtggcaatgtggcatttactataacgttatggctgtagcttcccacagttttccgagtaacccacatgtactaatgacatattaattaggcatgataaattcatagttttcagacgagatatgcagtttgtctttttactagtctatgtttaggcctaagattagtttgacttaggctttgtttagttcatctaaaaatccaaaaatttttaagactctcagtcatattaaatcttgtggcacatgcatggagcactaaatatagataaaaaataaataaataattatatagtttgtttgtaaatcgcgagatgaattttttaagtctatctataattggacataaattaccaaatacaaacgaaaatgctacaatagtgaaatctaaaatgttttcggatttggattccttatgtttgaatatccgtcatcatccttaaaagatgctacattagtgaaatgctactccatcaaatcaccacaaaaatctttaaaaaaaagaagaaaaaaaatcaccataaaagtgaccaagagtaagattttctaatttatcactctgagcctatttgtttgaaaaatcattggtgaaaatattgttcattaatttattatgagagaaaaacaatgttggttgatagaaacacatataactataagacaaacgaactcaaccaaaaaaaattagaatctgagctttatagattgataatgtatttataattttatttaaatctaccagtcactaaatagtatttttgtcgtgtaacaaatcaggcaacaaggccatgcctataaagattagatccacagtccatcagtcagagtcaccaccagattcgcgtgtagtgaaagctactggtagatcgctcgacggtatccggaagccaccgaggcgagcggcgagcgcacgcaccgggacaagcacaacaccggagaaggaggaggtgcgagatggcgacgtcgggatcgggaggcaacgagcccggcggacggccctggacggcgaccagcacgtgggtccccggtcccgccggcggggccgtggaggacgctgtctcgttcgagacctccgacgacgacgcggaggcgtcaccggcgggcgtcgtgctctgccacccgccggccgactcggaccgcgacatgactccctgcccctgcgaggtcactggtgagtcctcgctttgtcttaggtagtacccgcctagtcaaaatttggaggattgttgcgaattgctgtgctcacgttagtcgaatccttgatcggatgcagctgcgcgctctgttgggaattgctgtgttgctacttgcgttcgacagcgtctaagcaggcaaaaccctagtaggcttgtactatctgaaccgaattgggcatctggttgtttgggttatggagatctagtgctgtgattgtgggtccctttgttaatcttacgctctgtctaaactaattaactataacgatttgttgtgatgcctagaccctgctcataatgttggtacagactacataagtatgatcactatgtgagatatagcgactacataagtatgatcactatgtgagatatagcgtgtccattttcttttgaaggagtggtggttagttacatataacactctgatgcttcttattcaatccactaccatagcaacagtatttggtagtttcagatggtatgatccttcagaaatttcattagctggtgttttacatctactagctaaataaacattgtcggattctgctataccatgcaatctgattatggcattattgccaattctattttaatagcatcatgcctggttttgccatcttctattgaacatttgaaccgttgaattcctatggaagcatttagtagtgcaaatttgtagacagttgcattctcattctgtatacacaaaaatttattcaaggattttattcagttagtttcaggggaaagtatgagattcacagggtatatgtgcgaagcacagctcggatatatgaactataccactctcctgatccaaagggtgccagcaaggattatctatgcaccgtgcgttgtggacttgctgttaaagaaccgcagccctgtggtgaagaaagtatgtctcagtggactggcagtgcttcaaacagcgacaagcgtgaacatgaggcaaaaagtgtaagtagtggtagtgatgaagataattgggttgatgtcaagattccagaatctcctgctggaaataaaacactagaatctcaagaaaggaatgccattcgaacctgccaagaaaatactctggtatgtaattcatttttttggttttgcacaataaacatctgttaatagtcatttatcaccagaaatttctactggcagtggttttgacataggtcacctgaactttgttgaacctgtagaattaatccagtccacaacagcatgaaaattgattgaatgcacatgtagattcgtcaaaccgatagatattaaattttctgtatacctctgaaatgaaatgaggaagtgatgggagataagagatattgaataccagaaataactagatcagttgttgtgtgagtttttttaatactttgtgtgagtttgtttagataaaataaggatggttttcctttgttaggagtttcttattgagttcttctcaaggtatctaaagcctttttgttaggcggacttacaagttgcaactttgaatgtagtaaaaacatctttcttatcttttgttattatatgtattgcaggcacactatgaagctactgctgagatgactgatgttaacccttgtgtgtctcttactatacggtttctatcacttcagtcgaaggcatcagtgcacattgaggaaatctacatatttgctgatcatgttgagtccaccagtgatgtttcagtaagaggtcctggaaacatgggaggcagttctttgctggcaatgcttgttcctggccttatgcaaatgtctaaatcaaggaatttgaagatcgatgacagttatttttctgatggatcaaggaatcaagagagcagcacatgcaaaagggttacacaggaagcagtgctgtgtagcacaaatgattcaaagtatacatctgtagggatagaaagtgcaatgagccctacagttggtgttacagtatctgatgaaaaaaatagccaaggtgagttccagttcaaggaccctgattctcttccattgcctgtacaaacattaggaagtacacaagcatcatcagtgaaggaccagcgagaattgaacacaggtcatgttggtaatccccttctgaaggaaaactttattccttataatcatattgagagaaagctggatactctgctctcaaaggtagagaagatggaattatgttgctctaggtttgagaacagcatgataaagccccttggtagcattgaggcgaggcttcagcgactagaggaacagtttagttcgttctccatggatattcagtctttgagaggttcttctgcatttaggtcagcaacagatggtatgtctaatacgatgcgctcacaggaggaagcacataatgatgctaatgataacagtatttctacaactgacaggaaaccaggtttagctgtcagggcgccagattttatgtcagatgattactgtggttataatgtaataactaatggaaaccatgttagttttcgtgggcctagtgtggtgccaaggctgcttgtgaaggccactgattttattgctcaacctgaattaaccgatgcaagcctccatgatgggtctgcttctgaaaaggagcataagacttccccgggtttagttgtcaaggttcctgaattcccagatgatgatgatgatgatgatgatgatgatgatgatgatgatgatgatggggaggataatgattatgacaacgatgacgtggaagaaaagaaacaagcagaagtttgtggtgatggtgatgatcacatatggtctgatgatactctgaggaaaagcacagctggcgacacaaatagcaaaaaacctgtatctatcaatggtgcattggcgtccgcattggaagcattactcacttccaccaaaggaacatcatctttgaaacctgctgtttgcactagcagtaatttaggtgctgaaaacattaacgattccttcagttgttccctttctcctggaaaaactggcaagatgcccactaaagatggttcagctgaccaatttctgggtacatctggtgatgctaatttggttggtgccatcatgtcttctcaagatattgatacaactcctagcaattctctctcaaatgaaatgttggatagcaaggttgagataaatgaacagaacgatgatctcagtacagaaaaggtggcatttgttgcgatcacagaaccattggatgttccctcacgcactgatacaattgaggaatctattgatgatgcaagttgcgtgaatagacaaagcaatggtcctaatctagatacaatgaactgtggacctttggatcctcctaagcctcctacattgtttgaacctgttgatagtggagttcaggtgaatgaaaatagaccttccatatccttagtggagtttcttgcagcaaggaatgctagctcttgtaagaatggtacttctgaggcatgccttggtaatggtgatgctgaaaagctgtcatttgagagaaaatcagctggagctggtaaaaactcgaaaaatatcagtcaacttctagtgaagaaagctcttgaggctgatgtggacgagagaaatcttttgtccagcatacccattggggcaaaatttgaaggatcaagcagtcttgaccccagaactagtgggcacgatattaataatacaaaggaagctgtctcagataaggaatgtggcctgaaggatacagagaatggatttaggctctcttcgaggatggactctatattttctcagtatcatgctacagattccaagaaaaaattggttgagaacagcagtttggactggagtctagatgagagtttctcaaaacagaatggggaacattcctggtcaagtttgagtagtatggagtcgtttagtcgagcacctgccagagaacctgttgtttcagggaatgacacatcaggaaattacgcggaagaacttcttgcaggcattggagatcgtcctgttgcaacacatatttttgtggaagagctccaaaaggtttctgatgatttgctttatgagtttaaggatgacatgctaggcatgacctccgcagcaaagggtacaaataagagcagcctgtcccttgaagtcttgcttgctgaatcatctgattctgaagcacaaatttctgatctggagggtattgacagtggttctggtattggctcagctcaactgtttagtacactctcatcttcagatgacgatgcttctgctgcagacgagcctttagttgatgttgctgacctgagtacaccatcagagccatatacttctgcccccaatgagcctctggttgacgtggctgacctgacaaacccttcggtgaatgagccttcggctgatgtggttgatctgctacatacttcaaacgagccgttcgacagtttgaatgatatgccaaaccctccagagatgtcttttggtgggagcagtggagaacatgctgacagtcttatataaggatagggctatgcgatactgatagttcagagatgaacgaaacatactgctgcactagttggtgtgtcctgtacagtgatgaacgctttcttccaagttatgcagaagtttttgtacataaataagtctttatgtcggcatcaatttatactaaatactatgaaagcagagtaactttggttttgggttgctaatttgctattctcccgtttgtgtaaatccattacaacctaacacttactgttgcccgttcattttcaagttctgagtattgcaggagagaacatagttaccacttgccacacgcccctacattgggtacgtttcaattggcagcgaagtcaaccgacctgagttacaatcaagaatcaacccttaatctagaccggacaaggtatggcaaagcttttcactgcgtactttcattatctccctcttcttcgatacttgagcataactaaactgctttattagttatacgtaatttcttgtactaatcacgtgatcatttaaccgctggtcgctgacaggtgaagctcggaacacgccatgttcttgtgaaacggaacagcgcatgttcgaacagaagaacaggcggcgctctgttcacatgtgagcttgcctgccgcctgctgcgcgcctgcgctccgtgtatagacgcacatgggctagccctgtctatgggcct

SEQ ID NO: 4188 - DNA, 5921 bp, Sorghum bicolor
gagtcgctggaacggcaggttctgtgcgtacgtgacaggatttggcatgtggcaactcgcgcggtacgttgcaaaagtcagtcaagcagcacgacaaatgagcttcgcttcggccgctcgccaagatgaagttgggcgacaagacatggttagtagttgcattcactttgatgccggtttgtgtacagcgcttcagattaatatcaatccgaaaaattcacagaaccgtccctcttgttggtgaaccaatccatgaattgtcgacgaatttgagtttttaactggactcaaagtatttgaattcatccttcgtgttcgtggccgtgaaaaaaataacgcacaacggcccttagcacctagtgggcgagctcgccgcgctggcgcctccacatgacccaggcacccagctcatctgagcggctggcaccccgcaccccacgtgccggcgctggcctgacaccttggcgcatcgcatgggcgtggcacccaccgggccagccctgcgtacacccggtgttgatgaaagcatgcgcccgggcgggccccgggtcggcaacgcacacaccactgtccagtccactgaaaaaggccgttcgaccggccggaccgggtaaaattgtcgcaacactttgtcctgttagccacttagccccgcgcacaatggattggtccatggtccatggactcgcggcagccgtggcgaccttctgtcaaccgctatagacaccaaggcatcgtatacaagtatttgcactatgtatatgtgctatatatatattgctataaagagccctacaatatccataatgtgtgttgtatctacagacagtgcaatacataaaccaaaggatatgagaccaccgtgaatctaagcccaccaatttagttatgattattttaaaaatgacgacataaggttataagtaccaattcttctctcaagcatcccttcttcacattgtagtaattctaagggcttatttggaacatagggatttacaagatttattttcacgggaaaaacacaggagcgaggaaaaattcccatattccaagtaggttctaacattcttttatataaattattcattagctctatcattttttttactcaaaagaacatcttagagtgtggattgaggtatgatagaccaccaaacttggcgccatcctactacatacaataaatcaattttgttttttaacctctcatgaatctacattcccgtcctatttttgtgatttgagaaagtaaaaaaactataactaattgtaaaggtagttttaataccatgtctaatttaggaggatcggaagagaaatatagtgatatattggactacaatcaactcagttttactattattaaaaaagacatatatacctttcttaaccatatacccataaaaaagttgcatatagctaaatccatcaagttatatttatcccattctttatgacttatcctaagattaaacattttcatttgctaccacgggccatgccactacaggttgtcaccttaggcttcaaggatcctatactcaaatttaaatttaaactattatcaacttttataatggtgcgtttgatcccttcattttggtagaatctaatttaaaaagttaggctatttgatttggaatgtgagattccacaactttccaaaatttacatataaactatcttaaattcatagggtggaagatagaaaatggattatttcttctttcttctacaacttaagtgaagttgtagattttcttctttctttttccacaactatagtttattataataaattcaattttaaggatgggcctctgtttatataatattacagactcaatttattctgtacgcatagtgcgcctacctgtcaccgtcacgttaatagacggcacggggactgggcagtgggccggccggctcacgtgaacaacgcccacgaagtagcgttggctgttgcaaaagcaaccgtttccagttccctctcctccctagtgcacccaggaaaccgccagcacctctctctctctctcctccgcctccgctcccctttttatcgcccgatctcacacattttggaaagaggagagagagaaagagggagagattagagggagcgcccccctgcccaaggaaagagaaaccgcggcgcgaggagcaagggaggaagggcaagaggcaagatgagagagatcatcagcatccacatcggccaggccgggatccaggtcggcaacgcctgctgggagctctactgcctcgagcacggcatcgagcccgatggcaccatgcccaggtgaatgaatgctcgatccctgtcgatctcccaatttttttgtctgcggcgcgcatctgtcgcgcgttctagggagccggctcctcgaaattctggcgtgctcgttcgtcgcatttccttagatgtttctcgttcgctctggttttttgttcgaattcggcgaagcaaaccatgggctgggttggtgtagtggtggtacttccgtgtcggctccgtaattttggttcgtttgttcctttgcgttgtacttctagtctggtccttgcgatgggggtttgttttggtgtgatgtgttgtggtttgttaggttttggtacattttcttgccggttggtgagagattgcatgagccgggcttgatgcgacgtttcctaattaagatgcttgcctgttaattggtgcatttgttcttttcctgcgaattaggcaggcgccacacaaggatgcgttgaggtcctcaccaccgtgtagaggagcgcacgtttattcatgtgtacttggggacaaatagggtttccagctctgtatgtaaggcgcaagatctgaagaactgaatctgtggggatgtttaataaatataaataaatgtaaccgaggagctctgatgaatgtcagaccatggatctccctggattcacgatcctctgttaaaagtggcatgcttctctctgtttgcctgatcttgtagtgccatagaaaattgccctaatgctactctgtctgataatagaaaatcctgtttaggaacctgaggaggcaggtttatcttttagcgcatatgccaatgattactgctttagtagagttcctcatccattttttttaacactgtggtttggttgtgatgcagtgatacctcggttggcgtcgcacatgatgccttcaacacgttcttcagtgagaccggttccggcaagcatgtgccgagggctattttcgtcgaccttgagcccactgtcattgacgaggttcgcactggctcgtaccgccagctcttccacccagagcagctcatctcggggaaggaggatgcagctaacaactttgcccgtggccactacactggtaattcaccttgtgtccgtgaatatgtaataggagggagtcttatgcttctgcaactgtggatttgttcaattctaattattgcggaatgcagttgggaaggagattgtcgatctatgcctggaccgcgtgcgcaagcttgcagacaactgcactgggctgcagggattcttggtgttcaatgctgttggtggtggtactggctctggacttggttcactgctactggagcgcctttcagttgattatggcaagaagtctaagctcggtttcaccatttatccttccccacaggtatgaccttacctgtgccaaaacttcatattagcatcctagtatgagtatccatggatgtcacaaaagaaaaatgtatccttttccaaaaggatgttggcttaagtatatgagattgaaagaatacatgaagcaggtcgacaatttataattatacaccaacaggaaatggttttatatagaactaatctatggatcatgtaatttggtggcactgttcttgccttctaaatttcacagatagacactgattattagatcagcctagcattatttaaatcatgtgtggacaaaacaagcaactgttgtggacttctggattgtgaggaggaccttcctgtatatggtttagaccatgattagtacaactgtcacaggctagaggtcttctttatgagtgtctttaaatcatgcattgcatatgtgccaacattatcctatagtactgctccgccctgtccatgtgatgtgggccattcagcttgttcatgtgagtaggttttctgcatcttagctgttgtggggacagtgggtagagatgttcgatgattttgggtctggtccatggttttaacttttcatctaatgccactctggattgcaggtgtcaacagctgttgtagagccatacaacagtgtcctctcgacccactccttgcttgagcacactgatgttgcagtcctcctggacaacgaggctatctatgacatatgcaggaggtcccttgacatcgaaaggccaacctacaccaacttgaacaggttgatctcacagatcatatcatcacttaccacctccctgaggtttgatggtgctatcaacgtggatgttactgagttccagaccaaccttgtgccgtacccacgtatccatttcatgctttcctcatatgcccctgtaatctctgctgagaaggcctaccatgagcagctctctgtgcctgaaatcaccaatgctgtttttgagccctcaagcatgatggccaagtgtgacccaaggcacgggaagtacatggcttgctgcttgatgtaccgtggtgatgttgttcccaaggatgtcaacgctgctgttgcaaccatcaagaccaagagaactgtccagtttgtggactggtaagctgtctttgtcacaatttgagttgcacttatttttaacatgcttatcacttgatttgcgatgctaactaactccattatgctgccgcctcacaggtgccccactggattcaagtgtggcatcaactatcagccaccctctgttgtccctggaggtgacctggcaaaggtccagcgtgccgtgtgcatgatcagcaacaacactgccgttgccgaggtgttctcacgcattgaccacaaatttgaccttatgtacgccaagcgcgcattcgttcactggtacgtcggtgagggtatggaagagggtgagttctcagaggcccgtgaggacttggctgctcttgagaaggactatgaggaagtcggcgcagagggtgcagatgacgagggtgacgagggcgatgactattgagtagctggttaataagtagctcgctggtggttaatggttggattattttgagtatactctgtatggtgctccactccattgtgtactgctgctgtgtgtgtttctattttgtattctgtggtaaattgttcgtagccccctattggtcatgattgttcatatcatactgctttggtttgcaaatgcttattcgtgcaagcgttctgagctcaaccgttgggtcttacttaaaaacaaaaggcattaggtctcgggagttatcttttgctctgctctgcagcatgtgtctggatcatgggaacattgacatttgagaagtcttgatagtatccgtatcacggcctagtgtttttttttttttgatttgaaatcacgtcgggcctgtttagttccccaccaaaatttttttcatccatcccatcgaatctttgaacacatgcatgacacattaaatgtagacaaaaaattaagctaattacacagtttggttgaaaatcgcgagacgaatcttttaaacctagttagtctatgattagccttaagtgctacagtaacctacatgtgctaatgacagattaattatgtttaatagatttgtcttgcagtttcctgacgagctatgtaatttgtttttttattagtttccaaaaacccctcccgacatccttccgacatattcgatgtgacacctaaaaatttttcatctccaatctaaacaggccctaagtg

SEQ ID NO: 4189 - DNA, 4875 bp, Sorghum bicolor
gaccacagaaacgcggcctggcctgcgcggcacctctggaagactggaacctgcacactgcacactgcacactgcacacctcccaacctgtcagtcatcaggccatcacactgccgctaccacgccgcctccagtccaaagatcaaaaagctccgtctctcgtctttgattcctcctccctccacctttcccacctctttttccctccgtgtcccctccaggagactatcggatctcgctgagctcccggtcaatcgctcgcatttctttactaatcgccatttctcggagagatcaatctttaatggcgcttaatcatgaagtgttttgagttaaaccaccaagaaacagagggaagctagagagcctcgaaagcctcctcggatcctctacgtgctgccgtgggagaggggagagagcttcccttttccaatcaccctctcgctggagtgcggcagcagtccaggctccagtcccccagttcgtgctcacttctccattgtcggcggcggccgccgccgcggtccgtcctctcgctcccgctccgcagcgatccagggagttcctctgtgcgcgtgtttggtgagggaggaggaaggaatgactcttctttgattgaggacaaaaatcaggtggcgatcttctttcctggctgattttgttctccctttttcttgtactgttgctgagattacgatgccgctgtttgttgcgctcttttggagccttgtgatctttcctgctcgtgactttctaccaactgcgaggttccttagaaaggggtggcatttgggctgacaaacgaaaacgatagatgtagtgttcttgaagccttgctccctgctccccaggtcctaggtgttcttctgtcttcgctcttgttctctgatgcttctagtttcaagggcccttaacaattctctgttattctgtccgtagtggttttgttcgtgagtttcacaaattttcggcttcactgaatttcgatgtcatgaaatatgtggcagtagaatttgggaatctttgccctggcattctccatttattagctgccaagaaattttaacacgacgcattatcaattactgtgatgagcctgcaagattggacttaaaccacctcggattctccaatcctcaagttcgtgctcactgctcgcttccatactccagggcggccccgtggtccatctcccccgcggcccctcctcgctcctgcttggctgctctgcagcggcttctgctgctagtcctgctactccgcctgtagcgagttcctccttagaatggggtggcattttagctaacaaacatagatgaagtgttcttgaagtccaagtcctgcttggtgtttggtagagaggggaaatatctagctgttcatctatctttgttttcactgatgcttctagtttgaaggggatttcacagttccctgttattctgtcatggtcatttttaatttttaggctttattgaacttcaatgaattgttcattaacacgtggcactagaatgtggggaaattttgcccgtgttggtgtggattctggaggtcccagctcatcgattcaattttttcatttatagcggccaagggatgatcttgggtgacattttcagataccgattcattcacttgggattggaagatagctcaagcagacaggttcatagaaatctctagatttctagaaccattaatgttctaagcttgttacttcatgctggagatcaggcgaaatctctaagcttgttttctagtgtcataatcaatgtgtgctctacaaaaatgattgaatgtattgcctgcattcacaccatcaatatgtttcttagctcaagtattccgagagatacagtttactcctaaaattaaagagttttctttgctgtatatagtggtttagttaacccaactttcaattttttcagcttttcctgagagcttctgagaagtgtccctggctcacagctaatcagatccttgggcacaaggatatgtcgtcgaagagactacatggcgtgtttacccttcttatgctcatggttttcaatgtttcaggtactccagtccatatattttgtagtgcatggatatgattcaagctaccttagcgcttaccatattttcagaacctcactctgatttactagtttggtgggtttccatttcaacgaggacattaaaaattgatattttgaactgggttttaaagtttcagcatgtatcctctatatttgcataacaagtattgtctcactctgtaggggcgtttgttggtatcactattggcaatgacatgtcgaacatgccaccagcaacagatatagtgtctatcctcaaagcaaagaagactcagcatgttcgcctgcttgattcagaccatcagatgttgactgcccttgcaaatactggaatagaagtgatggttggggttccaaatgatcagctacttcgtgtgggccaatctcgttccacagctgctgattggattaataagaatgtcgctgcttacactccggcaactaacataacatatattgctgtgggcaatgaggtccttactaccattcccaatgcagcacttgttctcgtacctgcactgcaattcctccagtcagcacttttggctgcaaacctcaatactcaagtgaaaatttcgagtcctcattcaatggatgtgatctcgaaggcgtttcctccctctgctgccactttcaattcgacatggagctcaataatgtctcagtatcttgagtttctcaagaatacgggatcttcgtttatgctgaatgcccaaccatactatggctatgtcggagggcaaggcgtattccccttggagtatgcactattccgctcacttaatccgaacagtcaaatttcagatcctaacaccaatctcttttataccaatatgtttgatgctataattgatgctacctacaactcaattcaagcaatgaatttcacggggattcctgttttagtcacagcttctggttggccatggcgtggtgggccaagtgagaaggctgctactgttgataatgctttggcctacaatacaaacctcatacatcatgtactgaacaattctggtactcccagccaaccaaataatcagtcaagcacctacatctttgagctgttcaacgaggataatcggtcagggcctgtatcagagcaaaattgggggattatgtttcccaatgcaaccactatatactctctatcatttgaggacgtggccacaactattcctgaatcgccagctttgcgtggggtgttttgtgtggcaaattcaagtgcaccccatagtgcactgaagcatagtttggattgggcatgtggccctggttctgcaaactgcagtgcaattcaacctgggcaaccatgctatgcatcagatgatattgtagctgtttcttcttatgctttcaacgattattaccacagaacacagtctagtggtggtacatgcaacttcaatggcaccgcaatgataacatcaactgatccaagtaagctacattcttctctcatacaattaggacactgtagagatttttgcacaatattgattagtttgtaatggttccagtgattccttttgtttgcaaataatttatagttgcacttaatgtcagcggtaggtggcatttcaaaatataaaaatttagcactgatatgtttcatgcgcccaaggccttttatctgcaagatttaacctaaccgttagctgcagtaaccgtttgatctgtgttttgcatggactattcttctgttttgttatgtaaaggcgagaattctacacccttagctagccagcgctcaatctataggcaggaattagtcaaactaggatcattgctcgagctgttacattgatcataaatcagtgtccaaaatgcaatacaagaaaaacaatctatggtcacacaactcctatcagcatcttgtgtttatgcttttgcagttttgcttttctaatttattattataaagtcactttttgtttttaaatttaatctctagaaatcaagggtatttagtacataagatctttttataccatgttaataatgtgagcctgatctaaattcccccggatttcttgcaggccatggttcatgcattttcgctggaaggtaattcccgtgtaccatttcgttttataggttctaaccttattttgtgctctgtattgacaatgtaatttgctcctgtttgcagcactggcgccagtggcagcaaaggtggaacggcctccgggcctgcaagcccggacagttttgcttcaaaatcccaatcatgctggttgattcacctagtagccacattgctgcccattctatttgtagtgatgtaaagcattgtaatcaggttgccttttggatgagatgcccgcaatttatcgtggatcttgtcattagatactgtagtgactagtgagccattttggtgtgctgtattcaggtagatgccatgtaatcttatcccaaaatttcttgccctaggaatcagtatttcgtcaaatcatcaattttgaatgccaacttggaaaattgagttgtgacagacctctctgaatgttaaaagttccaaatgatttgtacttccctgcatagtatttagtttttcagctataagcatatggtttaagtggtgacctgctggttggattttttgagtttatctcgagtattttggaacacccagtgaacccagcctggccaaaaaaggatctgtcggttttcttcaagattggcccctgttagtttgggctcaagaacaaaaaaggattcagttcggtgactaacagcccggttcgacccatttaacccatccagaccaagttaggccctgttt

SEQ ID NO: 4190 - DNA, 6138 bp, Sorghum bicolor
gaggcgagacggtgactgtgtgcgcgcgaggtgtgtgaagtgccgggctgctccgcgccgtcaggttttgttgacccgggccggagaaccctctcgcggctcctgtgggccacaccacctggtgcctgcgcccaactcgtgagccgtggcgcgtcactgcctggtgcggcgctgcctgccgcctgccgcctgcgcggtggactctatggtggtagcggccaaacgaggcagtggatgagtggacggatgatcccgtggcgtggcgttatccctgaaaaatcttttattttccggaagaaaaatcggtgtgttttgatggacatgcttatcctcctcttctattcttggcagtacttccctgtgagagtccacgcaattaatgttgatacgatttggacattggccgtatcttccaagatctgtcgacaataagtttggccattttgatttcgacgacggtgtgattatactccatatatctcgtgagaattgggctgcttccaaattcctttcacaaggaagtccgatatcgtgttaatggacttaaattttttgcaagaaatttggtactccatccatcccaaattgtaaggccttgtttagtttctaaatttttttttgcaaattctccgtcacatcgaatctttagacgcatgcatggagtgttaaatataaaaaaaaataaaaactaattgcacagttttgtcggaattgacgagacgaatcttttgagcctagttagtccatgattggacaatatttgtcaaatacaaacgaaaatactacaatgtccatttcacaaaaatttttagaactaaacaaggcctaagtcattctaagaatcttagagagttaaaacattttcacgtttgaccaaaattatagagaaaaatactaaattttgtaacgtaaagtgagtatactatgaaaatataatttaaaaagaatataatgatacttagttggtatcacaataataattattttattatataaatttggtcaaatttaaaaaagtttgactctacaagattcttagaatgacttataatttaggatggagggagcatataatagtccgcttaaaaatcaagatttgactatggcatttaaaaatattgtgttacttacaaaggataatattagctaaaagaatttggaagagagtaagattcgttacttctgtagtaagtctgaaatgatttaacattttttagtgccatcatgatcgattctatggcaagcttgttatttggtgtttggtttcaaacaaccaacaagcagtttacattcgttcctataaatgggaggcaacaagctagtaatgtatattactttgtgtaccctctcaatatctagtccagaaccttgtaaaaagatttaactttgggtgtgcttcttgtttttcctcgtggacctatgtttctttctgaagaagcatgaagccataactattttctattatctataaagctttaatattattttaaataaataattaaataactaggtttagatatagatttggctttggtgtttttataaaaaaataagattatttgtttcataatccaaacatgcaacaaatcatataaccactttggctctagagactccaaaagaagggtctaaagttatgtctaaaaattagacaactccacaaaaatccattagacatataagtttttcctgaaattattaaatcacataagtgagccaaagtgatctaaaatttagtcttttattagtttcacccaattaataaactttagaccgtggcataagaaaaaggccgtagcctataccatgcgacttgagtccgccgcccagattgcagcccatcctccgcagttcgcggcccaagctttgttttggcccagtagcgttaaaccctcctgacatcccctcccctgtgcgattccgctgcccgccgcggtccacgtcagtccgcccgcaagattcttccttcgtccccatccaaacggccccccctcaccgactcaccgtcaccgatccctgacccccaccgccgtagataatccaaaaataaaaatccaaggccgcgccgtacgcgcaatcccccctcgctcgctccatggcgctgcagctccagctgccgcggccgctcgccgccgcccggccctccgccctcctcccttcccgggaccatggcgcctccgcttccgcgaccgcccttcacgctcgcgccggcggcgtcgcgttctcgctccagaccaacgtgcgcctcctcaagcccaaccgccgcgtccgccgctcccgggacccctactacgacctagacgaggacgatgaggaggaggcggagttcgacgaagaggatgacgacgaaggttacgagagcgatgtaagttagccccattgccaatttgctagtagctactcctcacttatcatcgtccccataggtttgcttgatgggacacctgatctctgccacccttggatcatatcatcgtatcaatgccatattaataatagcaattgaacaagacgtttgctatttgcgtttcgcatgtggagcacaattggctttcaaatacacagttcgcaccgtgagctgaacgagctaaacgggtgtccttgtataggcacgcaacgaaccatgatggaagagttaccttaaatctagtgacctgtaaggtttagcctaccattttgcaacttatgtgattcgacttataggattggaactactgactttgtaatgttcgcgttctcctgcagtttccttctaacatgtttctctggtgtaaaattgtttgtattcattattggtgccctctctgtttccccaagctgcgccatattgtgaatacaaggaactaagtagtgtggcgtgattgatcattagcatttggtcggtgttcctcagaatcagcatcaacagattatggcttctaagtatgaagctgcataaatggcagattgcctcccaatcccagtgacccatattgcaaacactatattcttcagaagacatttgaatatggagcgagagtgcctcccttcatttgctttcggtaaaagtcaggttacctctgttaaaaaaacatctcctgcagtgtgacggaacactataatggctcaaaggattagcttaggttttaactgaatgcccgtaactgatcagcaccacatttttactgaatatcagtccaacatagtccatatgtgtatattaaaaaagagagagagattgtatgcatgcattatgaatgtagtacttttccgttgtgttccagtaatgactgcctgagatgcatatgtttcactgagcaccccaataaaattagatctttgaattctgagttcgaattacatgacaggcaaatgttgaacatggaaaaacattgtgtttttatatcctgttgtttatttgtccatggaacgtaacattggaatcttatcattagttattttcatctatatctactatcctaactttatgcttggtttccttttcaggatgacatgtcgggtttggaatatcctggtgtactttattcaaacagccctcgtgcttcaagcaagagacaaggtatcttaagaactatgctaaatctatttagaaacagtggttacttggtacttaaactctaattctccagaattggaacctccactggtaaaagaaaactgggaaggaagacaacccaaaactcgtgataactacggcagtccaggaaaaagtaagtccctgtatcctaggagtaaagtgggacgatcatcaatggatcttaagaacatggatagtgaagttgaggtaaattactcagcatgtaaatgtaacctgtccatattgatttcggggtgcactgagttaacgttgtttgttgttgcagttgaaaaatgcaagtatctctcgaagtctgttccagaaactacaagaagattatgactttgatgacaaatggttaccgctgattgattacttgtgcacatttggactaaaggagtctcattttacttacatctatgagagacacatggcctgctttcaaatcagtcaggcttcagcagaagaaaggttggatttcctgctaagtgctggggttaaaagcaaggatatgaagaggatactggtcaggcagccacagattctggaatacacccttggcaatctgaaatcccatgttgattttctcgtaagcattggagttccgaatacacgaataggacaaattatttctgctgctccttcgatgttctcttacagtgtggagcactctctgaagccaacagtaaggtatctgattgaggaagttggtattgaggagagtgatgttgggaaagtagtgcagctaagcccacagattctggtgcagaaaattgatagtgcatggaaatctcgatcgcttttcctgacaaaagaactgggcgctcccaaagatagcatagttaagatggtcacaaaacaccctcagctgcttcactacagcattgaggatggaatcttacctcgaataaatttcctgagaagcattggtatgagaaacactgacattctcaaagtattgacaagtcttactcaggtattattacttcactcatgtctttgttccctattatttctattcttgctttcctttttcagttatgttcgttattcattgaacatgtgtctcatggtatatgtactgttgcacattccatgtcaggtgctatctttgtcattggaggaaaatctcaagccaaagtatctttacttggtcaatgaactcaagaatgaggttcaatccttaacgaaatatcctatgtatctgagcttgtctcttgatcagaggatccgtccccgccaccgttttctggtttcattgaagaaagctccaaagggtccatttcctctgagctcctttgtgcccacagatgagcgtttttgccagaggtgggctgggactagcttggagacataccatacattcagacagaggttgctgctaacaggttttgcagagaagtctggaaggaaaacactagtctcaagacggtagatgcctagggggtgggaatgggtttcttttgagcacgtgctcctaacagtaagatgatctcttcctgatttttagggtttatttggtaacagtttacataatactgatggttcactgttctcaggaaatgggcttggttgctgacttggtacctgatgctcactgggtttatactacatcactaactatagcttatacttattgttcataccacctctctaaaggtgaagtctcatcgaatgccctcaatcagttgcaaatggatgacaatcagagagaaatgcattatgccagttgccagaatgattggagggacactttgttatctagttctaggagtacctcgccttgattgctagttactatagactacaactacggaacaaaatggctacgttagaaaaatgtagcctaactgtgtaagagtgccattacaagcagccttctgtgctgctgtaattctgtaatgccgtttgaccttgaggtttcctttttgaagtcttgttatcatgaatcatagacggcttgtacatcctaccatttcatggttgttgtgttagaacttttgtctgtaagtttattttcttttgtggcctaatgatacgtaatagtgtagctgggatctactcctatattctattaaagttagtccttgatcatctggtggaggctgttgaataactgtcgtaccaggcgctattgtcgacttcgccacagtaccagcgtaatgggtgcctgccgctctaggagtattagttttcactttaattcctgtctaattcaaaccctaacctgcttcctttcctaagaaaatatgcattgctgttcgagaggggaaaaaggcattgctgttcgagagggggaaaagacattgctgaggctcctccgacagaatttccaagtcacagaccagagcgattagcacttgggatcctaaaggagagaggagagaagaaactaacggagaattattttttttttgacggtcaaagggggggggggggagtcgctccccacctggtttttgtatttcacacagcccaaaacagctatctaacggagaattatgacgagcagaactatatatatggtcccactaagctcagctgcacagcctatcgcagat

SEQ ID NO: 4191 - DNA, 6751 bp, Sorghum bicolor
ttagagcaaagtggccaatagaagatgtgaacaagccaatattcattcaacaagataatgctccatcacatttaaaagtggatgatcctcaattttgtgacattgctaagcaagatggatttgatattaggcttatatgtcaaccacccaattctccagattttaacatcctagatttgggcttttttcgggcaattcaagcaattcaatacaggaaagatgctaagacattaaaagatttaattcctgcagttcaacaggtactacatgataatgcatttcttgtctcattacaacaaagactgcttaaatgatctaatttctttctctcatgtttttgcagtcatttttggagtacaatccatggagagcaaataggatctttgtgacactacaaactgttttgaaggaagcaatgaagataaaaggttgcaacaaaattaagattcctcacattcagaaagaaaaactagatagggaagataggctgccattgcaaatcccttgtgaaccttcattgctagccgaggcacttgctactcttcctgatacaagttagaggatgcaagttagttttttttgcttggtaaacgtcattgtaagatggatgtagggagtactacaataccttgctgtttttttcttcatttgtgctggttttttcttcatcgttgttggtttttgcttgcatcttcctgatgtgtgcctccaccttctccagcacttcatcagtcacgtagatgcttgaacctctcataaccagtttatcgacatcaggaatgtagaactcgcaatcgaacttgtccattagatggaggaacttcactgggatatcatattcttcgtgaagaaggccacaacggccacacctccgagcattccggcgagcttcgtagcaagcatctcttcctaatacgccaccaacaacgtggagcgtgccgcagcgagaacacagagactcgacggagtccggcaccatgtcgacggagtccggaaccatgtcgacggagtccagcacggcggcaccatgtcgatggagtccggaaccatgtcgacggagtctgccgcctccagcgcaatggatcccgacgaggctgcgatgtcatgcgaagagcaaccggcgtcggcgagagcgcggcgaggagcgaccgcacggcgagccgcgaccgcgcggcgagcacgcggcgagcggcgatctcgcgacgagccatcggtggcggagaggtgcaggcgagcgcgcggcagactgcgaacggctcggcgatgtgaacggatcggtggcagagagagacgagcatgcgggcggtgcagactgcgggcgagcgggcgatgcatgtgaatgtgaaacggctcgcttcggcttcaatgcgggcgattgccgaggagcacgcgaacgggcggctcgcagggcaaacgcgtccacgatatgcctcagctgtgtaggacgtctgtttttacgaaatcaggtctcccctctagtacgtcccttttttcaatagggagggagtataattaatctatcattagcacatgtgagttactgtagcacttaagtctaattatggagtaactaggcttaaaagattcgtctcgcgattttcaaccaaactgtgtaattagtttatttttttatatatatttaatgtttcatgcatgtgtctaaagattcgatgggatgcataaaaaaattttaggttggataaacagggcctaaacagggctgctgtccccgcgcgtggtgcgagttcagggcagtgcgtcagtgcgtgcaccgtgctgcgtctggttccggacccacccacggtctgaacataggcgggcggcgggtcccgcgcgcccccgcccgcgcgtcacgcgacgaaaaccgcggacgacgcgcacgggcgagcacagtgcacaggcgcagcacgcagccacgcacggacggcgaggcgcgacgcgcgacgcgggtagaaatacgcggcgccacaccgataacgcccccactcccctcctccctcggcggaaacatcccactccccgggccaccaccacctgcctgcccgtgcccactgcccagcgcgcaccatccccgcctcttctccccagctaccgcgccccccctccggccctccctcttcttccctgtctgctcgaccagcaggggctcagctacctgggcctggctattcgctccgctctccgagtacggtagcctcagcagctggaggatctcgcctgggcgcccgccggacgacgggagaggtacgacgtgcttgcctcctgccttgctttgcttgccttcttgttcttgggtagctggtactagctcgggctcgggcctgtgtgtgtgtggttggcaaccgaaacggatgggaagctgctgtctttgcttgctttgcttcaagtctcggttcaggttcaagctcctgtaactctgctccggctgcgtgtcgtctctggttgcccctgttagtgccgcttcggagcctcgctgtctcactgcggctgccttgaccttggcatttggaattggtttggaggaatcaatttagacccccatttattttttttttcccctgggccattgagagaggggggaaaggggcccccccccccccccccccaatacccacccacccacccacaaaaaaaaaatattagtagaacgaagctgctctgaactctgaagggggatccactctgaagggagcttttcttggtgaatgatgatttttttttactttctccattttccttaaaaagtgattgttttttctgcaagtatcctgcaagaacagcctacaacccccataggctcgtacagcacattcatcatcattcatgccttcatggccttgctctgtggtgaatggtgaaattgtggggaatttcttgtttctattttttttttaaaaaaaaccatgtcaatcaatcgattaggtcttaggatgagcacgatgcacacgagtggtggttagtacgcgtttacaaggatctcttcatccgcgaccgaaaaaaaacagaacttagaagcttttgaccacctaatgttctgaatttttatatatattaagaggataaaaaaaattcttgtgccggcagtggttcaacgtacgggtcaaactccttgtgcgggggttggtttgccgcagaaaattctgcgagaccgaaggcgatacttctttatgactctcgtctgcagcctcccttctgttgactgttcgtacctcaattcagtacgtactagcacgttaaggtttggagattgtacggtgtacatgccttgccatgacgcagaatcgtagcttttctttggtcagccttacagcatcctcctgctgcccacctgggttccctttctgtcagcaggaatttggagatagctggtcgtgcttgtgttcgttgaggtttggtgtgctactgtggtcctatttttggcccggtttagagcaactccaagagagttgacaaaaatagatggctaaattcaagatttagctaaattctaaaatagaaaattatgtaaaaaaataaaaatctctaacagtctttctatacggcaaatcatatggctagcgggacatgcaagctatatttaccatgcaataactccgggatagatgacttgctattttagcaaaccaaatacaatagctgttggactttcttttctcttccaaaatagccaaatatagaatacataacatggatagctcttctcttggagttgcttggaggatttggggactgctatttggtgtacagctggctttcacaactagcattttctgattaggctaactagttatatgatctgtcatgcctttcagcattagcatggatgaaaatagctgtatgctaccttcagtaaagactaaagagaaccttttcgagggagagatactctttttttttcctgattgactagagatgcagttaaacgaatgtgctaactgtagaattttcacaacttgctttctgaggaacacagcaaactatgcttgttgccctcctgaattctcaaaaaaaaaagttttttgcggagttaattttctgtgagtgcttgctgttgagttagcacacctaatttatttctgtaagggacaaggctgcgtacttagttctcatatttcactgtcaaacttcagtaccaattctcttactggtacattactctgtaggttttgttctaacatgcttaatttactgttgcagattctgtttgatcttcataaactactcctagacaactagaagacatattcacacatatcagcaatcaaattgcaaactacgaattgacttcaaatttgacatgcttgtcttaccagaagcaattgataacttggagttgtagtctaccggactctctagtgaaccagtatggctgacactccaacttcccgcatggtgcacccctttggcgacgtcccaaggcagactcccaagcagttcctgtattctggtaactcacagcacctctgttatccataccagtcagcttcggacacccatgtcgtgccgcagcgtcattgcaccatgaggtctcattcaccagatgctggctctgaagaccatgataatcacaagcagtacacactggactcctcagcaacttctggttgttcaaggcatgattctccctccagtcaaagtgtccatgctgggagtggcagccctgtatctcttgaagacagccactctggctctacaaatggcaatggatcacctgtgagtgcatcgtgtgtcactgaggaccctactgatctcaagcagaaactgaaggatcttgaggctgcaatgctgggtacagacccagagatcgtcaacagtctcgagatctccatagcagaccaactttcgttggagcccgaggagtggaagcacatgatgagcatgcccggagggaacctgaaggagctgctgattgcctgcgctagagcggtggaatataacaacagctacgccattgatctgatgatcccagagctgaggaagaaggtttcagtgtctggtgaaccacttgagaggctgggagcctacatggtggaaggtcttgttgccaggctcgccgcctctggcagctcaatctacaaagctttgaagtgtaaggagcccaggagttctgatctcctctcctacatgcacttcctgtatgaggcctgcccctacttcaagttcggctacatgtcagcgaacggcgcaatcgcagaggctgtcaagggagaagacaggatccatatcattgacttccacatcgctcaaggggctcagtggatctctctccttcaagcccttgcagccaggcctggcgggccaccgttcgtgaggatcaccggcattgatgattcagtctcagcttacgcccgaggcggtggtctggagttggttggcaggaggctgtcacacattgctggcctctacaaggtgccatttcagttcgacgcagtcgctatctccagcagcgaagtggaggaggggcatctcggcatcgtccctggcgaagccgtcgctgtcaacttcaccctggagctgcaccacatccccgacgagaccgtgagcacggcgaaccaccgagatcggatcctgaggctggtgaagggcctgtcgcccaaggtgctcacgctggtggagcaggagtccaacaccaacacggcccccttcgcgcagcggttcgcggagacgctggactactatactgccatcttcgagtccatcgacctggcgctgccgagggacgacagggagcggatcaacatcgagcagcactgcttggctcgggagatcgtgaacctggtggcctgcgagggcgaggaacgggtggaacggcacgaggtgttcggcaagtggaaggcgcggctgatgatggccgggttcaggccgtccccgctcagcgcgctggtcaacgccaccatcaagacgctgctgcagagctactcgccggactacaagctcgccgagagggacggcgtgctctacctcgggtggaagaacaggcccctgattgtctcgtcggcatggcactagacattagtgttgacttcagagaatgttgatctgatgggagaatgtttcttgtaactttctaagaacctcgtagtagtttagatatgtttggctgagcactaaaactatatataggaagcctgtagtgatactgagtcggagtagaacacctatagcctgatgctgtgatggcagtcactaccagcctgataatgtgtagtagtaagtttgggtatatgtttcagttaatcagttttgctttgaaaatctgtgtgcatcctgatcctgaagagcgatctcaatcagaaaggccatcaacccttttaactaacccttctgaaatcttcgctagtggggccgaaaatcaacagagaaataattcagctcagtttgcagaaatctagcgggtttttgtatatctgaagaaaccgcacttgtgaaatgatatatttcatttcatatatgaatatcaaactagcatcgttcatatgcaggagataacaaagctttgccaccagatggctctttggttctatcccatattccagtacagaaagaagtttacataaccaaattatcataatctaattaatcataactggttttgctgtacaacgaatgttgagctgcagcgttcaatacagcgagtacatccaagcagcaaagacatcatgtgtcatcgctgcagctccggaggtacaccttgaccgcctccaattgtgtgcggatgcatcttctgaagagattttcatgacgacagtaa

SEQ ID NO: 4192 - DNA, 5523 bp, Sorghum bicolor
aaaaaattaatcttttatgagcactctcaagctcatgtattttaacattttatatcggttgtttgccaaaatcaagatatgtgggttcatattcatgtgttgcttgatgtgtttcaagaactctccaagtcaaacaagattaacacaataaaaaaaaatcttccttttataactaattatttgtcagaaagtgttggaccctcattcggagagtctaagtgcgtatatctcggcaccacgttcaagtacattcgcacaacaatgaaatagaatggtacataaaaacaccttacaacaatcaagtccatagcatgcttgagtggtagaaactctacatactagcaagtagcaactctatctcctagcaggtcatcaaggcctcgcgtaactcctatttctcatggattctttccttgttgatgcctttgggttctgtatatgtgaatcaacgagtgagtatgtaaataaaagtgttatctattccgatcacatgtttgctaaattaatgacaataaaaataaagaactatcaaagtttatgaagtgtttcactaacaataatgcagaaggcagaaaaagaaccccccaacccaccacgcgcgcgcgcacacacacactcaatctcttgtgtggtaaagattggcaaaatgacttatatagaagtgttgaccttttcatactcactcgttgattcacatatacacaaaaaagtcatgtgcgaattaggcaaatcgagctgtatgagctaatgtattgtttttctacgcctaaaggcctatttaatttgaccttctagcaaggagtgctccaagcatcgatctccatccctagacactcaaaatccaacgtctagggagcactaaacaccaggtaagtttgcctaggttgaaacaaaataataaatgtcttgttcgtttgagcttatcaaccgaatctaaagccatttaacagtgttttttctcacaacaaatcagccaacggtactttctaccatgacctatcatccaaacaaacaatatgttgctacctgcgttagaaggtcatctgaacaacataccatagctttctcacaagctctaggcgttgctctagatggcatccaaacacaaccaacgtacagctcgcgcttccaactataagagtagctccagtgtagagtaaaagtcgaaccgtggaaggaaaatcgaactttacacactagagtttttgattgttggatgtgagaatttatcgaccctccaaaacggtttgaaccatgagcttcacaaatgcacatataatactcgaggcatagagtcttcagggcagacacaaaagctgatcggttttgtgaagtagaatatgtacttgcattttttttacttgaacatgggtgataccattataccaaacaaatcacgtgattccatccaaattgttaaatgtttgattttttttaagtatctagttataatatatatttaaatatgtagtcaacactattaatctagaaatatcagaacgcttataatttgaaacggaggaagtaaacttttctgacacaccaataataaacatttttaagattcttcgtcatatcgaatcttatgacatatgcacgaagcattaaatataaataaaaaattaattacacagtttgttgtaatttacaagataaattatttaagtctagttaatttatagttaaataataattataaaatacaaacaaaaatactaccgaaattccaaaactgttttttatctaaactagaccttctcgagctgctcttgcctcagaattctggtggtccccctctagccacaacccgacaaagcccggctcaagttggaacccatgacccacccctgcgacctgcgtccacggccagcccagtccaacgagcccagattttcaaaacacgacacgaacccgctcccggcgaccatgccggtggtgcggcagcggcggcgctgagccgactgccagccgcccgcaaccggagcaggccagacagagcgatgcctgcgcctgccgcacccgtaaccgccaggctgaagcgggaagactgcccccgcaccaagcacgactccctcttctccccatggaaggtgcaaactccccgtctcatcactagttcgccttctctccatctgctcctgtttctgtcgcgagctggctgagggcacgatgcagttcacgggatctggctccccgaccaccaattcgccatctcgcctgtgaaacctggtgtccaatctggagcgcctcaacccctcacatctcccatttccaggttcttgtcgggccgtcggactggaaggaccacgctgccggcaaggagggggtccagaggtaccgcatccgcaacctcccggacaacttccccggtctctatgagctaggcgttgccggcgcggccgatgagggcgtcaggacccggaggcgtgacgcgcgaggcgtcgtcgtggtgtacctcgggcaggccgacagtgtccgggcgaggctgcagcagtatggccgctcggggtcgcatctggacactgcaaattcgctgggctctgctggtaaagatgcggtgaatgcgctcgccgcgggtcctggactgttcagagaagtgttctccagaggctactccgtcgtgtttcgatgtgcactggtaagcatttctatttatcctttttccattctaggatttgcggggtggtggaactgttgcattgtgcaagtgtagcagcgtattgcttacattaacatggttacatgccaatgatgtctgagttctgaatgagattgtagtttgaaggtttctgaactgcaaagaagaaacctatgatttcgatgtattagaacttgaacgtattagcccattaggatcactagcctaatgacatgaacacactaattccatggttaattagcacagaccttgattagccgaagatgaatagatgcggaccacaaagtctcctggatcagcctcctgttgtcggcttcaatctgcagtgggcatcgacctcctggatgttgatggatcaccattacacttacagacaaatggtggtggcgatggtctttaagactcggtcaaacaacctaagccgagatcaactctaacaagatgcccacaatatttaagtagcctcccatacatagatagcattatgttcagctgacagagtgatattgtgtatatgtgttcacatgtttcgttctgacaaatgttatgcttgctcacttaatccatttcacattgtttcttgctgaatgtacactttgcttgattttcttcataaagaattatcattcttcttcagcagttgaattgttagatggtttgctcttatcttaaatttaaattgagtaatagaaatacttcctcctaaaggtttctagtctcaccttcactgcttccttcagtgttacattcagaattgcatttaactacagttgaactatcaatatgctgttccacatgaaagacagcctaactttgctcacccattcatggaaaactacttggtgatatatttgtcttgtggcattattggaatggaaaaggaatcacccctccctccctcccacccacccacacacgcgcatttcattcattcctaatgcatattggttggaggagattattttgtttcgaaacatggcctaatggatgtagggaaatccgttgatatttatatacttgcttagttgctttataaaaacagaaagggtccgttatgaattcctggttgtccttttcaccttagcagttaacatcttaatttggttattatatgagtggtcttacattttccattctttgtttgtcctttctactattggaaatgaacagatggacaataaacaagaagctgagaagactgaagcactactgttgagagtatttgattatgcatggaacaaacttcagaatggtgcttgtcgccgggaagaaatactgcacaagttagaactgcaagcagccaaccatagatctctacttagcagagtaagtgacatgaaacaaaaaatatttggagagaaagcaggtataaagataaagggaagtgggtctgctaacacctcgcctggcataattaaaagtatgctcccaagggttcgtactattgttcgtttcagacctcaggtacttaactctgaggacaatgaaggtgagatgactgatattccctggaagaaaatatctgatattccgtatgcaaatagacaagcacatagaaggaggtccgaaggatacaaagtaaaaaagattgatgttacaaaacggagaaccgtgccgatacaggattctaactctgtttgtggagtggtgctggaagatggttcttcttgtctggagcacccagttcatggaagaaagaggtgcagcttacacaaaggtaaaagagtcaaaggcagcccaaaaagttcacctactagctatccttgccaagttgagattgcaactactgagttcgtaccttgcctaactgaagatttggacaactcagtcccaaaacaagaaagcgaaatactgcccaaaaatatgtctataactctgaaggaacctttgaggcaaagcaatagcttcgaatcagaaaaggtgaatactggagaagcttctacagaagatggaacatgtgaaatctccaaggatgcttgtgccttagaagagaaggcttgccatgctgaatctgagtctaaggagcagcagccttctgggagaatgtggtttgagctgctcaaatcacagacgaaatcggcgagcacacattcatcaagaggctcaggatctcagataacagtaatgacagataaaaggccttgcaaaatggtgtcaattgcagaaatggaaaggtgtgagaaggacagtggaatagaggtcactgttgcttcgttttccagaagctcaggatggccgtgtacctgtggcgcccatacatcagacggttcaccttgtatgaataggccggttgaagggaggaagagatgtgcattgcacaaagggcaaagagcagcattcctccctacatcattggtacaatagacaggacgtttttttattcttacatccaattgttgtgttcgcacttctgttagcaaattgaaacacagaaagctgtttttttcataaagtcgtttttctcccaatgacggttgatcattcatatttacagacgttttgtaactgtatttgatggattcgtagaaagctgaaggatgggatcttcttatgctggccattgctcgtctgatgggcttaacttctccattttctacatcatgaattttcacgccagtttttaatgttttgcgcttaggctacagaattgtacgcttggtcgcttggatcaagtaaccggtaggcgtacaaaatggcaacgatcaagtaggcgaaatagttaaattgtaatggcagatctcacaactttaaatgttgtaatggcatgatccaaataacacttttttataaacttttttttttcattgagttcacccctgctttccaggatcgtcatcgaggaaatcgtctatttgatgatgggt

SEQ ID NO: 4193 - DNA, 13561 bp, Sorghum bicolor
cgtgttggtaacatagtttggattcgagagaatgaagaagtaccatgcgatcttgttttgttgggaacttctgaaccacaaggcatctgtcaccttgaggtaaataaatgctgtagccccaccacaccttctattttttgtttctattgtgcatggtttgctcaggagatactttgctttattgcccatgtggggcatttcactgagtcaaagtgaactaaagtacatatattattccttttaacaacaccatcgtgttttcataaatcatatatgaaatctcacatgaagtgtgatataagtaataaactgtggtagggctggagtttgaacagtctgaaactacttgtgattcgaattccagacaaacttttcttcttcatttattacccagctgatgaaacgtgattccagaaacaagtttagttggcaaccatgttttattatttctcgacatgtgccttgaattttttgtccttagatgggatatacttttgagtttattgttatccagttagttctttacagattgaatatatattatcctcccattcttgaattctaattatgtttgtagacagctgctcttgatggggaaattgatttgaagacaagagcaagcccaccaccttgcgtagggctggagtttgaacagctgcacaaaataaaggttaaaagtttatttctttttctttgtttttgctgctctgctctcatttattttttcttttgtgaaaacagcaggggaacccccattttagtatgccttcatttaacttctcattacctttatgaattaactaaacagggtgtgatcgagtgcccgataccagataaagacatacgaagattcgatgcaaacatccgcctgtttcctccattcattgataatgacatttgcccattgactattaataacacattgctgcagtcatgctacttgagaaatacagaatgggcttgtggcgtagcagtttatacaggtaacttgttgatactttttttttgtttcatgtaacagcaaggctacgaaaggttaagaatgtggtcatcctacaataatcatggaatgatcactattaatgtaaacaaggctgttgtcggcaatgttacttaagttgacaacttggatttctatagcatttacattttatcgttgatcaatatcaaaatatttactttggcatatattcttcataacatttgagaaaggctatgtatggatatggatatacaaataaagggcaagaccacctatccacaaccataatgaagaggacccctggatggataaagcccaacttgctggatatataagcccaggatgggagacgtccaggggttaagcaaattcaaagtccaagagaagcctaacaagctcgtcgatgttaccccttttctgatcttgcccaatcagtagcgtaggttgggctttgcagccaggcctaggtgttcaagttacaaactttagttgtaatcagatcatcaatgaataggaagaacatgtgacatatagttgttatcctctggaagcttgaatctatatacattgtgtgtcttgaatactcagtattcatctatgatcttgtggtttcaaaagtaccaaattccatcataagtattattgtcgattatcagattgtcaacaaacatgcgtgtggatagaactattagttttttttctctcgaacatgcaggagagctgcatatcattatattaagaaggaaaaaggggacagagctccttacaacccccccccccccccccccccccaaaaaaaaaaaactcaatatataagttctgtattttgaccgtaaggttggacatgtgattacaaaagtatctcaaggatctgacatgcgacctcttcattactcattgtgctaatttacctgcccaaacgtgaagcctctcattaactgaattatacatggcctcattgttcttttggccttctatattttgttcatcatctaatattttgcttgtctccgtgtagcaatggtatgttaagtatgatgacaatgaaccatggtatcagattctggttatacctctgcggtttgaactattgtgttctattatgattcccatctcgataaaggtatgctcatgagtttttcaattcacatggtcttcagatttttatataattcgttaattccatttctcatgttatggcacaactatttgtctgatatattgttggcatattcaccagtctatcctttttaaaatatgctattgcagccatgctgtgtttactatttaattggtggaaaaatcttcttgcaattgcatagttgcatttgtatgattacttaaacacttacagctcatagatattctggatgttcagttactctggtctatgggcagtggtctgcatagacatcttagtactatttaaactcattttcacttgagaactattgaattctctatttgttttagcacatgcactttctgtatgcagtttatgttttccattttatagtttccttctgtatgtagctgcgttattgtcttctctaaagtaagcaatgccataatgctacagggaaacattgcacagtagatacactttctcttacggtcataccaaacgaaaagttgcttctatttgatacttgtcagtgatgctctaaagaggatttatgtgtcttgtaggtttctttggactttgttaaaagtctgtatgcaaagttcatagattgggacgaggatatgtatgacctggaaaacgacatacctgcccatgcagcaaagtaagcaaccatgcgtatttctatcgataaggagacgtgcaattgttctttcttttcctctgctaaatctacctttacgcaataattttcagcacagcaattagtgaagacttggggcaggttgaatatattttgacagataaaactgggacattgactgagaacaagatgatcttcagaaggtgctgtattgggggcaccttttatgggaatgaatctggagatgcgctcagaggtcatacttaaaacttcaattaactattttcttaatagttgcaaaagttaggatcccgtgtgctttctcactatcttctcatatctgggttctgccatctttgtttccagcttccatctttcaacaacatgataaaaagaaagagcctctttttgctagctttaattggtcctcctgcaagattttcttctaaattgcctttttctgttgttaaccactacttttgatacaaatgtacttggaactcatttaagatgtagaactacttaatactgttccaagttcatatttatgccagttttagaaaaaacttcatatttatgccgactaatcgttctccctgtttagatattgaattactgaacgctgtcgccaataattctcctcatgtcatcaagtttttgaaagtcatgacactctgcaatacagtaattcctataaaaaggttagacattcatccttctgacagtttcgcccacatattctcttcattcttaccatttatattttattctttaccaaacgctatggcttccagtcctagtggatcaattttgtataaagcccagtcccaggatgaggatgctctggttaatgcggctgcaaatttgcatatggttcttgtcagcaagaatggaaacaatgcaggtaggttttctggttcctaaatttgttttgttttctatattttattggctaaataattagacatccactaaaagcagaaattcacttcaaccggcgagtgatgcaatatgagatacttgacattcttgagttcacatctgaccggaaaagaatgtctgttgtcattttggattgccagagtggcaagatttttctcttgtccaaaggagctgatgaggcaatgcttccttgtgcttattctggtaatcgcctcgattattaagcataacattttctcagtatcctttaaatattttaggacctagcatttacatactttcttcttattttgtggcataaatttaatccacactttacttcagaagtaataaacgtctgttctcttgactgtgatcactccctctctcttgagagtctatcacaaatacacagtagcttctctctagtggacacagtacatagtgacactagttgttttttgtcgatgcggccacacaagagctcaccattctgtcatatgagagggagctgtccttgatccctcctaattaatgtactatgattgcccattattctcctaaactgctaactgaaaatcttctatactaaatactctgttcctacacaaaatgaactaggacacatgcagacacgcaggattctagctaactggtcttcgcaaagcagaacatagaattttttgttgatgcaactctattagtaaattgtgtttgagctgaggatctcatgatagttaattttcaggacaaaagacaaagacgtttgttgatgcagttgacaaatatgctcagctggggttgcgcacactctgtttgggatggcgtgagctggaaccagaggaatacactaaatggtctcaatcatttaaggaggctaatagctcgttgaatgacagggaggtaattatcatatttattaattcaattgagaaaattttgatagaaataaaaataattcctctatatttgctttgctcagtggaaagttgctgaggtttgccaaaggttagaacatagcttggagattctaggtgtcagtgcaatagaagatcgcctccaggttctactttggctttgcttttatatcatgtaacaatacattattctttttagtgttcaccggccacctggcccttatatttggatctgttcataggatggggtaccagaaactatcgaaatactgaggcagtcaggaatcaacttctggatgttaactggtgataaacaaagtactgccattcaaattgctctattgtgcaacttgatttcttcaggtatgtgtgtttcattatactagtttttacagctttacttcattgtagttccataaacttattttagagttttagggctacacccagtcttttaaccaaataaccaaaagatagttgaaatcattacagcataggaggttgatctgggaccagtcagttcaaaactcggagaacctcacaaataacctccaagactaaaacctgaaaaaaattacatcaacttcatgctgttggccagattacacaccaagcttctgtgactggaagtggaacctccaggttgttataccttccctccttgcagctgttgagcgccagatcttccatgttgatctgggacggaaactcttctaacctcgttcccagtttgttcagttccaaagccacagaactgtttttgccaaattcctgatctccattgtaatctgtctcaaccacttacttttctgctgtacacagaattatccaattttataccatgccaaccattttgtacaacagcacatccattcctttccagcctactttctgaaaacaaagatcatctgagtttccagatactaagagcagcagaagtaaccatattaagtaaacctagggatgaaaacggtacggatattttccgaccgtattcgagaccgaatttgtttagaggggttcaaatctgtccgtatccgagtccgaatattcaatatccgataccgtatccgtatccgaatacttaaatcgtatatttatgatgtcgacatccaatcgtatcttatccgacataattgacattatccgtattcgaatccgaatccgaccagaaatatgaaaacaaatatgatattggcgatatccatctgtatccgatccgttttcatccctaagtaaaccatgccttttgttactctgccaaaacgttcctacatcatccagactaccgcctatgtttactttaagtatatcaggaagcatactccaaagctgtttggccacagcacaatcaaagaacaaacgttgcactgattcatactcacaacatgtacttaactattcgtaagtgcatccatagaggccacagggagtgaataaaaccagtgtcagctgagtagctcatcaaaagtacattctaaaggaggcccagtgcagtttttttcttgaataatggtgatgtggagatgaattaaatatggaaaaagtctatataaccccccaaactatctagtagggtggactacttcacccccgaactataaaaccggattttctaccccctgaacttttagaaccggcaaataaccccctggagtggttttagatggtggttttgtctttttcttttttatttattttcgctgaatcttttaaaaatcataataaatcgcaaaaaaatcataaaataaaaaaatcaattttgttggactcctgatgagtagatctacacagtgaatatataatatggtatattttagtacaaagtttttgttgtagctttaaatctatgtttttctgtaattaatttgaataattcatatatgcagtttctatggtccaattgtggtaaaatttttatggtgggttcattattgtatgcttgaactatggtaaaagcttcgtacccattggatcacgtataacttagttatcgatttatttagctctattcttgttaaatctatgctttatctaaaactaagttatacatgatccaatgagtattaaatttttaacatagttcaagcatacaataatgagcccaccataaaaattttaccacaattggaccatagaaactgcatatatgaattattcgaattaattacagaaaaacataaatttaaagctacagcaaaaactttgtactaaagcataccatattatatatcaaatgtgtagatgtactcatcaggagtccaacaaaattaaaaattttattttatgtttttctgtgatttattatgatttttcaaagattcagcagaaataaataaaaaagaaaaaggcaaaaccaccgtccataaccactctagggggttatttgaccggttttaaaagttcagagggtagaaaattcggttttatagttcggagggtgaagtagtccaccctagatagtttggaggattatatagactttttccaattaaatatcatttttacttttgttgcctcattgcctgtttgtagaacctaaagggcagctcttgcatatcgatgggaaaactcaagatgaagttgctagaagcttggaaagagttcttcttaccatgaggattacgtcatcagagcctaaggtttgttaaatgtggtgtattgcacatctcattttggtagcttcagagtctggaaggacaagcagactctaaactataatcttttgggggccataggagtttttgtcctgtttgaacccctcatgcacatgttgattcaggcctattatttgctgactcaaacatataatgccctgtttggatccattgagctactagttagctgctcataattagcttctttgtatccaaacagagtctagctaattgtcagctgaatacccaactaacaactatcaaaccagctaatagttaactgttacaatcacaggcactcagggcacactcgctggaggtggacatggcctctgctctctcctaaccaagctctagataccaaatgttacaatcacaggcatagaatacaagtagttttgggctgccagagggcagcttggcaaggatgccgcttggattgtattgaaattgcaggaataacttatcttacaagaagaagaccactgcttatatatagcaagtggtgccgtacctacccaaggcatattctaactgcataaagcagatgctatgattctacttggttctcaaggcaccatgatcaacttggttgccaaggaacctaaactaccttacagtgactagtaaaagtaataggtaactagatacatgggtttagcactaggctaacaccctcattaactagctaatgttaggtatgagctattattagctagctaatggatccaaacagggtcaaattccctctcttctaagaccatcacctgctggaatgaggcacagccaactgcaacagcaactctcactgggttatgaagaagcatatctggtggtgacagttgccattaagttgcttcattagctatgtcgaaaaggtattatccacctctgccacaatactgggctgttgacctggaatagtcgcaattaaatccaggtggtctagtgaacttaggttggtcctgacactacttgttgtaactcttatctttatatgccaccatcagctcctctcagatctgaactactccctgccattgttactttctcttctggcaggatggcctgtcatttccttgtcaacctacctttctgatctctgatgcggtcattgctaaggcattgagagggaaaaaaaaacaagtttcctgaatggctaatttgacccttttcaaatagcatgatcaaaataaaagccatctgtgacgattcagtgaccagctggtccattggccgatttaagtatttgtaaaattaggatgacttcaaatctatgcctttacaatgatattatcaccttaaagaaagaaagtatcttgacttgcaccatgattttgtatttgcttgaaacaggagctggcttttgtagtggatggctgggcactagagattattctgtcacactatactgaagcttttactgaactagcagttctttcaaaaactgcattatgctgtcgtgttacaccttcacaaaaagctcaggtaattctttaccgttgcctttttttttcttgcttgaacaaaatatatccatcagcattagttatttgtatgaataaagtaatgtttaaagtacaaattgttattttgaataataaagtgcaacataaaaatatgttttttaatcaagagtaaagttcgatttgcccccttgaacttgttgcgaaatttaaaaaacaccctcaaactcgaataccagacaacatacaacccttaactttcagagctggacaaattacccaataaaatagtccatagtggtttagatggtggttttggctgatgttggacatatgtgtcatgtgggccccacatgtctttggttttccatcttgtattggatgtgtgtgtgtgtgtgtgtgtggggctacataaggagctagcataagacaaaacatggtaaatttatttttcttatcaaaacacatgtatacacataagatctggcaaagttgacatgatatccattggaggtctacttgggtctgtgttatcttctaatcttttgtacccagttgcaaattgtctagttcactttggctttgtcctaaatcatacttctctaattttgacccttatagaaaatacaccaacatctacaacatcaaattagtttctaccacgaactatgttgtgatagtacatttatttaatattgtagatgttaatatatttttctaaacacttagtgcaagttagtgaaagttgacttaaaacaaagctaaaatgagatataatttggaatggagtagtactctgtttctccttgtaaattactcaccctaacattttgtttccatagctagtgaagcttctaaagtcatgtgactatcgaactttggcaatcggtgatggtgggaatgatgtaaggatgatacaacaggctgacattggtgtaggaattagtggtagggaaggtcttcaagctgcaagggctgctgactatagcattggcagtgagtacttaacatcttcttatctttttcttctgctaccacaattattatggcgctacatcctttacttataagacctgcgggttatcatggtttctgtatactagatagctgtgataatattactgttatttattctcatgtttttgttgcaaattatcttgtttaatttttctggtatatcaactccgtttaatacgtcttcaagtcagttataagtgaatcatttgtgtgttaaagtcaataagagagtctgggaataccaaagtgtactcaaagcaattggtgttgcatagcccaacagtgacatcttggccttttggcagacaactgcagtttgatgactcttgccgaccatgggttggttgggttcttcatgtgcactttctactaggttttcaagggattgaaactttgacctgtatattgtgaaatgtgaggactctactaatcggtaaccaaattgtctccactcaaccaagaaaaggaaaggaaaaaagatcagccagtcaagctggtatatatattccttctagaacaagaggggagcctaatgactatacaatttatctttttggtgcctggatcgacttctttggcaccaaacaagtagatatgaatatttcgagttgtttggtcatatgctgccctgggctcattgagatacaagttcagttatttctatgttcaagatactgttgatattaatagtgatatgccaatatgtgctcagctttcttggccttcacatggaaattaagcttctagctcaaatatatttccatttctgtgggaaacgtcatcttacagtgttgtctgttgggaagatcaatcttgtagtcctgtagttctacactcatacttttgtaccctgataaagtgaaatattttgtgtggtcataagttttatagcctatcggttaatgaagcatgccttgtcatttttcattaactcgtactcgacttatgtgaggtcataacagttttttggctgtggtttggtatgaattcgtgtgaatttatatgctctctgttctggtctaggttctacaatattttgattaaactctggagtagttaataccgtgcaagtttagggcctgtttagatttgaaattttttggcccaaagaggaaaatttttatggaattagggcctgggaactaaatggggccaaaaaattttgggctgcagggcctggtactgtgcacgcactctcatggaagcccaccaatgacaactgcaactgcatgtagcccaagttgtgttggaaaaaaatttgccaaactaaacacctaaaatttttcgcgtgcgtcagacttctgagctaaagttctgaccacaaaaaattttaccactttggccaaaaaaattcaaatctaaacaaggccttatataacctttctgacacttctatttttacttgacagaattcaggttcctgaaaaggctgattcttgtccatgggcggtactcctacaatcgcactgcctttctttcgcagtactctttctacaagtcattgttaatttgctttattcagatactgtaagccataaacctttggtacttgtattatggtagttggacatatagtgtgtgtattttcttgattgctcatattatgtgcacagtttttcttttctttcaggcattgctggaacaagtttattcaactcagttagtttgatggcttataatgttttctacacaagcattcctgttttaactactgtactggacaaggatttatctgaaaagacagtgatgcaaaatccagagatattactttactgccaggctggaaggtaagcttgcatgttgctgttaagggtcggtatctcttttgtgatttattcttatctgccagcatcctagataaattttattttcttacaccttgaatttcttttaactatttgatgaatatatttgtaggcttctcaatccaagtacctttgctggttggtttggtcgatcgttgtatcatgtaagttctttgttctatattgcctttttgctcatggtttgcaaatggtaatttgtgcattttcgctagaagagctcagaatgctactgggatacatattgcttagatactaccaatacataagagttcaacaactctaaaatgttgaccaacaaattggatcagtaaaaaactgaaagcagttggtctctggaacagcaccttaaggcctggtttctgagatccagaacactggatttatttagctcaagaagacatcagtaagagctaccaatcagtctagtggtacctactacctacttatatggcattcacaactatcgtaaaaagtgtacgcaaacctcttatgtttttttctcaaacactgtgaagctcttatcttagtagttttctgcttcaccatttccttaaatacctcagttaagcccgctattgactcattgactatacttaaaatatgtacgcatggacatatacttaagtagatgacccataagactggaactgagtgttttttaggttagttaaattagtatgttattgtttattcggctaatgtgtatgttttctcttttccttgattgcaggcaatcgttattttcttaataaccatccatgcatacgctaatgagaaaagcgagatggaggagctctcaatggttgcactctcaggaagcatttggttgcaggcatttgttgtgacattggagatgaagtatggattagaaaagctttattctcctaactaagaactgctatttgttaaagtggtccttatttgccttctcacttgcagttccttcacatttctgcaacttctggccatatggggaaacctcattgccttctatgtcctcaacttttttatcagcagtatacccacttctggaatgtacaccgttatgttccgcctttgcagacaaccgtcatactggataacgctggtggtaagttctgctagatgtttttttattggttttataaaggcatgcattcatcaaatcgtagtgactataatgtgtcattgttccagttgatcagtggagttggaatgggtcctgtattagctctgaaatatttcagatatacatacagacctagcgcgatcaacattcttcagaaggccgagcgctcacgggggccaatgtacaccctgatgaatctggagtctcaactgagaccagataaagataatatgatgatagccagttccacagcgccagccaagaataagagctctgtttacgagcctttgctttctgactcaccgatggcatccaggagatcccttgcaccatcttcatttgacatcttccatccagcacattcgagaacatctcaccctagaaatatcaaagccaattgattttttttttggaccacagttaactcctaacagtatgatgtataccagaatgacaaagactagctgtcaactgaattagatatgttgcacagttctgttaattatttagtagatatattgcccaaaaagataaactgaaaagtcataagcctttgtatcatacactgtattttatacctgctagcatttcctggaaaatatcttggtctcccactccatattcgaaagcttcgcaaaatcgaggtacaaccgttgatagataagattggtgcaagactgccgggatggaaagggaagctactatctacttccggaagggaaactctagtcaagacggttctctcagcacaaccaatttatcacatgaccgccttcctagaaatgaaatggttagtacagaagatcgatcgcattaggaggagttttctatggaggggtgacaccccggacaaagtgtatggcggtcactccctagtaaattggccaacgacgtgtcgacc

SEQ ID NO: 4194 - DNA, 10320 bp, Sorghum bicolor
tcataaacttctctacacactcatgaccggtgagatagaaatgctctaggttatacctttgtcttgcgcattccattccatctcctccgatgttgatacagcacatgcaacaataatatcataaataatatgatccacttcacatcatcgtataactgtattaattcattgttcttgacctcacctgctcttcattgtcgcgttggtctatcggtgctaagtcttgctcaagcttcaccgtcatacacggtccctcacttcaaaagcctctgacttgcccttcacacttacaaccgatccgtcgagccgagcctcgtcttgatcttctcaacccaggtcacatgactctataccacgtcttatattcaatgagctcctccatcatcacatatgtgagccttgcgtcatctctagtcatatcacctccatggcatatattgctcatgcacatatacatgtggacacataaatactattgatccacttaagttatcactcaattattaaaatcaaacaaggacctttcaaagtgtagattattgatcacgcttttaaaggtggctacaatatctctacccccctaaaaagataaaaatctagatttaaaccaagacagattttcttacttttgatcaaatttatataaaatattttaaataaatatttataaaattaaataaataaatttaaaaaaatattttataataatataatcgtactactcacttaacttctaaaaggcgagaattacgtcggctctgttttctcctccagtttttgctagtttttaagaatctgacttttgaaaaccgagtagaatccaaacttatcagtttttactgccagttgttgctagattctcagcttttgctatttttttttgattcatagagcaataaatgaagtctgattcttaaaagttaggacccgtttttgcttttagttcctaaacagttttgctaaaacttttagattattgtcgtatcgaatcttgcggcatatgtatggattattaaatatagacgaaaataaaaactatttatacagtttatatgtaatttgtgagactaattttttaagcctagttagtccatgattggataatatttgtcaaatacaaacgaaagtactcgaaattctaaagttttacctactgaacaaggccttagaatctagattttgaaaaaaagataaaaattggtttaaggtttgaaactgatccagggccatattataagattattaaggtcagtcacagtggaagttttatttgaactttattcatattaaataggctgctacatagtcatcttggatgacatgataatatatttaagaagagagaaaagaaatgagtttcatctatatgaaactctctcttggcatgattatcaactctctatgagttttgaaattaaatatctatgaaactatggaatcaaactctctattaagaatgagtgttttatttaacttttatttcatttcacatggcatagcaactttggaaacaatcctataaagcctaatgacaaacacgtgtgccttgttcaggtgcgaaaagattttggatttcgctactgtagtattttcgtttgtttgtgataaatattgtctaattatggattaactaagatcaaaagattcgtcttgcgatttacagttaaactgtgtaattagtttttctttttgtttatatttaatactttatgtatgtgccaaaaatttgatgtgacagaaatcttaaaagtttttggttgaactaaacaaggccttgatcacgacacgatgcaaacattaatgtgatggaaagtaaagggctggtcctgtcaaattcaacggaccatgcaggcggcaggccactcgttgggcgtgcgggcctgccgggctgcggccccgcaattcctcgtgctccgccagcgggaggcctccgaggcccttcgaagctatccccgccgcgccaaccaacgaaacgcaccaaaacccctgtggaaaacgctaaaaccacgcgcaccgcgccggcatcgcggtcacgggcacccctctcgccttcaccctctcctcgccctcgccccaccccgcagcccctcctccccttccccctaccggccattgcctaggagtctaggacaggaccacctggtgcgcaaaccttatccgaatcgccgtcgcatggaggccgtgcgcgcgtcggcggcgtgggtcgccagtcgctcctcccatgtcacggttgacctgcaaggtatgctgtggcttttaccctgttgtaaacttgtgttgtacgggatgttcactttctgccgctgtgagatgtttacgggatgatggaattttagggtttgcaaatgtccgccctgcagttgtttcatcgtatttacgccggttgtttgtgtagttgtgttgcgataaaccctttcgctttacttatccatattaacggcgtgtttcaaacaccctttctatagtctttttttgttactttttttttgctacttactgtttcctgctcttttgattgttgttcagtaatttatctagaaacgaacttggcataatatctaccgcacacctgtgtgttcttattaatttcttatggtacagtagcttgttgatttgattatcttgcgaggaggtgcctttgtcaaatcctcatcactattgttcctctgcacgtcgttactttttttttcctgcagaaattgagaaggtagtggaccaaatcaagggagatgttccaaaagttgagtgggatttcgaaggaatccactactttgacaatgggccacttacagtccagtaccttttcgtcttggatgcacttaacttctgcttctggccaggtataaattcacgcaaaaaaagaaaaagaaaagccataacgtcttctgaacatgtagaaatcagaatgaagtgctacagccctggtatagctgtatgttgggaagaaagaaagtatcaagtgattaaggatgctgtcaactcatagtcaattagtcgtttgggctgccaacataatcagttttttctcttgaaatgcttggtgatattgtgtacacaataatacatatagtacaaaacatgggtgtttccaccagtaatacttctgtggctattcaagattttcttaggccatggacctgttcggtttgctgtggggtttccaagaagttggttctttgcattttcttcagatactttagttattacatttttaatttgtttttttgagttattctctagacgccacacctatgccttgaaattactatcttctgctgttgagctgcagtaggattttttgtatgtattttcattcatatttgtttccttacgatcatgatgaatttgccattgacagataaggacttgagctatgaccatttggcttctggactgaagttagccttggagaaagacaaaaatgcccttgattcagatcgtcttcagaattacactggtaagcggtaacttctcgtggggatcttgtgttaggttcaagagttccttcgccatttttgtggacttctgcttctggtccaagatcaagggaatgcttctcagcttctgggaaaaactgtatttttctagaaatgtcatttcactgtgtagattgaggtagcagatgagggaacagttacaagttgaacttaactggatgtaatgggatcctctcagtctaagtaccctttttcatgcattatattcttctattgctaaaaagaagctactcattttcttgctgtgtttctaattgagaaacagttacttacatcatctgctatactcctttatagaaactgctaatttggaaggatatttgcaaaatgtaggcccccagctccgccaacttctgaactggccacgaccactgccaattgaggaggaaagagtacgccttctccatgaggtattattttgtacctgctgctttgaacatttcaggctcggaactctgttaatactaaagttatgtaggtaccatgacttgtcaactttcacactgcaatcccttctttttttggataaatttagttgtctgcttgatttctggaatcgtctttgctggtaggctctagtttgattgctggggtgttccatcactgtcattttcatcatactttataaacatatatttccaaccagttttttttctccactgactttttcttcctttccagcaatactagttttgaatcatttttttattcattgttatgacacctgtctcaaggttggactggaaatggaaagaagctttggaggccaggctgctagtctagtgaagtctgctggaaactctgctgcaactcttatcgaactgattactcgacattttcctggtaaatctacttggtattatgttcgaaagtagacagttcagtttgttgtagtatctcaaaaataagtacatcagctgatggtctcctatttggccccttctgcccatatatgtgctatagcttcctctgctggtattattccagatttgggatgcacgacagtgttataaagtgttggtctggaaaactatttggttcatttgtcaaatgttcctggtggtcctattggttgtaggcacgtacagtgaaagtgaaactggaatggcccagccacccagtaccactactcatggatttagaatcgttgtgctcatatggattcagaatcggcctgctactttggacctgagagtcaggacagaaacagtgatgggctggtgccttaggcctgctaatttggacttgagagtcaggaaacagtgatgggctggtaccttgtccaggcatatgaacttcgtatgagctgggccattcaaaaccatatagatgtgaatatttgatgcttaaactcttatgattttgtattttctcacgcaaaaaatgatattggtttcacatgactacacctgaagttaacattgattctaggtgttcatgcttcgatggatctctattgatttgagatattgaacatgaagtttcttttcttccaagaaagaacatgaaactgttaccatagtttttaactgattatacacctttgatatgcctgtacatgaactaatcatctgcttaatcactcattaattgttacatagctcattaagctcacatggctggaacggacctgtagattcgtctgtccaaatgcaccttgttcagtccttttggtttagttgaaaagaaatcccggtgatttcaccacattatttaccttagctggacctatttgattgcacaggcaggttcactaatatgtacagctttcaactattcaacctatattaggtaaataatgttttttttttgaactagtcggaggggagaggttccccaccttttgaaattcaattagccccgccagacggtaacccgtggcgtgcaaaagagttggtgatacaatcgctgatgaaggcgtgccagcccaggaggctgtttacatggctaggggggaggcgtttacgccagattacaatgtcatctcgaacattacacagcacaccacgcacactgaactgctcgtcgcggaaaacgtggccgttccgcgcatcccgttttccgcgcatcctagatcctccaaagaattgtcaggaacatgaagggccagagggaagcttcgaggccaggtggcgtttgtgccgtccaggcttcttcatcggtcatggaggagaggtgctgcatttggacgatctcccacactgcagaacttgtgtaacagtggaagaaaacgtgatctcgatcttcatctcccaaaagacatctttcacaggtcggcccctcgactatatgcttgtagtagaggttgactttagtactcagacgattcttgaagtacagccatgcgaagattttgactttgttgggcagcctggttcgccaaatgagcttgccatattcatcactatagtctccagaggagtccagcgcggcgtaggcgtccctgacggtgtacgggcgttttgtaagcttgaggagtcgaacgtcctggccgttgcccagagtgatttcctgcaaaatttcaagcaagctgcctagctgttggctagcagcagtggttagccgcgggcgaagacgcaagtcaaaaccgttattgaagacacactgcaccgaagtgttaggcctaagggtgtgggagaagagggcggaatgagtagatgccagaggaccagcagggagccaatgatctagccagaacgaggtggaggccccattgttaagacggacgtaggtgatggagcggaaggtgtccagattttcagaaatgatgcgccagaggaacccagtttcaccagcaactggggtgtcaaaggtagccacggaagattcaatccaatctctccaacacatgtcagcccgggagagcatcttgtcgatgaatttcatgagcaagcacctgttctggagttctagatttttgacaccgaggccgcctctgttcttaggggcttggacagactcccaagccaccaggcattttgacccatgacatttatcatctcctgtccagaagaaggcacgcatcctgctgtcgatttttttgacgactgtttttggcacgctaagggcggacatgtagtggaggggaagagcgcttaggaccgaggtacagagtgttagacgcccagctctgtttaggagggaagcttgccagccggagaggtacttgtcgcaagacgagattagggggagacaattcgccacagagatcttatggggggaaagaggaagcccaaggtaggtttgggggaaggaagaaggggtggcaccaatagcagttgcaaggattgaagcctcatcagcaggaaccacgatgggaaggaaggtggttttgtggtagttaatggagaggccggtagcgctttcaaagagttggaggatttgtttagtagcagcaattgcagcaggactacaacggatgaagatgagggtgtcgtctgcgtattggagcacggggcagggggtgccatggaggatggggtgctggatgtcagcggcaacagggtgggtatggagcaggcgtttaagaacgtcagcaacgatgataaaaaggtaaggggagagggggtctccctgcctgagaccgcgcttacagttgatccatttcccaggcacgccattaagcagaacggcagtcttgccagtgtcaagaaggttttggatccacgcacaccaagtatttgtgaaccccctagaacgaaggatcctgataaggctgtcccaggagacgcagtcgaaggctttatgaaaatcaagcttgagtacaatggtagggctgcccctgcggtagcagcaattcagcaggtccgcagcataaacaaaattatcagcaatgcaacggccttgcacaaaaccagattgatcagaggcgacaagggaggggatcagaggttggaggcgggaggttaagaccttggaaatgcacttgaccgtagtattttggagagcaatggggcggaagtcccgagcccgtcttgcttcctctttcttgggaaggaggactaggaaggacctgttgatacgctctaggtcagtagagttgctgtagaaggcggacaacagcgcacagacagactcggcaaccagaggccaggagtgcctgaagaagagggggccgaagccgtcaggcccagggctggccgcaggatgcatgttcctaatggctctgtagatttcatcatgagagaagggggcgtctaggcagccaagggagcgttcattcgggtaaaggtcagagagagagaagtcccaggctgtgttaatgtttgtgcccagtaagtctagatagaaatcgtgaagaaccatagctttctgctcatgctcatgtagctcgctgttattgtgttcaaggacttgaatattatttttccgccggcgatggttggcgcaagcatggaagtaacgagtgttttcatcaccatcaattgcagcccgtattttagctctttgtttccagatcagcaggcgggcttgggtacatcggctgagaacagagataataacagcacgaagtctcaattcaggggcactgaggaccctatgttcctccacgaggtcaagcaggttaataacgattttgcagtccgtgtcttgctggtagatgttagcatggctgcttttccatttttttagacatcttcttgtctccttaagtttggccgccatggccgcagaaggatctctgttcatcatccgacagctccaggcgttagcaacagtgtcctggaatccagggaaattgacccaatagttgtcaaaccgaaagatgttggatttggggatgcgagtggaaatgttgacaacaaggggaacgtgatcagaagtgcgtcgggtgagcgaagagagggtggtgttaggcatggaggcatcccaagttgtgttgatgaacgctctgtcaatacgttccagagttggttcgactcgctggttagaccaggtgtagctccggtctagcagaggcagttcaatgaggcatacagtgttgatatattcattgaaggctgcagcttcagaagcgcggaagttgctgttgttcttattggaatcactgggtttcataattatttcagtctgaattctatgtcacagtctgaattcagaaattaggatattaacttcataatatattctttgattattgaatttaaatttaaattgtaccttgtgctcttgcagggaattttagcatgtattgaatctatttaatagcgtagtgttgtgcaactttatggtaccttttgtgaacgttccttgtctccttgaacatgtacattcttgatacatttgcatgcattcaaaacttggttaatttttttcttgttttatactgtcataactcataagtcataactcatgagcaaacattctttcagcaataagtgttctaaatttccattttgccaggtttccgggatcattccctttacaagggacaccaggtttttttgtacaagagagctcagatctttgttgctgatttgtggggcgccttcaagggacaaaactatggcgagttccacgacatcaattccatcaccatatttgctgactacattgttccagccgtgctgagggagcttggcatactcaaatatggctcgaatctatcttgctcgatcgattcgaatagtgagatagtgcctggaagcgaggaggaagtggagatacgcgcgtgctccatctatgcagtggagaagatgagggatctgattggcaaaaagtttggaaagcaggtaggcacatctgaaccagtttcacctgacactttcatcagtcatgccaatgcacctgcattctcggtagggcagatggttttctatttacaaatagacatccactgatcttcctagccattgaacgagtaaattaaccaagtcataaagcagtcaatacggaggttcagctcggaactaacgccctcttgctcttgtgttttctcggcagcttctgagcattgacattgatctctggctctggtcctgcggcgtgcagaacatggcgctgtcacatcaccgcaccctgtcgatttactactagacagtcaggcaggcagccgcaacctcggtccctgaccggctgaccctgctggtgcgcgtattcagctggccaagcgttgtcgtggcttgttcgtcttaagcataaccgggtataggtgtccagagttttgtctccttggcagtgcacaaaagtgcaaggtattgtaggtccgtcgcatgaggatgcatggtgtgattttgagacttgaacagctgcagttttcacatgaattttatccgtagggacaagggagtgaatgtttgttatctccaggattgatcttgttcgatgcgtttcctttatactgtagaacggctttcagttaccgctccaactcttgctgaatttgagtataagcccactacaagcaatatagtatacacttttttgagtgtttcaaaacatttgactattttgtttataaaaaagtacaaacattcattatacaaaatatgtactattagatcaattatagattatatgtcattataaatttatttagagatataaatactaatattatttactataaatttatttaaacttaagctagatgaccagtgatatcatatttacaatattttgtggatggacggagtacgtgtccagcaagggaacacttgaatactcagacgtcaaacttgtcttctgctgcgagagagacaaatcctgccgtctgccgaggtgtcgagagaccagtcccgcggtaacaaaacaacgcgtttggttcaaggaaccaaacaatgcggaacgagtcgatccctcctgcgttcaccttgcctaggat

SEQ ID NO: 4195 - DNA, 5213 bp, Sorghum bicolor
acttgcaaagtgttcatgaccgtgtcctgtttttcagcatcatggaatgcagatatgatttgtccatccatgcttctactttagagtgctgcctctcagccacgtgaatctcttgcttctatcctaggccttgtttagttcaccccaaaaaccaaaaagttttcaagatttctcgtcacatcgaatcttgcggcacatgcatgaagctttatatatagacacaaacaaaaactaattacacagttctcctgtaaattgcgagacgaatcttttgatcctagttagtctataattagataatatttgccacaaacaaacgaaagtgctacagtaccgaaatcttttcagaactaaacaaggccctaggattattgctgtggatttttccccttatgattcaattcgtataagacatatttaatttgcaattgccatttgagatcgttccttctgtaagatgtatatctgtgtgttctttaccatgtcagctcttttttccacttattaggatgtgtcatgggctcatggcagcacctcacacgtattcaaatctttgtgctatgcactatggtaggctctggcacctctttagatttaagcgcaatgctgacttttggaaaggtgtccctggtaacagttacttatattgccctttatactgcgcatcaccattagagcattcaaatatgtactgctaataaatgagctgacatgtttacactgctatgcaaaattacttctactgatcaatagcttgatttataatttcctcccttttcttggagaaattattaaataccatttaaacaatgtctgtgctcccctgatttcagttaggcttccatctggcttaacatgaaccttgactttgcggtagaagttcagacaatgttgctgctgcttacgagcactccattttactgtaatttaaattctagaatgcctcaaatttatcttggttatttcagttccttcctacgattttttcctggaaaaactgattcggtgtgtttgtggttttctcgcagtccaatttacagtgactagtcttccaatcaggtggtaacgattttctcagccttgtttttccattacttgcttattttgccagttcaagcttgacctttggtattatgaaaagatatttaaacttagttttttaataaatttatttagaaatataaatattatactcaaattaaatttgtggtaacgataattatttaaagacagagagagtattttttgaaggattgtgccggtcacgtcaaaccaagcttgatgatcacccaagaacagtgctttctcacaacgattctcaacccgatcggatcaccggaataagaggtttggaaacgtccccgtacgattgttttcttatcgcacaatggttttcttatcgctgatcagcaaaggagacgctgaaaaggaaatgaaaagtctttcaatcagaagaaaaggaaaggaagcaaattaaaaaaaaaaaggcgagcaaaaggaaaggaggaggaaagatgctttcagccgtccatggcgtgattcaaacgcgagaagatgccctacccctggagccgtacacgggtccgatcccccgaccaaaccgacggttcagattcgctcaacatctgcacctaaagccactccaccgacatgctggcccgttttctggccaaccccacagtcagtgagatacaccgtctactctcgggtggaagcggtgggtgcacctgctcttatgcagtataaatatcctgaaaccctaggattctcagcgagcttatcgcttatcatccgcggcttgtgcatctcctccgcctccgcttgacccatccaagtcaggtaaaattctgacccgccgccgctcagatttgccagcgaattttgttgctaggtgtttcgatttgtgatttcttctgtttcctaatatctggggaatctgaatcgaggctaatttcggatcttgttgtttgggggtttgggttttttatgcagggatcgccatgtcggactcggaggagcaccacttcgaatcgaaggccgacgctggtgcgtccaagacttacccgcagcaggctggcaccgtccgcaagaacggcttcctcgtcatcaagggccgtccctgcaaggtatatgtgtgcttagatttgggatcggatggcctgctgaaggccatcgattagtatcgatccgcgtagttctgctgtgtgctgtgaactggtgaactgatcggatgtctctgctcatactgtgatggtgtgattgcttgatgggaataggtgctgttactgttatcttttgatggttgacccactatatggggatggaatttgcgggagttggatgttggatatatctgatagttagaagatgtgggagtcgcggttgatgtgcgagactttgctattgcaagccggagttactaggactgggcttgcttcacagaataacaattttctgtggtaaatctgatctgctttcaagagatcaggaaaaaaaacgacatttagccagagtagattgcacccaggcacccaaaccatataagtagctgaatctgtagcaagtgggtaaccttttgtttttttttttcaatggggggaaattagttggcatgttgagctgttcgatatactcccgtaatcttgtcattgaacattcaatggtactcattatttgcccttgatattggtcatgatgtttgtaccccttgatctatagtgagctaccaacaaagtgatcaaacaatttatcctttgaagttcaatcagagggttatccaattttcattattccaagataatgggaataagagatcaaacagatcctgatatctaaggtttcagttgtcaatctggcaggtaaacttggtgttcatgactctgatgttttctagggggctgtagactgttcagtgatgtttggaactaataaaaaattgaaataacatatgtccctacattttggatagggtttggttttaccccgcgaaggatgtagaatgccctttgttgttgattttcgttattgattttttgaagtgagtacgattggaattggaaagttatgtttcctgtttatcgataaaaccaatttgttgtcaaaatgaaatttgtgtttggtttggcaaccactgtcaaagacaatgagtacccacttgttttgcaatgaccaaacaggttctctgtttcttaattctaaatctggaaaatcttctgtgtggttttagtataccctagtttattttagggtgttgttgtattatcataaggagatagtgagctcacttctgtttgtttacccttgcatatctgagcttgtgatctgagtgatatatcagcaatagtctgtgagtttatgcctagaactatttggaatttccttgctcttaagttgcaccacacactcgttgctgttttattgagtttgtttgttgaatacggttgctaaaataacttatgctacaggttgtggaggtttctacctcaaagactggtaagcacggccacgccaaatgccactttgttgccatagacatattcaacgggaaaaagcttgaagatattgttccttcttcacacaactgtgacgtaagttaatttctgcctgtttagctaagttcttttaacagttcacttcatatgccactcacaagttcaacccttttttttttagattccgcatgtgaaccgtactgagtatcagctgattgacatatcagaggatggatttgtatgtttctctaatcagtaaagctacattcttctatgaattaaattttagattgagtcttataattcaattttcatttgtttcaggtgagccttcttacttcagatggcaacactaaggatgatcttagactcccaactgatgagactcttgtggcccaggtctgtttggaaatattttccatcctaagtcctgttagttttcttgttggcttccaagtattacagatggtggttaaatttgttagcttagtcatatgttatggtagttaaatttctgagcttaggccgtgtttagtttgcaaaaaatctggtttttggctactgtagcactttcgtttttatttgacaaacattgtccaatcacggagttactaggctcaaaagattcatcttacaaattacaggtaaactgtgcaattaatttttatttttgtctatatttagtaatccatgcatacgaccaaagatttgatgtgacatggaatcttgaaaatttttgcgaactaaacaaggccttagtcatatattctttctcgataccttctcttccttgaagtttgttaattgattttgtgcttaaaggattgtggaaagtagggccttgtagaactagatagtccttgtgtatttagtctgtctactgttacctctacttgtaaatgatctgacatggcaaccatgttgcataaaacatgatgaaaagtgcactgaaattgcttgcttttaaactgacatgagttattgaataatgattttgtataggtgtcctagtagtagtgttgcataacttttatccattgtagctgagttaatgtatctacatttatattgtccaataaactcaatgatactaatgcatcttgtatgctttgtaattcagattaaggaaggttttgaaagtgggaaggatcttgttgtgactgtccagtctgctatgggggaggagcagatctgcgccctgaaggatattggccccaagtaacttccctgccttggaagacggaactactgtatctcaaaacttaaatggaaaaagaagtgtatcaccaaaggattgctactgagacgttcacctggcttgagctggcttttgctatagcaaacacaagtgcagggattgctgggtgtcgcaccgtatctgactttcattatctgtggttacattctggaccctgtattttctatgattttatgccacctactttttagtattaagtatcaataaattggtttggaacggttgaattgcatccaattcatgaggtttcttgttggtaattgtttttctcttgcaattgtccagcttccagtactgctgtgtacttattttctgattttttttttggttcctgggtttcttaaggccttgtttggatatttggttcgctgttttttttggctgatgctgatttgctgtgtgagagaaatactgttcaatgttctaattttggctgatcagctctggtgaacacagatccattt

SEQ ID NO: 4196 - DNA, 3294 bp, Sorghum bicolor
attcgcccagccatagaagagctaacagtgttattgcaaagctgatggggttggaagaagcaacaaatgctacaggggtgctgactgctgaaaactgtgaacccacaagatcaccgagaccagctgaagccactcaacatgagcatccatcacgctcccccagaagcacttgccaggattcctgcagcatgcagctgaagaacgactcctcagtactgaaaaccaagcctccccacgaattgtcacagaagcagctccttggaggcagcaggacagaagtgccaccaatatcaaggcacaacaatgtcgagaagctgaagggaggccaagaactgcatctgtctatgctgatatagagagaagggtcgggggctttgacttcttagagtgtaataacaaggacttcagggctctcagaatattgggtgcattgaacgcaaaagatgctaagagcaagaatgacagcagtggtggatcaattgctaatcacaggacaggatatgatctcaccactaactctggaaccttccaggcacctattgtggtcatgaagcctgcaagaaccattgagaagcatggggtttcactggcttctgttgctcccatggcaggccttagaagcctcagaaagttgccggctagatattcatctttcaccagcacaaatgagagtagcacaaatgagaagatgcatcttcggatgtcaagagctcaactgaagtctgaagaaattgtcagcaatgctagctcgccaaggcctacaagctcatcaagccccagaaatgtgctaaagaaggcagagccagaaaggaggtctcgtccacctgtttcgccaaaatctccaagcaagaagtccaatgaagctgtctctccaaaaggaagaataagatcaaagccttctcaggtgaaatgccaccgtgaagaggtcttgcagagtacagggaacagaataagcttagcaaagcaggttgatgtcagtgttatggatcgtgcaaagcctctgggtggcaactcaaccttcactccaccaagcaatgctgctgcaacagcaagtcacaaggtacagataaaacgcaaagaaatttcataccaatgatccatctaattctacatttttcatgcaatctgtattcattgtttaccactactttactaatgagcgatttctctctatcccctttcaggctccttcaattctgggttcagaccaaaacattcattcactggacaacattccaagccctgtctctgtccttgatacatccttctatcataaaaggatctcagattcattcagaggtgagaagttattttcttagttaccagtattaatttgcattagatatccacttgtttcatgcaagaacattagcatgatagatcctttggtttggtcttattcaattcagaaacccatagtgttactaaaaggacaagcatagctagctgtcagcgtgctgataacgctagtgacagataatctgcaataaaagctaccaggtagctcgtggtcctgcaattaggaggaacagtgcatgtctgcaaccccacaagcagcaatgctatgcaggagcatgatatgtgtcttttggtgtgcatacatgctagtatagatgtgcccaccaatgtccccctatacaaatacacccagtgtgtatgatctgtatgtttattctaggtagacagtgtttttgtctctcctgtctgatacatgctttcttcagttaattgtcaggcagccaactctgtattttcgattggtccattaaattgttctgcactgtataggaattgttttctgaacatacccttttacctgttcagatggtgagacacattcttcagaggaatgctggaacccaaacagcttgcctgacacaccacagtcaaaagcgagcagtgaagtcaaccagattaaaccagaaaatttggaagttctgatccagaagcttgagcaactgcaatcaatgaatgaagaagacgcaagtatcaaagaagtcatggcatcagtcactgcaaataaagatcaccagtatatctatgagatactgttggcatctggtcttttgcacaaagaacatagtatcgcagtattacctggtcaactccaaccatcaaattatccaatcaatccggagctcttcctcattcttgagcaaacaaaaccagacttagtttctgccttccaaactgtcagcggagctaagaaaagttgtaagccttgcacagggaggcttcatcgaagacttgtgtttgacctggtaaatgaaacaatagctcagaagatgagcgtctgtagatctggaaggcagacagtaaagtttcttcaatcaaggaagttaagtgggtggcaactattcaaggatttgtgcactgaggttgacaggctaataaaatgctccgacgaggaggagaatgaaaacatgatatttgatgaggatacagttaatggaacgaaagactggatgagcttcgacactgtgctacatggcatggtttgggaaattgaacgatccatcttcaagggccttatcgacgaggtcatcggtggtgagactacagagaagatgcaatttgtacaaaggaaactgcagaggcagctttctttcagtagtataaactgaatatgcgctgtagtagtcatttccattaagaagcttatagcaagtagcaactagttcatgtaaccttttctattttgctaaagactaaactgtagaatgagtataaatgatcctcaaaactagtcttgctcccagaagaagcaagaaatatatataatatattcttagtgaacttgtgtctactgatgtgatgttgttttgattgaatcatgccgcacaattacccaagctgttgtttccttcatgaagcagggaccatttggctcctatactttaggaacacctcatacttagataacaagatgtcttctgccactctggcagagcactagtgacaccaaactggggttctaaaactgtagtccaaactgtcttactccctccatcccaaattgtaagtcactccaaaaatcttagagagtcaaacttttttaagtttgaccaaatttatattataaaataattattattataatactactaagtatcattagattctttcttaattatattttcatagtatattcactgtacgctacaaatcttagtatttttctctataattttggtcaaacgtgaaaatactttgactctccaagattcttggaatgacttacaatttgggatggagggagtactatttaaccaaaagaatgcaacagttccaacc

SEQ ID NO: 4197 - DNA, 13095 bp, Sorghum bicolor
tctggaaaaacaagcaagtaaagtacctatgcaaattgcaactgatggcttctttatttgtccatactccctttgtaccaaattataagtcaaatacataaatttgttatgcacctagatatcagcaggggcgtcccagagcccgtgcgggccgtacgaccgaactggaccctaaaatttatgggctccaacatttactaagggttctaagtatatatataataattttaggtttcttttaattagtaaattagtcacaaactcaataaacatggcctgctacttccctcgagacaaagcacattgagtccatgatcgtgagttagaaaagtctacggccagtaattcttcttcacataagtttataaccctttatgagtttgtggtttcatcttttggacctgttcctcgcccttggtgttattcgtcgctcaagagtctgagacctagtagcaattctagacgacgagtcccagattaggacaccaaacggagatcattgtccggtataaattccatgtacaatctctattttatttagttaatcttttatatattgcctttataatatattaatattatattttttatattttaataatagatggtagaccttcacttgttttgaaccgggacgcccctgatatcagtctcggattcttaaaaactcgttttgtctctagtttctaaaacttggattctgagccaaaaaaaaacctagtgagagtgtttagatcctccggtttttaaaaatctgacttcatttatcgctctatgggtaacaagctggcaaaagctaacaactttctggtttttaagaatgtgacaaaaactaacagaaaaaaactgacttgtttagaccccacccactatttggaaactagattatctggagggatccaaacaagattcatgtctagatacatgacaaatattacgtctagatacatggcaacactaatgtacctagaaaaataaaataactaataatttaaagcagagggagtatttccttctgttaatgcgaattcgaggcgaggtaggtaggtaggcagacatgaacacagcacaactgctcgtagtaatttaggccttgttgagttgagagaattttttggttttggctactgtagcactttcgtttgtttgtgacaaatattgtccaatcatggactaactagactcaaaagattcagctcgcgaattacaggtaaactgtgtaatcagtatttgtttttgtctatatttagtacttcatgcatgtgccacaagattcgatgtgacgtgaaatcttgaaattttttaggaactaaacaatgccttacactttgggatcatgaagcaagcggtggcggccacattgtactagctgcactgcaagcaactgcggggtgcgcgtaaagatctggggtagggtagcatcaaaggcatgtttgatggatggatggacctcgctcgctcgctccctccatctccatggtccatgcatgctgccatctgcatttctgcaatacaatgcctcctcttccccatcctctgcgtcagttgcagatgaagacagcagcccaatcgttttctccaaaaagatgaggaggaccgcagtcgcccgctgcaacttgcgtgggttctctatcatcggctcgatgccaactgacaaaagcccccttcttctaatctaccccacggtagattccgttactgaaagccactaagtccaagcgcaggtgaatggaaacgcccgatgtttattgcaggaaggaagcttaatgaacaatctttaattaataataatcttataatctaccaggaacaggcagccaggcaggcaggtggggaagctgggttaggataagtacgagagggcaagccgcacgtgcggggcagctcgacagatggacgcaaccaaaatttaatcatctccgggaacacaaagataaaagccacacatctgcagtggtggagtggaaggcttcacaggcccagaggaaaagggcgaaggagggagatgggattggaattggaataaaaaaaaaggaagagagcaggagaagcgcgcgcacaacacaatccgcaggccgcagcagaggagtgagtgcagaggagacattcagatcaaacccaaggtgtcgccttcttcctcttccccctcctcctgatatcgacgtccaccctctcctcgatttccttttccgggttttaaatataaatcgccagcaattctgtacgcaatacgttgagtgcgaaagatcctacgcagtatatgcgtatgtatgtgtgtgtgcgtctgcgcttccttgcttcccctgccttcttttattctcctctcctttgttcgcttgcgggcttgcggcttcgggaaggaggagaggacgaggggcgggcgggtgggcgggcgaatgcacagttccggtgagttcttggaatccgacccggctcttcttgattcgtttccgcggccgtgatcttagggttggttcttggtttgggcgctgctcgaggcggaaacacgattttatccggcgcgcagacgcctcgaagctcgaactgcgattctaactctcactcgtgctgtcgtgtgttcttggcactgcctgggacaacattggctccaaaatgcggccgaattgttggtgttttttggagtgtggttttgttgctgggaaggggttttagggaatgcggctaaggtgcgcgcgttttagtccatcagagactggaattcttggggcggacggacccggagttgcgcattcttgatcccgctgctttcgcccgccaaacaatgatgcggccgccatggccttatccgatttctttagggttcttttccgtcgggagaaagtacgcgagaaagtggggccaaagggagcagctttttaccagtcttcagcatctactacaatggattgttcgcccgcagtgcttctgcttctttttcactttttttgggcagtaaagtagtatttgggtgcttttgttgggattgtaaaaaataaagatcggaatctttgaactgttctcaactcaaatgatggttgctagagctttcagttgcaattgctctgtttcttattgatctttcctcagctgtggtccagactccagatttcttcagctttctctatcccttgagcacaaaaagaaaggcagcttctcttctttcattttcaattttattatgatctttgattgagttgatgttactgcttgtgcaattcccgtgtataatgctaaagagtttgtttcttctataccagtttagagcttctgttttgacgacgcttgaaacttagtgaagatcattgtcatgcttcccgtgtgcagccttttcatatgaggtcaattgcagctgaatgttgaatgggtctttttgctgagatgatcgtgaaatgatttatgcgatagtctgttggacgtctaatcatggttaggattgggttccgaggcttatctattaatttgctataggcagccagtaagatttctgtatacaacagcaagagatttcccttgctctaaatttgtactgaaatgtcaaagacatgattattagttaaagcaataatagataccccaagttccaatcttctttcttgtgggctttttttattcaatctagctagatttctgtcacagtcatactacacagcaaatttatgatccccaaattgacgtgatgcaatcatacatgttcagttttttaggtgctttgtagaaaacttagtcttttgtggcctttaggcgagttctacaaaatgtagtacctttttaatcatttaatataacttgcaagttggtgtttttattgttggttctgttggaaatgattagaagcaaaacataagttgtaaaaacatattcagaaactctactacgcgcgcgatgggtcgctcgattgggaagaataaaaccggtccccttggtggggttggcttttttttcccccccccccccccccccccccgagctgttcgctgatctattgtgagaaaaatactgttggctggcaaaaaaaagtacggctataagacaagcgaacttggctagcaggagaatatggctgaaattactttccactgattctttttgcaggagaatatggctgaaattactttcattgcttatttgccactgattctctttgcaggagaatattggtgaaacaataacttgacatagagttctagaccaaagaagcaatggaaagggaatcgtctaccacatatgagccaaaaaggaactgtgaaataagggtttttgagagttcagatgaaatttcaacagatcttgctgagtatatctcgcaaatttcagaaatttctgtcaaagaaaggggatactttgccatcgccttatctggtggtcccctagtcagttttttggggtaatattatttcctcatatttattagatattctactctattatgtactagaattgtttacatagtttgcattccaatttctgaactttctctccttcaattactacaaggaaactttgtgaagcaccatacaacaagaccctggactggtccaaatggtacatcttctggtctgatgaacgtgccgttgcaaaaaaccatgcagagagtaactataagttaacaaaagaaggatttattgccaaggtatgtgaactgaagatgccttatttttcttttccattttttgtccgtgctgcagcctaaataagcttatgtcaagaatttttgtcattaagatcagcttattttgtattgaaatggtgctgtctgtcatggtgtcacctactctatgtttccttcaaaagtgagttaatttggctctatttttgtttatttttctgtaccaacctgttgggctatgtatttctatagataggcccttgggcttatagcccattgtctgtgttggtgtatgtgttatatatatatgtatgtatcaaagacacagaaagtggagtggtctctggaattttccataccccttcatggtgtcggagcctggttagagagagagagagagctcggcgacaggagtgacggactggatctagagatgtccaggcgcctgaggttagattgcctggctgaggagtgcacccgtgctgctcctgttggtggacctgctgctgtggtacctcctgctactggtgccttgctctgtggtgaagaaggaagagaagggaaagcatccagtggaagaaggaagcaggtgcgtgtgtcatctctgttggctatagtgtggctcttgtgtggttgttggagaaagggtgcctgctgcacagggcatatatgctatataccctggggatttagttgagctagaagtttgtgtgctgcttggtgtctcttgataacaaaggcatcttattagttactgttgtagctcatacatgatgggggaaaatcaaggaattgagcaagtgcttggaaaattggtagaactacttactgcaaagaaggatgaggtctcatcttcaagcagagaaattgttgttcatgctgaacctgtccaaaagatagagttgatgccaaatgatgtcaaattagagggcataaaaaattacttggcttggtctagaagggcacttcggttgttgaaagcaaaaaaacttgaaggcttcgtcattggggaatcatctgagccatcagataagtcaagtcctgaatggagcacatgggatgctaccaactctctggtagcagcgtggatgttgagttctatgactccggtcattgcaaacacagtagatacaattgtgagtgcaaaagagatatggaaagctttggaaaagatgtattcaggtgttggaaatgtgatgctgatggttgaaatagaagacagactccatgatctcaaacagggggagcggtcggtgatggaatatgttgctgagttgaagagtttgtgggctgatgcagatcattataaacctatcgagttgccacactcagagtgtgtgacatgggtgaagaagtggatagaagaaaagagagtcattcatttcttaagggggctgaacccagagtttgaggcaaggcgttctgctatttttcatcaaccgactcttcctagcctagatgaggccatagctgctatttcacaagaggagtacagactaaaggtgatgagggagactgctacatcaccatctcctgcatccttacctcgtccaatttttgcagcaacagaaatgaaagaaaatagaaagtgtttcaattgtggtgacactggacacttgagtcgtgattgtcctaagccactcaggcccaacaatggtagaggaagaagtacccagagtgctcttaggggtggtagaggctatggagaaggaggtggctatagggccaacgtagtgggtatagaagaggagctttctagagcagcaactttcatcgtgaaagctcgagaacccaaacaatgcaaagaaaaagttgcaacttcatcagtgaaagccgaagaacccgacaatggaaagaaaaggtgagagctcagagataaagatcaagttaatatgttgggtgacttcgtcaactttgcctacatagatgaaggtaattatgctcatgtatcaatgcctacacgcatatcacagttaaattggatgttagattcaggggcatcaaagcatgttacaggtgcatcatgtgagtttgaatcgtatatgcaatatccccccacacataaagaaactatacaaactgctgatggcacatcacaatttgttaaaggtgttggaacagttcagtgcactccatctattaaattgtcatcagttttgcatgtgccagcttttcctgtcaatctagtatcattgagcgcgttagttgataaattggactgtcgggttacacttgaccgagaaaattgtttaattcaggaaaggaggacagggaggaatcttgggactgcaaccaggcatagtggattgtggtatatggatcgtgaggacacagctgaagcattatgtactgtgttggctgcaacgataggagagaaggaagctaatgtgatgttattacattgtagactcgggcatctttctttcaacaaaataagcaaagcctttcctaatgtaatgtgtggggtggataagagcaaactattttgtgatgcttgtgagtttgcaaaacacacaaggacatcttatttgagtaagggcattagaagtgcctcccctttcatgctagtacattcagatgtttggacatgtcctgtggtttctattagtggaatgaagtactttgttacttttattgactgcttctctcgaatgacatgggtatatctcatgaaacataaagatgaagtgctaagatgcttccaagatttttgtgcccttgtaaaaaatcaattcaatacacatgtaaaaatgataaggacagacaatggaactgagtatgtgaataaggaattcagtacattcttgtcggctcatggtattatacaccaaacctcatgcccagatactcctccacaaaatggagtagctgaaaggaagaatcgtcatattttggaggttgctcgttcactaatgtttacaatgaatgttccaaaatttttgtggagtgaagctgttttgactgctacatatctcattaatcgcaccccatcgaggatacttgggatgaagactccatgcgaaatgttgttaggtgagaacaaatttgtggttcctcctaaggtttttggatgcacatgttttgttagagatcatagacctttggtgaataaactggatccacgtgcagtaaagtgcatctttgtgggttattcctctggacagaagggttacaaatgttggagtcctaatgagagacgcttgtttataagcatggatgtgacattcagggagtcaattccatattatggtgagaagactgaactaagttttatgtttgagcctcatcttatgggaactgaagaagttactcgtgagggggagaacaatgtcatggaaaataatttagttgaaaaagtgtcgagtatagaaggagtgataagtggttccttgtctcaatcaaggagaatgggagtggcgaatgatgagtcagtcccgcttcaagaagagaattctcaaattgacttgttccaaaataaggatgtctcaaaggtgtatacaagaagaaagtttaggtcctcaattgaggcaaccgaggtggctccatcagctccggtgcatgagagtaaccaagagataattgatgtatcttcatcatcagaagttgaagctgagccatcatcagatgatttgcccattgcactacggaaaggtacacgaactagtgcaggaatgcctccacaaaggtatgggtttgagcatgatataagtaactatgtttcatatgcttctttatctcctgcatatagagcatttgtagcctcactacaatctgtgaaaattcccaaagattggcgagaagcaaaaaatgatcccaaatggcatgaagccatgcgggaggagttgagtgctcttgaaaagaaccaaacatgggatcttgtcaaactgcctgcaggaaaaagggttgtcacttgtaagtgggtcttcactgtgaaacaaacacccgagggtaaagtggaaaggtgcaaagctagattagttgcacgaggttatagccagacatacggtatcgattatgatgagacgtttgctcccgtggcgaagatgagcacagtaagaatactaatatcttgtgcaaccaattttgggtggcccctgcatcaattggatgttaaaaatgctttccttcatggagatctacaagaggaggtgtatatggaggttccacctggttggtccaaacctgaagcaagtgggatggtgtgcaaattgaagaagtctttatatggtctcaagcaatctcctagagcctggtttgatagatttagatgggcactatgtgatatgggatacaaacagtgcaatggagatcacaccttgttctacagacacttagggcgtaagatcacaatgttggctgtgtatgtggatgatatcattatcacaggtgataatgaagcagagattgaatgcttgaagaagaacctaagtaagcaatttgaggttaaagatcttggtcaacttagatactttcttggtattgaaattgctcgatctccaaaaggcatatttctgtcacaaagaaaatatgttttagacttgctcagtgagactggcatgcttgggtgtcgacctgcatcaacacctattgatccaaatcacaagttatgtgctgaatcaggtgatccagtgaacaaggagagctatcagaaactggtcggtaaactcatctacttatgtcatacaagacctgacatctcatacgctgtgagtgttgtgagcaggtatatgcatgatcctagaagtggacacctggatgcagttaaccggatcttaaaatatttaaaaggtagtcctggtaagggacttatgtttaaaagccattgccatcttaatgttgagggatattgtgatgctgattgggcaagtagtcttgatgataggagatcaacatcaggctattgtgtgtttgttggtggaaatttagtgtcatggagaagtaagaaacaaccagttgtatctcgttctactgctgaagctgagtatagagccatgtcacaagggttgtgtgagatcttatgggtaagaaaccttttatctgaattgaaggtgttgaggaaaggcccttctatgctacactgtgataacaaatcagctatcagtatcgccaataatccagttcagcatgacaggaccaaacatattgagattgatcgcttttttatcaaggagaagatagatgatggtgttatagttttgggtcatgtgacttcaaatgaacaagtggcagattgcctaaccaaaggtttaggattaaaacagtgtgagttagcatgtaacaagatggggatgatagatatctatctcccatcttgagggggagtgttgggctatgtatttctatagataggcccatgggcttatagcccattgtctgtgttggtgtatgtgttatatatatatgtatgtatcaaagacacagaaagtggagtggtctctggaattttccataccccttcacaaccagacaggggttgtatcttacaggagatcctctatactgatggtacaccagttgcttccattaatattgttttcccctatacatacctaaacaatgaaaaaattattcagtgaaataagatgttgacaaactcttatatacaaatttaatagctgaagtgagtgtcttattccttaacctaaaatgctgttttggttgtcatgtgcaaagtttggtgcccactgaactatatgatctggtggtttcttttactattgagggatttttcttcgtgactgatgtttgattgaagttttgatgctgtgtttgctctttgcttcccattttttttatgcttttgcgtggaagtaattgatgtgattatttgccaccacttgtgttagatcaaccttaagttacaaaaaaaaatttctttacgttatgtccaccttgttgaagctacaaccatgaacagaatgaacactgtaaagtctacagagcaagaacgaacttgtgtcatacctcaatgttgttttgataactaataagagtggaattttagtttaatctagccctgtttaagatcttaatatttttattgtatgttgatggtgatgaatgcatgttatgaaatactaccaattttattttatgactaatgtgttttccaaaaaaaaattatgatagtattaaattaactctcaaggtgggtctgacttacgtgaggctttctgatgttgtattttcagagaaaaaaaatccttgtttcaaccaaaagttaggagtttttggtatttctgtttcaggacgaggcttaaaattatctagagtaccaatcagagggagtcatagataatcaagaattccatgtgtgttgcttcgattctttcaaagagaaatcaggtcaagagtagtggcatacaatatattagctcaaaatctatgatgctaacattcaatctcttatttttgttctcatttatccctatccattttcctttcctgttacagtaaaaatattactgccaattgcaaagcagagcacatgtcaaggtattacaccttagacactgattggtctggatgggtggctgggctaatttacattatgatgtgtcatgttcttgcagtatgatatttttcaaacttcagataatgctatatcctgtgccaacttgggggtggggactgattaaggctgcctaactaccgctttaatagttccctcttccagctactctggaagcaccctgcaccaaccacacatttccatagctatccatcattgccaaatgtcagacaaaaaacttatcaaaatggtttctgtcaatataaggctgggtctgaactggtctttcctccatgcattaatgttcagatttttagtttctattttttctagtctataatgtttcttagttcaaggagcttaacaaaaaatcagtttacttttttgttttttaatctctctctattgggcccatttaaatctctaagagtgcaaactgttttggttgtctaaaagctttaatataaccgcagcattccctgttctgctagtgttactgttgcatgagattttctcaagtgtgtcattcatgttcttctctgtggagtcttctgactatatgtctgattcattctgttccctttcttgccataccagttacaatgattcccatgtttagctcaagaagcaaaaaatctgaacaagatgtgttagtatctttgtaatgcttttgccaagttaactatctgatacttgaatggcatttacaggtacctattccgcatggccatgtctactccataaatgacaatgccacagtggaggatgcagcaacagactatgaattcatgatcaggcagctggttaaggtccgcacaataggagtctcagagagaaacgactgtcccaagtttgatctcatcctccttgccatgggcgctgatgggcatgtggcctcacttttcccgaaccaccctgccatggagctgaaagacgactgggtcacctacatcactgactccccgcagcctcctcctgagaggatcaccttcactctcccagtaatcaactcagcatccaacatagcaatagtgtccaccggtgatgacaaagcaaatgctgttcacttagcagtttctgacacgactgaaggtcctgatgctcctacatcactgcctgctagaatggtccagccaacggacgggaagctggtgtggtttctggacaaggaggcggcatcatcccttgagtccatgaacgacgacgatgcttccttcgaccgtcatgagtactaactctgaggatctgaggtcgtcttgaagtgaatgaacggaggtgtgtaagtaggtggtggcatatgatggaagacgtgctgtttgctccccttttagctcgatgtatgcattgatttgtctgagggtttagttccgggaaatctgaaattgctcttggtccttttgctatgagaggtgattgaaagcgaggaaatgggtatgcgatgttgagtcatcgaagaacatcagattttaactctggtcgtatgatattatgtagtggaagttagattttttttatttgttggtatgtctttcatggcgtcttctaaaaacattctgatccgcgagacaccaatcctactgttcttttagcccggagtatgtttcttccactgtttttttttttctgaacaggagctgaggctcactccatatattctgtttgtggtcgaacgagtgcctatgagctgaatgatacaagtgtcactcagccttaagcgcaacaccttattaacgatgccagtaggcctgacttgcacgtttgggagggctgcgctcgcagggctcgagtgcccagagtaaatgatgatgtctagttttaaggttctaggagaaaaatcagactacagtaatagtgtagagtaactccaataatgatatctaaaatagggttctacttatgatttgagagcttacgtctacttttgaagaccctgttttctaaaatcaacttcagcaaccctcaattgatgactcctaac

SEQ ID NO: 4198 - DNA, 3383 bp, Sorghum bicolor
ccagctcccaatcctgcgcggcgccgccgcggccgcgcgtggtcggcgagccacccgcgccgcccgtgcctgccgacgcggcaccaccccacggcaccgcggccgcccggcgcgtgctgccaccgaaacgggcggtcggccgggccagttcctgcagcgccgcctacaacgtacgatgcatggcgtggtccgctgacaataaacaaaggaggagaccacaccggcctgttccgttgtttatgcttcgcgggactcgcggtcgggtgtcgctcgctcgtgcgcgcggacacgacgtcacttgcttgcttcgccgttgcgtgcgtacgtgttgcacgagtgaaatcaccgcggaagtaaagtatgctcgcgatttttatttgggaccaagtggatcaatggaatattatggtgtgtgaacgccgctggcccgtgccgacttcttccttcaagcaacgcccgcccatcgcgtgcgtgcgtttgcggccggtatttttggtttccctttcacctggaacgagctgcctctgccaagtgcctaagcctacctgatctatcaccttattggccttgttttagttggcaaaaatgaaaagttttcggatactgtagcactttttcgtttatttgtgtcaaatattatccaattatatactaactatatttaaaagattcatcttacaatttacaagtaaactgtgtagttagtttttgtttttttgactatatttaatgcttcatgcatgtgccgtaagattcgatgtgatacgaaatcttgaaaaaaaattagtttttggggtgaactagacaaggccttagtttggctgataagtcatgctaaaaagtattgttaattgatttgttatgagaaaaaaacactactggctgattcggctgataaggttaagcgaatataaacgttagtaatttcttttactcctcacagttatttattttctgggagcccataacacgcctacctagagatcgactatcccagctacattcttcttcgatgacacgcattttacacattgttgtcacctctatgatttaagtatagttagaccccgtttggttccagataaaattttataactcaacaataaaatctaaatagcaatccaaataggcgatccttctaagagattctgggtatccgttgagaaaccctaggctataatccgataacctctgggaaggagctttttggagatactaactctataaatagtccaaaagtataatttggattcaaattgaacagactattactattctcaatctagtgaaaaatacttttagtaatgtcttttcacaccagcaagtcgtaaaagcctactgactcgtatatatacttatctggttcgaataaagtcgtcattgaaaatacatacacacggtagtgcgccacggtgccctcctggagaaccttcgactatagtacacgactatggcctcgtttacttccatccaaaaatgcaaaaattttcaagattctccgtcacatcgaatctttagacgtatgcatgatgtattaaatatagacgaaaataaaaactaattacacagtttggtcgaaattgacgagacgaatcttttgagcctagttagtccatagttgaacaataattaccataaacaaacgaaagtgctacaatgtcacgaaatattttcgttcaggaactaaacaaggcctgtaaacaacaactcgataagaccagtgccgtgctttcgtcgggcaagcaaaacccccggcgcacgaaacggccgcgcctaggctttgcacaacgcggccccagagcgacgtcacactgtcacggtaggaaggaagcgacctcggcggcccacttggcgacacctgcccacccgggccgcgtcccgtggcccccgtccgacgtggccggaagctgcgggccccgctccataattcacgcccagcccgcgtgggcccccccagcgtcccacgttaaaagccagcgccaattgccaatcacgcgctcacggggactggagaggagtagatggaagcaagcggcggcggtcgaggcgtccacggccacgaccggcagctcgccatcgtaagagcagcggaggtggaggagccgccgatctgatctgttctgttcctaggcgtgaccgtgtcccgtcaggcggggagctctggaggccatggagagggagcctgtcgagggggcggaagaggaagaggaggaggtggcgtgcgagtgctgcggcttcacggaggagtgcacggcgccgtacatcgctggcgtgcgcgcgcggtacggcgggcggtggatctgcggcctgtgcggggacgcggtgggcgaggagctcgggcgcgcgtcccctcccatctcccccgccgaggcgctggaccgccacgcctgcgtctgccgcggggcgtccgcgccgccgtcgcccgcgggcagccccgacgacctcatcgccgcgctgcgcctgctcctgcgccgcaggctcgggtccccgccgccgcccacggcgcccaggaaggcgcgctccacgcccagcagccccaggcgcgacgcctcccccggcggcatctccgtcgtcgcggccgtggccgtggccaacgggggtcccgggagctcgctggcgcgtaccgggagctgcttcgccgcgctcgtcgaatgacgaagaaatcgaagatgcttgatgcagagggaaaaacagggtagtctcttttgccttgaatgtgtatttctgcttgtttctctctacggaggagtacgcagtgtactagctagcagttgctaccaggctttaagataagatcaataaacatgtgtatatattgggaggaagatcgacgaactgtattatgttaaatatatacttctatgagaaaaggaagtaattccatgtttttctcaggtacggatcagtgaatctactacgtttatttacttctggtttctgcttcatttgtgattctgcttatgcacatgtcgtcgcgcttgtgcaatctgcataatctggatgaaacacaataatgtactgttgcttgtatgcacaagtcagctctaggccttgtttacttcaccctgaaaaccaaaaagtttttaagattctccgtcacatcgaatcttatagcacatgcattaaacattaaatatagacgaaaacaaaaactaattacacagtttagctgtaaattacaagacgaatcttttgatcctagttagtccatgattagataatatttgtcacaaacaaacgaaagtgcgaaaactttttatttttcagaactaaacaaaggcttagcttgaaggaagcgatgatctctgctcccaaaccgagataaaaaattaataaaatgtgctacagtaccgaaaactttttacttttcagaactaaacaaa

SEQ ID NO: 4199 - DNA, 4924 bp, Sorghum bicolor
ctcaaacacaacacaagaggtctgggggcattagcccgaacaaagaagctacataggatgcaaaattaaagtgaattaagcacctttaattaaaaaaaaagataacatgtaaagaagaggaaaatcgcgctgggacggatacaaacgaatttcaccagacaagagacaaagattggggccttgtttagttccgaaaagatttcagatttcgatactgtagcactttcgtttgtttgtgacaaatattatctaattatggactaacttggatcaaaagattcgtctcgtgatttccagctaaactgtgtaattagtttttgctttcgtctatatttaatgcttcatgcatgtaccacaagattcgatgtgatggggaatcttgaaaactttttactttttgagtgaagtaaacaaggcctgggtgaaaaggatggtgtagtaataataatataataatattcacatggcacggaggtaggaagagagcaggaagtttcacggtgagagcgacctttaccttttattttcgtgccacgaccatgatgacctactgacctagctatagtgctatatataatataccctccaaaatgtttgcttcggcccctatcacctcctgctcctccggacgtgttagctaggtttgctttagtttttttttatttaagaagatataaggccttgtttagttccgaaaagtgaaaaaatttcagtactgtagcgctttcgctttcgtttgtttgtgataaatattacccaatcatagactaactagaatcaaaatattcgtctcgtgatttacagctaaactgtgtaattagtttttgttttcgtctatatttaatgtttcatacatgtgccacaagattcgatgtgacgaaaaatcttgaaaactttttggttttcagggtgaactaaacaaggcctaagtatctcaagaacttagaatcaagttcgtccccttgtgccaaattaaaggagtccctctaggtaacactatttataattacaaatttttaatttgatacacaaattcgttgatagtttacatggaaaaaaaagtatgcacctactaacgtgatacaatgtatggcataaatgaaggtaatagataatattctcagcaagcacaattttagccatttcaaacaggctcttaacttttgttttgagtctttgtactgtcctccctttttgtcacggcctaggtatagttctacttaaaaataaaattgccaaagttaggcaaaaagttaactcatgacaaattacgtgacataaggttattgtagtcacaccttttgacaacttgaagaagtcgaacgaagaacacttgtccgaagtctgaaccacatgtaatggctatatactgccaatatactagataaaaacacgtttcataaattttaaaatgggctaaaaaaacgcatggttcctgttcctgccgccgcagagcctaaaccccgtcccatcaaacagcaacacaaaagggtcagtagtcaaagcgagcgagccccggcccaaccctgacccgctagcagcaaactcgagcagtccaatcgacccgtccatccgctcccgctcggcgcggcccacccgcgatcacgagcccaccaccgcgcacgactactcccacacctacacgagaccacgagagcgcgcacatgggctcgcgggccccacctgtcccgtctggaagcgagtcctcggcggacgcaacgtcccaaaaggaaaaccctttttcctccccacctcctcccctcccgcccacacgaagcacgtgcgcgtttttctctcgaagcattcatggcgggccccaccccacgcccattaaattgagtaaattaaattaaattactcgccctctacctccgccagcgaaaacgaggatagacaatttcgagcaatcgaattcccgtgggctttttaatcgcgggatttgggtggaaaccgcgggggtcctttataagcgcgtgggggcgcgcggcgtgctcacacgaggtcggcccccgcgttcacgagagaagggaggcaaggcaaccaccgcagcagctgcgacctgcgagtgcgagcgaggaggcagcgcaccacgtcctgggcgggcggaggagttggagccggcggcgcggagatttgtgcttgcccggcttggggttgggggtgtgagagagacaaccggcgatggcggcgtccgcgaggccaggggagagagcgaccagcttcaccgtcgcgtgcagcctcctcagccgcttcgtccgccagaacggcgccgcggctgccgagctaggcctcgggatcaaaggtgagcagcgggatcctggccgggtctgccttgtcgagaccgggctccttccttctgggtgtggggggagatttcgaaatctggggggtccagtttcgattcctgtggggggagtgttgtgagatctgggcggggccttggtttatccgggttggaaaccacgttttcgggcatggaatttcgcgctcccttgcttatccggctttggtttatttattttttttctcatcaggcgaggtcgagcagcagaggacgccggcgacaattagcttgctccccggagcggagggcgaggaggccgagaggacgaaggagaccatggagctgttcccgcagagcgccgggttcggcgtcaaggatgctgctgcccctaggtgcgtactgctaaatccatttcgattctggtttgtttggtagtagtagaactcgaacctagctgtcttagctctcatggacaaaaggccaagcaatctgactttggaagcatagtaatctgagtctagtgagtggtcataggtgaaacatgttacacggtggtctgaaatctagttacccgtgtgtaaagcatccttgtggttcggtttctgtgatattccctggtcaaactgtatctttgtaggagtagtctttaagtgtcttctgcaagaagcaacacaacgtttccttttatcaggcaaagcaaccaacatgctcagagttgtttagattgtacctaatgtttatcattaactaccttgctggtaacaacatatgaggggttaatctgagatggaaccctgccatccatgtgagataacaaggtcttttaaccatgaaaggaaacgagagtagacagtcgatttgctaagctcaagtagtattctacaagcacaaccgttgttctcagtgttccttctttgtaatatttgtcagcgagcaagaaaataaagagaagcctaagcagctcaccatcttctatggcgggaaggtgctggtgtttgacgatttccctgccgacaaggcaaaggacctgatgcagctggccagcaagggcagccttgtggtacagaacgttgttttgcctcaaccttctgcacctgctgctgtcaccgacaaggccgtgccggccccggtcatcagcttgtctgctgctcaggctgatgctaagaagcctgctcgcacaaatgcttctggtaaatactcttccctctgtttctgttcttacttagttgaagttttaaaatatgattgttgaactttgttatttgccaattattgatcgaaacatgccttttcttttgtagatatgcctattatgaggaaggcgtctcttcaccgcttccttgagaagagaaaggatcggtaagttgtgattattttttcagtatggtcatttctttttttttcagtgctgtatatggaatttcagtgctgtatatggaactaatttgtgcccttttgttgctcttcagtctcaatgcaaagacaccatatcagacttctccttcagatgcggcgccagtcaagaaggagcccgagagccaggcatggcttggattaggaccgaatgccgtgaagtccaacctgagcctgagctagtacacaacaacaacacagccaaataagacggcacagcaacctcaccaagcccttctgcagaatgatctgaaatttgctttgccactagaccgagtaccaaaatcataaatatctctcgttgtcgtgttttagtatttcgtttaggtcgtggttttacgccctcttgtcacatagttctggatgtaaagaaaagtagccagccagtcatgaccatcaccgttgagtccgagagcagtttttgtgggggtgttttaacacacggcagactctgaattggccatgctaagtaaaatgatagcgcaaagagaagtatatgtattattttctgaaagccagatccatttggctctagccttgatgtattcagaacaagtgattgtaacggatcgtgagtatcctcatcttgttattgttgttgttttctgatcacatggcttcaccaacccaagtttgtttggatccttgttattcctgctgcttcaaatctctggtacttagcaatctagtttgtaaaactacagcatgcaatgcatgggaatctgtttctgtttcttgcttgcgcctccaactatacagtttgctgccacaaaatcgatcagtggggcatttgagtctgtaaaaaaggtgaagttgtaattgagcaagttttaccttctttgacctaataatcatgcagatagatacagccatagtaggaggcaggcagcacatgagtcagagagcgcggtaggtcgagtggcgttgtccggttgaagatagggccatagctgactgctgagggagggagggtagggaggaggaagatgcacacacggacgggcatgacttgtctggctgatgccggattctttaatcaaaaggcaggagcaccgatggagatggagcacatgtgagaaatagggagggaggacggattccagctaacgcaacgcgttggaataataatactataagaatactccaacaagtctccaatacaatactctacggaagaagaaggagaagaaaaagcagcggcaagttgttttgcttggaaactgcgtg

SEQ ID NO: 4200 - DNA, 5043 bp, Sorghum bicolor
ccatattttatcttaaggcactcacaatgcagactctatcataaagtctaaagttatttattacctcgaacaatgtggacttaaagtctaaataagacttggagtcttattttttttacctctttctttaataaatatgctgccacatcagcaaaataccataaatattatataattaattgtcttggactctgtgatagagtcttgcattgtgagtgcccttaggcaagtttgactaagctggcaagtgtttggttgacagctaagtttatgcataattcttttgggttccacatgtcatagagttaaaaagtgtggcaagatttctttaagcatgacagagtgtggcaaccaatttgttagccatactttttgtggtttgccacacttacctaaagttagttgtggtagatttgactagcaaccaaacatccccatccctctgtcgtgacgacgttagctgccggactgccgtcgccgtttggtaccctagcctaggcaaaagcccacagccgtccacctccagcagccgacctgtgtgcacgcggtccgaccagatgggccgtagttggaccgcacgggtccatctgatagatgttcctgggccgaaactaccccacgcatttaacctatcccgtgttattatgtttttttttcattataaaactgaaagcttgtaaaattcgtattaataaaatcaaataaattccaaatccaatttttttggactcctaaatagttgatctatacaggaaactcaaaaaatagtatgtttatgtacagattattttctgttaaaataaaataaatctagggtttaatgtgtttaatttatagaaatagtttctatattcaaatgatgtgaaatttttatgatattcatggtgtgtacgatatgcgatgacaatttcatgactattccatgcaagatgactgagttattattttcatggcgaaatgcttgtttaatgcttttaatataatcatcatgtatctcgcaaattgcgtactctctaaccatgtttttagttttgtaaataatctatatttaatacttcatacatgtgtctgacggaccgtaaccaaacaggtccttagcttaatgcatggtacgatattaaggcgtaaggcaagacctgtagctaaagaatttagccaaacatatggaattatggtgaaaatttttgtcagttgcatatagagatgagcatggagagaacattgaccgatctcctgtgtgcggctgaccctgaccgaccaaaatagaaacttctatttgacagcgacaaaacaaaaacatggggggtgggggtggggattttttcaaagggagccaaaagatttgccatgagttttgacaaatcaaagctatatacgtcgaatctgccagcaactcagctgtgtttttctctcacaacaaatgagcggtcatgacttatcacactttaggaaacaacttgagggaccgtccagcatattttttcgctagttagaactgagacttttcagtcgggttattaaatcgtattagagccattggactactactccctttatcacaaattatatatcatttcaagaattttggaaagccaaaacatcttaagtttgaccaaatttatattataagaataatatttatgatgttaactaagtatcattaggtttttcatgaaatatattttcattgtatgtctatttgatattataaatctttgttattttttctataattttggtcaaacttaaaatattttgcctctcaagatcttggaatgacttataatctgggacgaaagaagtacttttttttggctcaaaagtaatctggtgagcagcttgcgagcgaaggtgttgatcgagtcatcaaaaagaaaaagtttagtgcagtcggtgtcaatactagtcgttattcattcagacaacctaaaataacatcagagttattaacttatgtccacgtctagcgtggagatctgtcagtgctgaggtgaggtaccatgacccaggccaaggaaagcaacggaacaaccgtaccaggtgtgatcatgctcgttgaacaagttcaggagtgcgaccaaaggatgcagagcacagcgataacgtgcctggatcagagcgatatgatccaacttgagtacttgacttgactgccccagtcgtctcgtctgtcctatatcaaaacaagccacagcagaagaaaccaccaccatatttagaacagctacttcgttatgatcaaaggggtgaatcatcaaactacagaaacaatatcagatattacagttcaatgttcgcgttcacttcgatgggcggccaaatagatcatgagataaatagacaaggtggtgtaccttatgtccttcgtttgaagcttggattgagccctgtccaatggttcttcaccatcttcctaatagccatatgcttcaacgccaaaccatgcacatgttccagcagctccgaccaggatcagagggcaaggtacacctggaacactactttccagcagatgaaccagggccttctgttccaccgcgacaacgaatcggtcaccttacaaccaggcagcctgggctactacatggggaattcctctcagctagggttcaacttgacagatcctggctggtttgtcatccctaaatggtttgatccatggaaaatgagcagtggcgatgataggatcgacttgcaggaagcatccttcagcatcgtcttcacgttgagcgtagtaagcaccaccatcactcccctgttatttgacatccttcccagacttgaaccctcacccactgacgctgggggttttagaccctttagctataagcctgtcaagatagaggcattggacagcacaacatttcattctggaagaactatccgggttacaactgagtttcagctaccccaggaagacgaccctaatccagcaagatatagcgtgcgcatcaattacgaccatgatgcgcataacctctctgtctacctagttcatgatgcagacgcaggaacagatgtgcctactgccgctgccaccatgcagctcgatgctggagactccctgactccagatgccttactcttcgccatttcatcctccatgggacagctcttgcagctccacacctggaacttcaccatagatgtcccggtgactgaacagtcacaagggcctaatactgccaccatagtgtcttctgttgtcggatcagcagctgctacagccgctattgctgccgttgtgtacttctacttgaactccaagtacaggaggtggaagaaagaccttgacaagctcgccaagaccatgcagagcctccccggtgtgcctatgcaggttgactttgctgacataaaaaaggccaccaacaacttccacgagaccatgaggctaggccaaggcggattcggcacagtttacaggtgcaaacttcctgcaccaaagaagggagagctcatagaggttgccgtcaagaagttcactcgggctgataaccggggatatgaagacttccttgccgaggttagcatcatcaaccgcctccgtcacaaaaatatcgttcctctcgtcggtaagcctccttgtgctatatattcttcattgtgataatatgttcttgttttgtcagcatgtctgaaaaatatggcaattaaaaaatcatctaatgttcttttttaatttgtatgtaatttatgtcgacaaacataatcaggatggtcttacaataaaggagagcccattcttatctatgagtacatgcccaatggtagcctggaccaacatctgttccgtagaagcggtgatgagcaacggcaagctatttgtatgagtcagtggggcactcgctacaacctggtcaaggatatcgcgactgggttacagtatgttcaccatgagtacgagcctatggtgctccaccgtgacatcaaggcgagcaacatcatgatcgatttcaactttcaaggacggcttggagactttggcctcgcctgcatattggccaatggcaaggactcctacactgactatggcgcccctggaacccttggcttcagggcgcctgagtatgtgtacaacggcaaggccactaggaagacagacatctttgcctttggagtgcttgtccttgagattgttacaggaaagagggcagttggcaaagatgtgcagtttggacatgttacagactgggtctggaaacttcatgcggagggcaacctacttgctgctgttgatgttgtgctcaccgccaccagtgagttcgatgccgatgaggccatacagctactgcagcttggcatggcgtgcagtagcccgaacccatctgatcggccaagcatgacggatgcggtgcagatcatcagcaagtcagtgccgccaccagacatacctctttccaagccaccgctcgtgtggccaccagaagggtgggggaacccgtcatcgacctccgattatagcacgttgtccactagtaacttcaacaccacctcgacattcatggttgagatgacggcgggcacagaacacacctcctgaacatgaagtcatgaacatggtggattcaccagttatcccagaaggaagatcttcgcaggagcccgtctctgtccatcactctgaacatgccttgatccacagctgagctctactgacgaaaccacaatgcatgtgctgatgtgcatatgttctccttcgtgttgtactggggtgcaactttttctagatatatttgtattctttgttggtaccacagttcactagctactaattagtatgtagatagtaatacagtcatggtatgtaccaataatctgtttagttaattagtactatacgtagatagtagtagagtcatcgtatatacaaataatctgcttagggggtgtttagttcccattttttcccaaaaaaaattgggttttgatctatcattttgcaaatggaactaaacaccatgcaaatttttttgcaaaaaggtagttattctccattttggattttggcctcaagaggccaaaaaaaccaaaatgagcctc

SEQ ID NO: 4201 - DNA, 4288 bp, Sorghum bicolor
agagaatgtccattggtccttggacttggagtagccgtcggtggtagcgtggacggagtcatggctcgggtgaggtactactcgtgaggatcgtaattactcaccaaacctttcgctacacaaccttatctcaacttcgaaatctgattaatgtttttatagttttattactgagctgatgacacgagtttggggtcctgcagtttaatttattttggcacatatatatgctgacatttccccagcagaccagctccaggctccagctgtatgtatatatatcatgcctgccgaatgaggtgcttttaatttggacgtgtttgttcatgtgaactgtgtatacagtagaccacagtgcagcagggttactacttagagcaagtattataagggcattcacaatgcagactctatcatagagtctaaagttatttattacctcgaacaatgtggacttggagtctaaataagacttggagtcttattttttctacctcttttttcaataaatatgctgccacatcagcaaaataccataaataatatgtagttaagtgtcttggactctgtgatagagtcttgcattgtgagtgccctaatacagccacctgctggctgtaagatttctttaccgccttctttcaggccactcatataatggttagctcatcacgattaatacatggtccatatgtctgtctcacaaactttcttggtttttgtgcctgagctggctgtaagcttacagtccgcttttactctctcttcttttctctctcctccacctcagcatttagctgctataatacttgctcttatatctgatccaaccagtagtgagtggtactctcatgactcgcaaaagcgatagcatgtctctgattggcacattcgccttgtaacgatcgaaaggcatgcaaagcatcgttggtccatccatccatatccttcatccttcctctcttcccaaatgcaggagcaactcgtgacgagaataacgtgatgcagctactaccacgtaccagtgcggttggatggggctcgatcggcagcttccgtccgcattgattcatgcgtgttcgatcgagcacatggcacacatgagccgagcgagctgacgagattgatgagcacaaggcttaccggcgaaaccgaattgatgatgaaacctgcagcaagaaattgaacacgtcggccaaagacaaaatggggttccacgagccacacacgcgtatctacaggagaggaaatggaacggggggtcgtctgcacatttagtactcgtgaagggtgtaatgcgtcgccagcaaccggtgtcgcagctagtttgggtttggggcgcattatttggccggccatgtacttgccctgtttgggggaccctgccttgcctgggacgacagcaccacacgctgacctagtgatcggtgtgactgtgtcgccgtgtcggcttcgcgtacctccaacatgcatgttctggtggctgtggcccctgagccgcgcaaccatgctccatgtccatgcttgctgatgtggtgcaagcagatgcatgacgaactgctcgctccccctgctgtgcgtgcgacggtgcgagagcccgctcctctgcacgtgagcagcagtgtctgcactctgccctctgcagctgcaactgcaatgcaacagcgccatgcatgctgatcacccgtgtcttgattttaacaagcccaaacccaagcccagccttgcagaaaccaagccgtctggtcacggtcacggtcacggtcacggcaggccgaaactgtgcacgaatccaattgtccggcccaagtgcgtcgaggaaggcccggagcccagccaaacgcccattctatgattttcccacgcggaagccccaaccaacgcacaccgcgcggtcttgccgacacaaagctccgcttgctgaaaccaagccgccgcggagccgcacgacgccctcctcctgccgccaccgagcctgcccctccggctgccgtcccgccatgaggaagcgcctggagccccgtctcgtccggtccctggccaccgccaccgtctcgtccgcccacccgccgctcccatcgccctccttctcgtccccgaagccgccccgcaccgcggcgccgttcctcgccgtgctcttccgccggggccgcgcggacgccgcggcgctcctcaaccgccgcctccgcggggcgcccgtgacggaggcgtgctccctcctctccgcgctcccggacgtccgcgacgccgtctcctacaacaccgtcctcgccgcgctctgccgccgcgggggcgaccacctgcgccaggcgcgctccctcctcgtcgacatgtcgcgggaggcgcacccggccgcccgccccaacgccgtgtcctacaccacggtcatgcgggggctctgcgcgtcccgccgcacgggggaagccgtcgcgttgctccggtccatgcaggccagcggcgtccgcgccgacgtcgtcacgtacggcacgctcatccgcggactctgcgacgcctcggagctcgacgcggcgttggagcttctggatgagatgtgcgggagtggtgttcagcccaacgtggtcgtgtacagctgcttgcttcgtgggtactgcaggtccggcaggtggcaggatgtaggcaaggtgttcgaggacatgtcccgtcgggggatcaagccggatgtgatcatgttcactggtttaatcgatgacttgtgtaaagagggaaagacgggtaaggctgcaaaggtgaaggacatgatggtgcagcgggggctggagccaaatgtggtgacatacaatgtgctcatcaattccctgtgcaaggaaggatcggtaagggaggcactgacattgaggaaggagatggatgacaagggtgtggcaccagatgtcgtgacatacaataccctgatcgcagggctttctggtgtgcttgagatggatgaggcaatgagtttccttgaggagatgattcagggagatactgtagttgagcctgatgtggtcactttcaactcagttatacatggactatgtaagatcggtcggatgacacaagcagtcaaagttcgtgagatgatggccgagagggggtgtatgtgtaacttggtgacttacaactatctgattggtggattccttagggttcacaaggttaagatggctatgaatctaatggatgagctggcaatttctggattggaacctgattcgttcacctatagcatattgataaatggcttcagcaagatgtgggaagttgaccgtgcggaaaagttcctgtgtacaatgaggcaacgtgggataaaagctgaactatttcactacattcctctgcttgcagctatgtgtcaacagggaatgatggagcgagctatgggtttgttcaatgaaatggataagaactgtggactcgatgctatcgcatatagcacaatgatccatggtgcctgcaaatcaggggatatgaaaacagttaaacaattgattcaggatatgcttgatgagggtctggctcctgatgccgtgacatattctatgctaatcaacatgtatgcaaaattaggagacctagaagaagctgagagggtgcttaaacagatgactgcaagtggctttgtgcctgatgttgctgtatttgattctctgatcaaaggctacagcgctgaaggccaaacagacaaggttcttaaattgatacatgaaatgagagccaagaatgtagcctttgatccaaaaattatttctaccatcatccgcctccctcaacagacgccgttgctctagtctgccactaccacctccgtcccttgcagccattggtcttgcaatcagctccaccgtccctcactcccatccaccactatcgtgtagccttgactggtcatgccctgtgagtgctcctgctgatcctcttgtaaatggtgaaatatgatttccttagactcagcttacctggttcctgcccatgtgtgcgttttttaccggcaatcctgtacaagggctatcattttccctctgggcgtaggcgtaataacttcgattgatttgtttccttacagtgtttattcatacgtaatgcctcaaaataatgctatcaccaaagactctggtttatttaaccactctgcagtttttgtctcactacttgtatctgtgttttttttcatctttcttgacttacctgtttcaaactatctggctatctgaacctatataagttctccaagaaacagtaaatggttctgttgatggaaattggaattgagaatatgtgctattgacat

SEQ ID NO: 4202 - DNA, 5505 bp, Sorghum bicolor
accatttttttggattaaattacttcagtttggtgatatcttatgttgcttctgaggatattttctatgacctgttgcttcttgcaggtatcagcactgtgggactatttttgctttaacataaacggagtcagaccagtgcaaagccgtggagctctatcaattctttgtatggctgctaagtcgtctcccagcattttgggtgctcacttgcaagatattattgacattgggtttggacgctgggctaaggaggagcctctgcttgctagaactgcatgtcttgctttgcagagattatcagatgaagacaagggcaaactgataaatactagtagtagagtatttgctgcattgcaaggtttggtaacaagcttctcaattcctgagaaaatatggtatggagctgcagataaagctataagcaccatctacaccctacaccctgctcctgaaatttttgctactgagactgcaaagaagtccctcagttctgtattcagtgttttaggaaacgaggatgtgtcaaatggaattgaaactgagaatgatgcctctctgtcatcagtatcaccttcaaagctgggtagatttctttttgttattagccatatagcactaaatcatttggtgtacattgagaattctgttaggaaagttcagaaacagatacggaagaatgaaaaatctcagtccactgtggatctccagtctgacgtgtctaaaagtacggaggtaattctggcttgagtgctaaatctctgtcctttctgaacttgtcacttttcacttgtcattgtttcagttaagttcaggttgtgctttattgtgtaacaggcacaaggcataaatgccgaactgggacttggtgcaaccatagatattgcaatcgagtcccttgctgaaagagcagaaaaggaaattgtttgctgttcttctaaaaagaatctcataggacattgtgggccatttctctcaaaactctgcaggaatcttacattgctgcaaaaggtttatagtcaactgggcttcctgtattccatttaaacattttttcttgttactatctacagttactaatttcttctcttttgaatctagttcccagacctacaagcttctgcaatgcttgctctttgcaggctaatgatcattgatgcagagttctggtaagtttttttttctttcgcatgactctagttgttcattattgtggaccaatgagcatttcatgaaagcactccctcacattaacactcaactttcagcgaagcaaatcttcaaatcttgtttactgttgctgaaagtgcaccttctgaaattgtccgatccaactgcactatagcgcttggtgatttagcagttcgcttcccaaacctcttagaaccttggacagagtatatatatgcccggttacgtgatccttcagtgtcagtgaggaagaacgctgtgctggtcatttctcatcttatattgaatgatatgatgaaggtctctctctctctctctctcccctcctcctcctcctcctcctcctcctcctctccatcccaccattatgttacttttcagtcactttgaaaatcttttgtaggttaaagggtatataaatgaaatggctgtaagaatagaagatgaagatgagaggatatcaagcctggccaaactcttctttcatgagttgtcaaaaaaaggtatggaaacatgtgtcagaaacattggttgactaacttgaatgctagagtttctcttctatatctaacaaatttgcttcttttttattggtggcctttgaaggaagcaacccaatttataatcttcttccggatatcttgggtagactgtgcaatcaacacctgaaagaagaaaccttttgcaatattatgcagttcttaattaattcaattaagaaggtataatgtttaatgcttcactcatttgcatgttgtgcatactccacattacttgttagtaactatatactgttgcaattgtgatcccaggacaaacaaatggaagctcttgtggataagctgtgcaataggtttgctggagtaaatggtactatgcttatgccttcaataggataaatagtaccccatctgtttgctagtacttgtcacatttgaccagcatgcatactaaggaagtcatgatttgcataaagttggtttgatacctagctaagtgggtgcttgtacttaatgttaataagttacttagggtaagagcctgcctcagtgttgaggaagtggcaatttattgtgaacaaaaaggtggtaagagtaagaaatttgcaacagcataggagtgaaacattaccgcattatgtaaaatagaaaggagagatcattgcacatataagaaataagatgagatcaagttgctctttttcgacactcttgcacccgtgattgatgtctacattttagctatatataacactcatttctttgtttcagccatttaattctttgttttctcgagacaattatgctgtaagacatgcattttaacatttctcagacacctgactctttctttgcatgtgtttcagatgtcagacagtgggagtatatctcttattgcctttctcagctaaccttcactgaaaagggcctgaaaaaactcatcgataattttaagatgtttgagcatgcattgtctgaagattctgtgatgaaccacttcagaagcgtaatatcaaaggttggtagcatagccttgatgtttgtgtaggcttcagtttggtttaataaagcatcactaaatttatgaacaatctttttttttcacttatctatggtgattccaccaatcagtgcaagaagtttgcgaaacctgagctaaaagtttgcattgaggaatttgaggagaaacttagcaaggttcatcaggaaaagaaagaacaggaggaaacaaccaaaaatgctgaggcacacagacagagaattggctcacttgatgaatttctggctactaaggaagttagtcagaacagtgggaattctactgaaggtaagtagaagagttctcatttcctcctgatgctccttatcctctatgctatataactgctataatcgaccatgtgaggctatatagctgtttatgttctgtgcactagagggtagtatcactgtttctcttgcatggatggtctgacctgtctatttatgtgtccgtggcagaagaaactagcgaggtagttgatccttcggtggatagcagcaccgaacataaggagaacacaccagaatgcagtgaccatactagtacggagaattttcagacatcaccccaagctacagaatcgggtggcgctggagagattcaatcaacacaaactgttcgcaaaggtgactcatgattctagctttgacatccacacaacacgaacacgtcaagtttcttaaggaactcatctttcatgtatgatgcaggcgtgtcacagttaagggcaaagaaaaccagagatccggttgcagatccttcggtggatagcagcaccgaaaataaggagaacacaccagaacacagtgcgaatactagcacagagaattctcagacatcagccccacttacaggatcagaaggtggcgatgaggagattcagtccacacaatctgttcgcaaaggtgactcatgattccagccatgatatccacacaacacgaacacatcaagtttcttaaggaactcatctttcatgtattatgcaggggcgtcacggtcaagggcaaagaaaaccagagatcccgttgtagaggactcagcagtcagtggtccagttagacgcgccacgcgctcaaccagaaggtacgtgtacttatccttctgctcactagtgctacttcattttcactctcgctgattaaaggaccatacacggcatatgccattctattctactagtcatgtttgctttgcacccatcacttgataaacaaatgtcttctgacgaactgtgcagacaaggaaggtgatgtttcagcagtgctcccaccaagcggcagctccatttatagcattccgttccgtgacgatctcgccttgagatcccagaattcggatacactgactggtgcacttgacgattacttaacctggatgtctgactccgacggcggctgttgtatctttttagcatgatgcgtgtcggtcttaatttagctcgctgaatcccggtcggccaataattttctcccatgaaactgtcaaggagagtctgttaactgctccttgtaaggaccacttgtgtttggttgttgcagtagctcggctttgaaatggattgtctgcaactggcttgatatttcaggcctgatgctatgatattttcaacatgttgttcttacgaatccaggctcagctgatgcccagtgtttcagtacgaccacaaaattccatctctcctgatgttcgagtccacacaatagcaataatggatctacggcaagtgccgaaaacgattgtgcaaatccgtctgctgactaagacgacaatcgatcctagtgactgaggactcggaagccgcgaaactgttctcaacatcgacacgtcgtcacagtcacccccccataaggataggatatctggataggaagagaatccaggaaagcaaagctgtaagccgttaatctccccgggtggggaccaccctgacgccggctggccggagagcggtggagcatccatggccggccacgaccatcttccccgccctgacctggctgcagccgagaaagcaggaccggtcgggccacttgcgccatctcggagcgatccgatcgatccttttcgtcacctggaccaccgctcctcctacccaccgcagccgcagacgcgcctccacctccaagaatttgatcgcgcgctggcgggcgcgcggcacgagcacgactcggccccgctaccgcgacggcgacggcgacccccgtcgtgtgccctgctcctcccccgccgcacgttccccccggctcgtctgccaccactggttttctagtggcgcaggcgatgttttccctccctttccctctttttctgaattcgagggtgccgagtttttcttgtcaagctgtgctgtgctgtgctgtgcaggcgcgtgtgtaggtcagcgcggaaattcgagcgacgagagcgttttccgcgaggcggcctgcgtggttttcctgctacggcacggttttggcgtcacaaagcttatccgtagatggctgcgccgttgcagaacacgatgtgctgtaagcgttcaagtaacagccgcgtatttgtggtcgtcatgcactcatgtaatctgaatcttctctctttctttctctctctctaaacaagaaagagtttacgtggcctgaatctcgcagcagtgacgacgcagaaatttgattcagaagatctcagaaggaaagagagagtcgacactagttgtgcctccgtttcgttcagtttgcaatttggagggtgtgcttgtggttcagggagctcgcttgcgtctgagtctggctg

SEQ ID NO: 4203 - DNA, 4174 bp, Sorghum bicolor
tgataaagtgatacatggtttatgaatgtaaatgaattgtacagatttgtgacgtatgctcgtatattctatatgcaggtaggcgaggactcagccttgattgcctgggccgctgggcggtatggtgacgttgaggggcatcgtgacgcagcacgaagagatcacctgcctgcaagtctaaatgggccgttccatttcgtggtctcccgcccgcccgcggagacatcaccaaggaataatcaaaatgggccgtttgcttcagctgccgccgcgggctgcaacgcaccgtgtttcctttttatttatttataaagagagactcagcttccttcttcttcctcgcgcctccccctccttccttcaaccggccaacggccatcagctccgatcaaaagcgtcaagtaactgcaagaactcgccagaatccgccaatccccccaatcctcaagtagttgacaccagtacaatttcccccttcttttctctacccgtacgagttcaaagctcgtcaggatgctgacatcggtgaagttggcggaggtgctgtccgcggacttcccggaccttgccggcgacatcacgatcctgcggaagctccttgtggtcgaagcccttcccgacgattgcagttcacatgacctgatcgcggagtactccagttttgggattttgctccgggcagagattgttcgtgatgacattggccaccgtgctgggcttcttgttttcgagtccgttgccggctgctccgccgccgcggcagaacccttccatggagccatgatagccaccccggtacgtcctccctccgctgctccgcctctggttcttgaatctcttcgtttcttttcttgttctcttcgtttcggtccgcatcagccgcggcattcttgcggctatcacaacggcccgcatattgccgcgaagctgatgcggactcacgccccgcgtgccaccgccaccgcgatactcgaatacgatgtcgctggccagagtcgctagtagttgctgcttgtcttctgcccaaggctgtgccgtccaactcgatgccgctgttccagcacccgcgggccgcgccggatgttgctgtgcgcaagaagcacctgcagatgggcactggcgccgggcacatcagtggctgggtcgggtccatgactccatgtcgcccacgcaagcaaggtagccgccacgctgcgtcgagccgtcgatgaccccgacgacgcgtacatgtctgatacattcgctgctttgttcacctgctctggacatcgcttctttctccgaccaacaaaatcccctgcttcattcacctgctttcgttctccgaccaactaaatcccctgtttcattcaccttcttgatgcagctggctgtgcggagcgtattagcatgtcacatattcacatctttgcctcacgtattagctgtagagactgcaagctgaagaacctcactgttcttgtcagcatgtcacatattcacatctcactgtttttgtcagcatgtcacatactcacatcttacccttttgtcaccttattatcaatacatttgttcaggttacttgctgcttacattgcaatcctaacagaggtacagttataattgggttttttttttggtatccatcgaattcgaaatctctgctcaataatgatttgtcagcactcagcacattgtcaggtatcatggtttatggtttgatactttgatcatttgttatgtcaatcagttcggttacataatactaaatacagtctcagttttgcagtattgcagctcgaaacatgagtttaatttgtgacatcctacccatggtaattaaaagaagctttatttctatattagagcttgcctcacatatttctttatttattatctcactattatgctgtatctccctggtcttgcctttcattgttggctctctaggctctgtcttgtcttttgctccactgattgcaacgcaaacctatttgctgcaggccccttttttggacatgaggaaccacaggcgttcttaccgccacctgagaagcctcattgctgtactggatactgtctttccggcggcgacccaggaccccaatttcttgcacagatcccttctcattgagggagtgtcgctgagggctactccttgtgatctgcttgacgaggcattgggccttcaggttgagggagctgttgttgttcgtgatgctgagtttggcgactctgttggactgctggtgctgacacatgctcatgacacggaggttgccatggcagcagggccacgcccaggagtattttgtgactgtatcaaggttagaactagaacttgaaattcctctcatcactgtacaatgcatactgggggccgtgcttgttattgttaccaaccgatggatcctgatcctggttactgcatgcattgtgttgtgcaggcgagcgacagtagttacacacgcttccagatcttggaggcccttgacgacagggtcagacggcaggctacagccgagctcttccggtcacttgtacccccagaataccttctcgcggatgcagccatgacgttccacttgagctgtgtgttcctcagaggcccagactgctccagcgagcatgcagtgtacaacctatgcaatattggtgccagggttcttcttgccaatggaccagtcaacgcggtgatccttgggccggatcacgatgttgccgtcctggtctactacgacgcccagggtacagagagaatcggcagaagggaaccacatttgcgccagaggcagctggggatgtacgactcatctctatttccactccctgccggcgcagctgccgaggaggcttcactggtgcggcgcctgctgccacccttcgtcacggccgctgattacctgggacgggtgattctactgacggagatcaacacgacgacttgtgacgctgaaaatatcgcgaggttcatcatactccaagcagagctacgtcatggattggaggcagtcatagtgcatagagctcttggggctgtgttcgtggtgctccagaggcagtctgactcggagttgctactacaggtgccccaggaagaatggttggcagtattcaagagtccggtggagcttcaactcctgcaggcgacgcccatgcagcagcagcagcagcagcagttggctccagtgcagcagtttgatttgagcagattgagcattggactgagacagtgggtgaaccccaaagcatttgagatcatgaggcttgggttcagagtggcattgacggagtgcccggatcacaacttcatggagctgactctcgggctgatgagactcgctgccctgtcacagcctcatgcacttcggcgcagctacttcccagacagagcagtgttgcttacagggacttgcatctacatgaaggaatgggatctgaggaccgcgctgagcaggtacggttcactggacgagttagtatatctgagacccaggaggatcgccctgatcatcttcacgtcttggactggggcaaccagactgctacgggagccagcagagacccggaggcgccggggttttggcgactgccgacctgcagcaccagatgctggcgttgccagttccattgcgaacacggtgttgcaggatctgctctccttacagagcaggctaccggcttactggtgatcattcattcctgtagggatgcaaatccctccagttccgtcaaaaaaactggtgatcattcagccttccttagcttgtgatccgtttgatgcgtagggcaggtattctttccttcagactatgtttaggacgaactggttggttggagattcgtctgatgctgcatcactgactgtgactggttgattctttcttgcacttgtggccactgctgattgctacgtggaattttttggaaaaagtttagctacgtggaattggaacccatctttttcattctgtctcatgcctgtcgttcgtggctgttagcgtgctgcgtaaccattgtcgagtggctctccatgatagatagtcagttgagtgtatatgctgtacatttacaaaactgaaaacctctgagcaatacacttgagtgccatggccgctcgctgtggatgcggtgcgggagtgagcgaggaggcgagttgggccgatcggcgcgaacacgcccggacacagaa

SEQ ID NO: 4204 - DNA, 10235 bp, Sorghum bicolor
aataaaataataattattatgatatcaactaagtatcatcggattcttttttaattatattttcatttcatatattatacttattttatcttacaaatcttagtatttttttttataattttagtcaaacttgaaaatattttgactcttcaaaattcttaaaatgacttacaatttgaaattaagggagtacaataatactcaatttttttcatcgtttttccaatggctttcctcaaagcaatctgtgctttacatagataaagctttggccttgtttagttcccaaaaaattttgcaaaattttttcagattccccgtcaaatcgaatctttagacatatgtatggagtattaaatatagacgaaaacaaaaactaattgcacaatttggtcggaattgacgagacaaatcttttgagcctagttagtctatgattggacaatatttatcaatacaaacgaaagtgctacaatgtcgatttcccaaaaaagttttacaactaaacaaggccaattgaacatcaaaatctgagtacaatgcttgcgtcgaatccaaagattaatcccgtaacgcactagacatgcaaaatcttactccatccgtccccaaaagagtgtcgttttaggttttcgtgttacaagtttgactcgatttgtagaaaatatgtacaatatttgtgtctcgaaataaatttgttaaaaaactagacttaaagatcttttcaatgatactaattatgtactataaatattaatattttttactatgtgtttagttaaagttattttttggaaagcgcaaacgtcacttattttgggacggagggagtacattcttgaactagtaccaataaaagacacatatgaagcaatgaaaaaaaaacatcaacagttgtatcatcaggcacaactagaaagggagtacatgtgtctcttttgcaggatagagagtgagtagaaacaaaattaattatactccctctattttgcatatgctacattagatttttctaagttaaatattttcaattttgagtttttgaactttttttaaaaaaaaattatatagattcataacatgtggaccatataattctaaacaatataaatcttatattgttaatcagtatatttttaaaactgatagttataaattagaaatgtttgattttgtacccgctggatattaaaaagaaaaacggagggaggcctgccacgccattggctcattgcgagcgtggagaagaaacagagcgcccgcccgcgcacagcggcacaactagtgttggcaatgggtaaatccccatggggtatgaagtctccagacccatccccgtgacaacaatatgacaccacgggtatccccatatacagtgatgggtggaagaatttccccagacccatacccggatgggtaaattagacccggtgggtcacccatacccgccaaacatcaacaattcacaagcaccagtcacatagtagcaattcacaagcatcgtcacatagccattcacaagcatcgtcacatagccacctcatcatatacctagcaaatagcaacataataatttctgctgcaaccactagtcacaacaccataatagttcattgtccatacaaatcacgtagtagagagtagtactttgctagcactacatagggtttcagtgtatgggctgccgatggattggtggctggtgggcttctttagttttgggctgggtatttttcacccatgggtaaatgggtatggggactactagaacgttcccatacccgcgtacccaatgggtgaagggtttgctccgtttatgtacccataggtactggtttcactccatattggtaccctaatagagtaaatacccatcgggtcgcgggtcgtgggcccccattgacatctttaggcacaactgcacaagcgggatagcaatctagcagttgctccccgtcccccaatccggcggctcgttctcccgcggcgcgcccgacagaatgcgcggccgccacctcctaaaacccttgcccctcctcacccctaaacccccttcccgcccgcccgccgcccacttccgcgcccgtgccgcagcccatccgcccacgccgcgccgcgcaccgctggccgagcccgacgtcggcatctcccgcttcgccgcctccatcccgggcttcaacggcgcgctcaagcagcgctactccgacttcatcgtccacgaggtcgcccgcgacggcgccctcgttcgcctcacctccttcgatctccccgacggcgaggaggtatttctctcccgaactcccacgctgcgggcttggattagtggactgggctgtaatcttatctgccatgtccgaggttctgacctcacttcgcctgcctggtgtttgtggatttccagagtggagataatgtggaggacggcgaatgcgacgccaccgcggatccatcgcgggcgctcgcgtcgttccggctgctctgcggcgaagtggattacgacgcgttgaggggattcctggagagggtctcggagggaggggatggtgatttgtcgccaatcattctgtcagccgatgcagataaggcccatcgatcggtgagtttggttaacccgaacgtggtttcagtggatgcctggatgaggatgatatgcgtgtcacctgctccgttgtaattgttttgctgcaggaggtgcacgagttcatcaagagaaatttcaagttcctgaacacggatacggttgagcacagcgacggtattcagaaatgtattagggtgcgcttgggttcagggccacgcggtgggagggcaaggaacaggagaggcatgaacagttcaggctggagagatgacaagccatttgacagtagaggctctacatcctggccttatcacctggggaagttcctgaggtgctgccatttctttttgtcatatgcatctatgacctgctgagataagaatgtgttaggatgcacatttgacttgcgattcatatttcatgtattctgattttgaaatatagtagataatagtaagcaatattaccaggtttaacctttacaaggagaataaggacacacaagaggcactaggagttataggaaagatgctaggggttcaggtagtctccatgttttacttcatcaaagtactttacaagttttatgttgagttgctcaattctcatcgcttccattgactggttggtgggattaatttccacagccaagatcgtttggatttgcagggacaaaggataaacgtgctgttacaacccaacaggtatgccctgagttttcccatttgttggtttattgttggacaatctgggtcaatatggtttggtcgggaaacaaagtatttgaatacccatattggtcgggtcaatatggtttgttgttggacaatctgggtcaatcaggtgtgaagcccccctctattttttccccattgtcctgattccctgccgcttgatcaggtgacacttttcaaagtgcatgccagtaggttggctgctcttaatagcaaactcgcaggtatcagagttggagactttaggtaaccagtcaagcatatatctatgaacccctttatttaaagtcactgactacttagctgcaaatgcctcgtcagttatgtgaaggagggccttactcttggtcaactcagagggaaccgctttgcaattactttgaggtgcgtactctccttgctttgtatggcactataggcaacatagcgtgctggttgaatgtcatgaatggtcttcgcgaaactgcttgtgatttgccaatttttatgctgtacacgcactatgaaacatgttgtcagagtcacaataaaatgtttggtggtttgctttcaatgtgttgtatcaatggttataagttttaagtttcaacttataaggaactgtagaattttgtcattattatgcgccattgtctttggtccacttactcaggccatgaccttgttttctaattaaggccttgtttagttccaaaattttttggaaaattgacactgtagtatttttgtttgtatttgacaaatattgtccaatcatgaaccaactaggctcaaaagattcgtctcgtcaattccgaccaaactgtgcaattagtttttattttcgtcaatatttaatactccatacatacgtctaaagattcgatgtgacgaggaatgcaaatttttctgggaactaaacaaggcctaaagagtgagcagatagttcatgtttcccgtttcttttatctcttccaggaatgttattgcagaatcagatgatgttataaatgctgcagttaatggtctaagtaaaaatggatttatcaattactatggcttacaggtacaggaaacatgcttcacgttaatactgtttttatttttatgttattatgtgacatgtggttcattattcttgcttcttgtgccttttaagaaatgatttttttgttcgttattctgcaaattatcatagtatgtttccattgtgtttggtagcgctttggcagcggttctgtgcctactcactttgttggtgctgctttactgagaggagagtggagacatgctgttagcttgattctgggtacaagggtaggtgttcttttttaaataatttatgtgaaatgtgaatatttgaaacttaatttcacttctagcagtttcaatgcaatgaatgacgtgcaggtacattataaatggcatggtgatgttgatgcagcacttaggggcatgccccgacatctcacagtggagagagctattgtaggtttccttgatctttttccagatataggacatgttatcaaaataaattcgtccaccttttcctcctagcacatttactgcatagttttgggatgctgggatttgattggtcctaggctcctactctctggttcctacggagtccacttacataagaaaggtaagatgtaggtgtttgtgtttcccgcccgccaagagcattcttgactacacaatacataggctatgtgaactgttgaggtgttggtgcagttccactcatgaactttaagttcagcagtttggttttagcttcagtttcaaactaggaggctttgagaggtaaaccaagcctggcaattggtccagagtggtgaaaattgctcaaatatctgcatgcctgggcagacatgtgctttacattatactagtttaggcacctctaggtactaccgtactaggcagcaccatactgcctgccttactcataacaattgaaacttcaggtaatacacgattactttttctgtacaaaatgtactcacccgaaagataaaagttgtttacttgcacagtaagaggtattgaatagaaaatttcctttctgtcctgcttttgtgagattgagttttgcattttctgttccaaacttccaatatttactaagtgatcatgataattcatggatgccatattttactgttcattcttgttaccattttaagattttacactcttgcttgttgttagtctgaattaaattgcattaatgtgggagccttagaactatgttttcttcaatttccagcttcagagattgaagaagtaccccggcaactatctacaagcactaatggctatacctaaaacactgaggctgatgtatgttgcaatacattatctaaattttcatttgtattgctaattacgtaatgaagaatgcggtacatcactgttatgtaagaaattagtattcaaaatctactgtcagaatatattgttagggcttttcgtatttactttgtgttctggtaccccaatggaaccatgctaatgtgcaggtatgtacatagctaccagagttacctatggaatcatgctgcaagtatgagagtggaaaaatatggtaagtctacttgtgcatcagattctgctgctcttgtcaagctgttgttctaatactaacctttggctgctgtcaatttttttttgaacgggaaaacctttggctttctagggattagggactaatatatactcttgtttatctttatatgctaatggctgaacaaacaggcatttcacaagttgtagaaggtgacttagtttacaaaacagggtcctctcttggagaagcaactaccacagatacgtttgatgatgatgatagccatgttaattcatctgaaatggaaatgtcttgtgaaacacttcctgaagaaaagatccagtctgtgaaggtatactatagaagatcgttactgatcatacttctgatggtgaacctttgcataacactgatataacaaaattcccaactgtgtgcttctcttctagatagttgattctgaagatttattgaaggcagtctactcgtttgaggatgttgtcctccctttgcctgggtgagtactgaggagcatatgcttatgtcctatgtttttgtgatttgagtgttatgcacttatgcttacccttttccacgtgcaggtcagaaacattgtttcctgggaatgaagttgctaggatttatcatgaaatagccaagaaggtaatgagttttgtcatgaacttttcagatattgaagaggtcgtcatgttatgaactgaagaaacatctgtaatgataactggattatgttgtacaagcatctttgctcttttatgcccaagaaaggatatatttgaaaattttctgtttacatgcatatcatttggagtatctagttatgaagtatatatgttttgtctgaatgatttattaggtcatgaagttccttgtaacttttagtgtggttcttccattgtttactatattatctcttctttagagaaatctgtgagattcataattttttataaactcatggaatacataattcttccagtcagagtatgaacaagtgatagtttcacatgttgaaatgatttcttttccaatgtaccataatgttcatcttaattttgtgactcaggatggcattagcctgatagagagcgcccatggtatcaagtaagtcgctctgtcacaaggtccactttttgccatctgactcttttgaacagcttaatggtgtttatgaactgtaattatacactaccactagaaagttccttctgatttcaccagaaggaaaatgagggttttaaaatggcatttatctatgtaggcttcaaatgttgtgccttacatatcggggatatattccttttggttccttatgcacaatatacttaggccagtggagcaagttcttttttgtcatgcatttctttaactgtaatttgttagggacttctcgattacaagcatgaaaggaggttaccgccgcatactccaacgccctattgattttgaatggtacacacaatacaatcagagtttttctgttccgtcgaatcaaatgctttcccccttatgttttagatttaactttaattttctgcatgtttatccacagtgaatttagatgaacaacccaagctaattgtacatgtactcctatagaacatttggtgctatgatttgtttttaatgaatgcagggacctaatgacttacacagacgacaatacacctttagtaccaactgatttagatgttctatcagaaatccaatcatcagaaacaaatgagctgttatctgatgggacttgcagttgtccatcaagtgattcccagttgcaagtttcagtggtcacctctggaccaaccattgaagctagctcagcagaaaccaaatcaattggcatcttagatctgtcaccagagaaactggctgtgaaattagaatttactctaccagcatcatcttatgctacaatggccataagggaattgacgaaaacttcgacttcggtgatttcctgctcaattcttttatttgcttttgaaaatatatttgctactacttcgtttcatcttttgatcattgaaccgaaccattggagctcgaccacaatcacatagttttcttttgggcatctcactcaatgctttccttttgacagacaaatatcgtacaactaaaaatgtatttcttcagtttgcacttcaatgcttgaactcatctaccactatcctctcgtatagttcataatgctatgtttttatttggtcatgtacaggttgcttgccagaaaacattaaatggctgaccaagccttacggtgtagaacgcattcttcacaagctggtatccattgtgacaaaatcacaaaacacatcatgtgtgtttagctggtacatcacgagtgaaaattctgttactaaaatataccttttcttcaataccttaatttcacattatgatttccagacttgtttcggtacttggttgcctgcagatattttcttttctgaatcatactatttggaggatttctatttctatacttatggagcttctaaaacagatggtttgagggtgtgccagatggtcaatacatggctgaactactacttgaggttagttactaaacatgagaattgtgtgtttagatcctaaaaactttataataattccctgtagtagcttgccttgaatttgtataatttaatttagagaaaattgtagagaaaattcctaggcttgcttctcatggttgtgttgcttggatccctggacatgagaattgcatgttttgatcctaactttataagttgatcaatggagatcaaaattttaattagaaaatgtaattggggattatatagtgtcttggctagtctgaatgttgtttcattacgtgatcaattcaaaccactattgtcaaaataaaaaaaaactaatagttatttgtgttataaaattttctgtggtttctttctaaaagtttgttttatccccaaattggcataaatctgaatttctctttgatcaaattcttcaaaattagttttggactctatttgcttttgactattggttagtagtgaattagtgattgtgtgtgtgtagactgcagagcaggaagaggagactacagtatccggctaagttagtttgaaattaacattttcctgtcatataaggaccaaatggttcttaaaaatatgtccagctaatcatgtaacttagtgtacctattgcaaatagtaatgtaattcaaaatccagctaatcatgtaacttagtgtacctataacaatctgtagatttgtcaatatattaccactgtttttggtcagcaaagttgatgattttgccttgttttaccattggatttcatcatcttttactaacaaactgtagatttgtctatttaccctgcaacatttggcttgacttgtcttattttatctccccagtgtattgtcgagagctaccctgatacattgagacatgtgcatgaaaatcataatcgatgtactagaacattgagctaccctgctcagcaaagatgacttgtcttattttatcttctgttgctggttaccctcgtgctgttccataggccctactgttccatgatttttgagaaaactggaacaggtgctggtctgtcatatatggatgtataaactggaacaggtgactgaaaagtagctttactttttgcaggtagatcgttattttcgtcatatattgtgatgtctcaactgaggtcgcaaccgcttcggcatgcacatatgactatggacttctcacttctgcgagacgtgcgctacctcatgtcgtccatgtgtcttccagcacttagagcaactccaacactaccctatatgcacttggcaaatcttaatttttggcaaaacatgaaaaaagctcctccaacactaccctatatgcacttggcaaaataggatgcttggcaaaaagaggaccaactggctcaaatttaggagcgttgggagcgcttggcatcctgcctacgcggtgggacccacacattcagcatgcacgcatgccttaaatagattgcaacttttgcataaaagtccctctgatttttttcaggaatcacaagatagtccaaatttgccaaaaaaatagctaactgttggagaagcctctttttttcacttggcatttgagctttacacttggcaaaatccaagatttgccaagtgaagtttagggtagtgttggagttgctcttacgctgatgggtgaactaaacaaggcccacgagttactgctgctgtacagtaaggccttgtttagttcactctaaaaacaaaaaaactttttaagattttccgtcacattaaatcttgcggcatatgcatggaacattaaatatagataaa

SEQ ID NO: 4205 - DNA, 4499 bp, Sorghum bicolor
acgaggaaacgaattccagacgaacagaagctggaactcattgcgaacgtggccaaatcgctctcctagtcctacctactgccagtatgcgttttgtttattaggaactcgacgccaggcttccaagagcacaacaggccaagagtcaagtgacacgacgggagcacggaagcgaaactgaagggaactctgctcaggcagctacgagcctacggtacgggcgtacgcggccccggagaggagacggcagatcagctggcaattgaaccgttcaaaacttgaacggcacatgctctgcctcgaacaatgccgttgaatgctgaattagtcaccctacagttaggaccctgccttctttagggcagggcctgtttggttcgtgtttcgtataggagcctggctcgtaccaaggagcctggctggttggagccggaccgatgtcatgcaactcattctgtttgattggttgcatcagctgagcacatatgagaagagatgttgtttgattgcccgcatgaacaaatgttgcataagataaaaaaatattaaataatcatcaaaataatatttacgttacataaatacacttaatacatcttatttatcttaatatatgttaatcttatttaaaatatactaatatcacttaatacatattaattataccgtaataatgtaattagcaaataaacacttgtacccagccagccaggcccgtcagaaacgctcgattcgagcgttcttcgcgagccaggctcgcgttgtacggttgcatggcagcagcctggccgtgccgcttgaccaggcaaccaaacgccggcaagttgcatgcggcgagccatgcatggcgtaatgcaggcaaccaaacgccttcttataaacagctccggcataaccttttctgaaaaagtaactttattgaaaccatgttatttgatttttttttggtaaaatagatcctccggtctttcgaaaaagaggttaaagaagtgaaatgtatatagtgctcttacttatttgacattcgtacgtatgatctatgcctgatgtcaccttagataacgtgaagattaggagcaattcattacaaatcgagatgggataggcggaggagccacatggagcagttttttttttttgactccttccgctacacaaaacagtttcaactccaagactactctggcctagcatccattttgtactcaaatgtttggcacaggtgtatagccagtgctaaagcctgagctccagcgagagccataccatacatgcacttgggattcctctggagaggctaataaagcgcgactagtcgcattgaacctagctcacctcgcacgtctttctcctcacgtcactccacctcctcccatgccgtccccaaccagtggcggccacacactgccgcggtgccgcccgccactcgagcgagcctccgccgtgctcaccccatgacctcacccaccctaatccgagggtgccgatcgacgagagctccgccagacacccttgccactagccctgcgcaaccaccgtccccgtccccggccccgcctcacgtttcctgcaattcagcttcacccacgtttcctgctcacgatttcaacgttttccagcgatggtgccattggacatgtgatgatgatgataatcaggcacccgacacggaatcctaggagcaaaaaaaaaaagatccagctcaaagtgacccgcgagcgcgacacggtcgcactcgctcggggctaacttcttcaccatggaccactgcgatgtggatggcagggccccatcggagaacgcccgtcatcataggagccggccacgcgcgcatcatcgctgatctcacccacgcgtgcggcgctcctaccaagcgtcgtctccggttccggctcaacgactgccgatgcccgatccccgatggggtgggggaggtcaaaccgaccaagaaacgcgttacaaatacctgctccgcccccgcctccgctcactcacaattccacaggaaacagacgcgagcgcagcttcgtcaatcgaactagcaagctgcagtctcgttccgaaaggaaatctcagtgatccgagtgaccgccatggatctggcctggatggtggcggcggccgtcgcgtcggtgctggcgtcttgggcgttcaacgcgctgctgcacctcgtctggcgcccctacgccatcacccggagcctccgcgcgcagggcgtccgcgggccggactacaggttcctcaccgggaacctcgccgagatgaagcgcctccgcgccgatggcgccgccgtcacgctggacgtcggcgaccacgacttcatccccatggtgcagccgcaccaccgcaagtggatctcgctctacggtacgtccgtgacgcgtccatccatcgctatctcctccttcgacgcgacgctcgaggctccatcgatcacgctgctgactgtcatgtttgctctgctgcaggccggacgttcgtgtactggaacggcgcgacgccgaacgtgtgcctggcggacgtgaacgtggtcaggcaggtgctcttcgaccgcaccgggctctaccccaagaacctcatgaacccgcacgtctcccgcctgctcggcaagggcctcgtcctcaccgacggcgacgactggaagcgccaccgcaaggtcgtgcacccggccttcaacatggacaagctcaaggtatgtcatgggtaccgtgtacgcatacgcctcactccgtcaccgtcgtcactcgcgtgctgagtgagagatgatattttctcaagtcagacgtgtcggaagttattttctgagccgtgcgctttcacttggcatgtcagatgatgacggcgaccatgtccaactgcgctctgtccatgatgtccgagtgggaggcgcagcttgccaagggcgccggcgacgccgaggtcgagctgagcacccggttcgaggagctcaccgccgacgtgatctcgcacacggcgttcgggagcagctacgaggacgggaaacgggtcttcctggcgcagagggagctccagttcctggccttctccacttttttcaacgtccagatcccagcgctcaggtacctcccgaccgagaagaaccgcaggacatggaagctggacaagcaggtgcggggcatgctgatggacatcatcaaggcacgcgtcgccaacaaggacaccgccggctacgggaacgacctgctcgggctcatgctggaggcgtgcgcgccggagcacggcgagacgccggtgctgagcatggatgagatcatcgacgagtgcaagaccttcttcttcgccgggcacgacaccacgtcgcacctgctcacctgggccgcgttcctgctgagcacgcatccggagtggcaggacaggctccgggaggaggtgcggcgagagtgcggcgacgaggtccccacccgcggggacgcgctcaacaagctcgctctggtgaacatgttcctcctggagaccctgcggctgtacggcccggtgtccctgatccagaggaaggcgggatcggacctcgacctcggcggcatccgggtacctgagggcgctatcttcacgatccctatcgcgacgatccaccgcgacaaggaggtctggggcgacgacgccggcgagttcaagccggagaggttcgagaacggggtgacgagggcggccaagcaccccaatgcgctgctgtccttctccagcgggccaaggtcgtgcatcggtcagaacttcgcgatgatcgaggctaaggctgtggtcgccatgatccttcagaggttcgcgctcgagctgtcccctaaatacgtccacgcgcctatggacgtgatcactctgcggcccagacatgggctccccatgctcctcaggcgcttgtaggtttcaaggagcgcgccagatatgacagattgtattccttcttttttttgtgtgtgcgaagaaaagaaagttatgtattactcaaagttaatgatgtttatataatcccgagaaacaatttgctcaacacacgcaggcacactaaaacgctacatagttgcatgcctatttcattttgtcagttgtcaaaggtaccatgcacccatcggcggttccatgcttctaaccaatacttccgcaaagaaaattatggatctagcacatgtgtatttcttacctgccacgtacaccataggaggatgagccatcttgccactatccaatgatagagacgtgaggacctgtgttggtgcatgcattcggctctggctgccaaatttgactatgaacaagattcggaacataatctacgcactttagttcgtccgacaaaaaccaaaaccccttcatagcatctcgtaaagctctagcataattacatcttactactagagcatgcatagtcgattcattttcacgtccatatatctcgcacgaatcattggcaatgatttggcgcccttttttgttcacttgtttggttgaatactccctctcagttgtcttaaatcaaactattt

SEQ ID NO: 4206 - DNA, 4588 bp, Sorghum bicolor
accagctgggaggctcagttggcgaatcagcagaaggagcgcgttacgatcgagctgagcgaccagttcgaggagctcaccgccgacgtcatctcccacacggcgttcgggagcagctacaaggaagggaaacgagtgttccaggcactcaaggagctgcagttcatcgccttctccacgcttttcaatgttcatatcccagggttcaggtatcttccaacgaaaaagaacatgcgtgtgtggaagctggacaaggaggtgaggagcacgctgacggggatcatcgagaaccggctcgccgccaaggacaaggccgggtacggaaacgacctcctagggctcatgctggaggcctgcgcgccggagcacggcggcgaccagctcctgagcatggacgagatcatcgacgagtgcaagacgttcttcttcgcggggcaggagaccacctcgcacctgctcacctgggtcatgttcctgctcagcacgcacccggagtggcaggacaagctccgggccgaggtgctcagggagtgcggcggcggcagggaccgccgccgggctcccacccacgacatgctcagcaagctcaagctggtatgtttgtcgtcttgttggcgtttgtctcgtcgtcttgttggcgtgcttccgtcccactcacgagtcatgacgtacgtgcccgcagatgaacctgttcatcctggagacgctgaggctgtacagcccggtcccgctgatccggcggcggacgcggtgcccggtggagctgggcggcgtggtggtgccggcggacgcgctcctgacgctgccgatcgcgacgatgcaccgcgacagggaggtgtggggcgacgacgccggcgagttcaacccgctgcggttcgacgccggcaccaccaaggcggcgcccaagaacctgagcgcgatgctggccttctccagcgggccgaggaactgcatcggccagaacttcgccatggtcgagtcaagggccgtggtcgccgcggtgctgcagcggttcaagctcacgctgtcgccggagtacgtgcacgcgccgaccgacgtcatcacgctgcgccccaagtacgggctccccatgatcgtcacgagtgttgatgatgcgtagcgcgagatgatctactatgtaacactgggctgtacattatcaaattagtgagcgaagactaattacctgtttactagttcgcctttgccatgaataaatacattagcacaatcttgttgtaagattacgacgacaatgccacaacggctctcgtttgacttcatcattttcgtatgcaacttgggtgcgacattgcgcgctgagggcactcacaatacaaaaactctaacacttctctatatagatattaattacactaccacgtagacaatttaatgatgtgttaagcaaattaatgaagagagaagaaaaattcaacaaatcgtttggttcctcttgctaaattttagctagctaaactttagtcactttagtaactaaagttctaaacatattaactaaaaagagctaaatagtttagttccattagtcatgcgagagtagctaaaataattttagctagctaaaatttagcaagagaaatcaaacaggccctgaaactaggtctttacggtaatcaatggataagaaaccactcgtaacccattggatgagcgaatatagtttctatcactacttatgtgttatgtggtgtacttacattaaaaatgatgattcttttggtacgatctcgtgtactattgaaactagtttcattggcagggacacgcctgccaaagccggttcggccgctcctaaatgagcccatgtcccaagcccaggagcgaagcaggccgaccctagacaggagaggggcaatgggccatgacagggtagaaggtggcctgtttcaacggccatggcaccaggtggtttccccgctacagagaaacagctcgccgcttgaaaacgaaaagcctcgcgccgccgccgccgccggatgcatactatttcctccgcggtgaagaggaggctcagactgaggcctcggtggcttcctcttgcctccccagcgatttctcctcgccgcgggtgcagcagccacggcccccgcgaggccgtcggctcgcacgactcgctactcctccggctgcagtcgggccccgccctcacggaggtacggagattgcacgctgcgctgctggtgcgaggataccgtacaagcaccgtcctcgccgcacagctggtgcgcgcgtacgccaggctgcgggatggtgggctcgggcacgcggtgcgcgtgttcgacggaatgcttacgaggaactccttcgcgtggaacgccgtgatcaagggccttgtcgatgccggtaggttctcggaggcactgcagtggtactgggacatggtcggtgatggctcggtcgttgctgatcgtttcacttacccacctgttctgaaagcatgtgctgcacttggcgtggttgagcaggggagaaaagttcaagagaacgtggaggcggacattgccaggggtattgcaaagtgcaatgtgtttgtgcagtgtgcgcttgtggacatgtttgccaagtgtgggtgcttaggtgaagcaaggaatgtgtttgagagcatggaagtgagggacttggctgcgtggactgcgatgattggaggaaccgtgcacggaggagactggcttgaggtgatgacgttgcttaagcgcatgaagtcagaagggtttcggcccgattcaatgattttggccactgttattccagcatgtggcaaggtgaaagagcttaggactggaacggcattacatggatgtgtggtaaaatgtggagtaggtgttgatacctgtgttctgaatgctttggtcgatatgtattgcaaatgtgctaggctggattttgctgcttctctgttttggtctatcgatcacaaggatgttatctcttggagtaccataattgcagggcattcacagaacagaagatatcatgtgagtgtcagtttgttttctgaaatggttgcttcaggagtaaaaccaaattctactacccttgcaagcatacttcctagtctttcagagctgaggttattcaggtatggaaaagaaattcattgcttctccttaagaaatggtttggaacacagtgagtttctagccagtgcactcatcgacttctacagtagacaaggatccattaaggaagcagaaattgtttttgagttcacgccgaagaacgatttggttgtttcgaattcaatgatcggaggatatgttgtgaatgaggattcagagtctgcattacgtctattaagggcactgctgaaagagggacttagacctgatcgtgtgactgttgtttcagttcttcctctatgcaatcaacactccaggcttctccagggcaaagaactacatgcttacgccatcaggcataacataagttcatgttgctcagttagtaatgcacttacagatatgtactgcaagtgtggttgcctagaactagccttcgagatttttctgctgatgacagagcgaaatactgttacatataacactctgatttcttctctgggaaagcatggtcatgcagagcaagccttctttctttttgacctaatgaagagagatggagtttctccagataaagtgacttttgtagctctgttatcatgttgtagccatgagggccttattgataagggcttgtgcttctatgattccatgttgcgggactacaatatttctccagataaggagcactattcgtgcattgttgacctttacagcagatctgggaggcttgatgctgcttggagttttattgcaaatttacaagaagtgccagaaatcgatgttcttgggtgtctattgtcagcatgcagagagcacaatagaatggacattgctgagctcgttgcagaaagaatatttgagcaaaaccccaatgatcctggctatcacattctgttatctaacatctatgccagtgctggaatgtggtctgaggtgactaggataagaactatgatcgaagagaggagcttgaagaagagaacaggaaatagcttgatttaagatttgtggtttcttgactccatgtacatattcatatgcattatatgcattttgcacaaaagaaaaacatcatttgcctgtggttgtatggaacaaataactagacatgaagatagagtgtaaaactgctgatgtggaaggatagtcactagcttctctagctacttgagaatttactgatgaacctgggagacaggacgcaagacgggaaacgggaagagagacagctattgcatcaaaacactaatcagaaattttttctagaggaataaattccatatttgccggcataaatgagttgacaggattatagagtaaattttactgttattatgcttgttcttggtgttatatgttaagtagtttaacaattttgctccttctctataccatgcctgcaatctgcatgctcttgcatttgtttgctagtataattagctaaagagggttgcttggggtcacaagatacagactgtatatcttgatgataaatttattca

SEQ ID NO: 4207 - DNA, 3647 bp, Sorghum bicolor
gcgtggtgagctgcgactgcagcggatgacatccactattccactgtccaccggtgctgccaccacaatttcagtggacagcgggccatgtggcactgcacaattgcagccatgagatttgcaagaaacctgaataagaactgcataatcaagcaaaaggcatggcaaagagcaagaattaagagatgccaaattacatttctaaactaagcataagaagcattgcattgtggcaaatgaactgagaatttatatcatggtaataatgaatcaactaacttttgtgcaagtcctgcatatgcaaagtataactgtctagtggagggaggcaaaccttgtaggcatttatcgagcacgtgtccggtcgccgcctccgtctcgaggccacgcacatcgctgtcgcctgacattggctagcgtgggtggtgagcagtgagcactgctatgcaaggcgtgcgggcagatgatgattcgagcgagggatgaagagcagacagagggatttgattggaatttggagctgttggccaaaggtgcccatgtggaagactccacctcgccgtacactggaaagccgagcacgggaaggggcagacctcgcgaggtaggtggtgttgcgcgtaggcgaggatggatgggtacgtggtaccgtggccggccacggctcggcgggaggcggtccgtggcctactggccacgcgcgcaggccctgctgcagcctgcagcagcgcagcacggcagcgcgacgccggagaaggtgaaagggacgcgggagaggtggatgccgatggggaggtgcctgccgagcgaaagaacgacggcgacaagcgctcaatccggccatggcgcttgctaccgtgatgaacaggggagctgagcggagagggcgcgagggtcaagcgaggagccgtgcgtaggctcgcctccttcttaagcgccgcgcaggggttgggagcggccagcacggtggcatgggctctgtggcgagccatgggccacccggaactctggcggcgatggggtcgcaagtgccgctggggcacccgctcgcgacgggatggtctggaccggagcggccaggaccgccgcgctcgcaccccgcctgcgccggggcgtcgcggtcgtcaggccccactcgcgccgggatggttgggagcccgggaccggagcggtcaggtccacctcacccttaccccgcctgcgcttgggtcgccatggccgccgggaatacgacgcccgcgacggaaggagggaggagggaggtgcgggagtagcctgctagcgggttcacgaccattcatgacggcccggttcgtgtaacgggtacgagacccgcgaagaacctccgatcaaacggacgatctcgtttgttcggcagatcgaacggttagaatattaacgggcgacgtggccctatcgggcgctcgcggtttggtgcaggattcgtattaagagattcgtattaagagatgccccacgcaccacacagattttttttttgagatcaacacaccacacagatgagatgatcgttgacgatgatctgttgcaggcagcagtaatggtgttttggcgaggggggggggggggggggacttctctggttttagcccatcccatgttttagagagagggggtttcggcccatctgagttcaaaagagcccgtctaagagagattccatccaaaactgaaccgggctcgaaaactagttgagcccattgttccatgggccgaactcctgcattacggcccatctctagaacaaaccaaacccttctggcactcgccactggtacaaacctctgacgaccataccagttaggtggcaggtcaaacgcactgagcgacggaggccgaggcaggtgccacgagtctagctacgcggcgcccatgcaccgcgcctgggtgccacttctccactcggtccatcgctgatctcgccagatatatatgcgcacgctccatcagttccttcgtctctctcagtgaggggtctccattgcgagagcagtcgtcagcagctgtcttcttgtaacacaacaacatcgacaagctgtcacagtagtacgatcgacgccaccatgccgggactcaccatcggcgacaccgtccccaacctggagctggactccacccacggcaagatccgcatccacgactacgtcggcgacggctacgccatcatcttctcccaccccggtactatacgctcttttcatgcacgcacgcgcattctctgtccatctctgtactgatgcatgtcatgtgacatgacacacaacatcagctgacttcacgccggtgtgcacgacggagatggcggcgatggcggggtacgccaaggagttcgagaagcgtggcgtgaagctgctgggcatctcgtgcgacgacgtggagtcgcacagggagtggaccaaggacatcgaggcgtacggcggcgggaagcagaaggtgacgtacccgatcctggcggacccgggtcgggacgccatccggcagctcaacatggtggaccccgacgagaaggactccaacggggtgagcctgccgtcccgcgcgctccacgtcgtcgggcccgacaaggccgtgaagctgagcttcctgtacccggccaccacggggcggaacatggacgaggtgctgcgcgccgtcgactcgctgctcaccgccgccaagcacggcggcaaggtcgccacgcccgccaactggaagcccggggaccgcgccgtcatcgcgcccagcgtctccgacgaggaggccaggaagatgttcccgcacgggttcgagaccgccgacctgccctccaagaagagctacctccgcttcaccaaggtctagctagctaggtgttcgactgcggacctagttcgttgccggccggccggccggccggcggcggcgtacgtgcgcggatcttttgtgccaccggcctcggcctgctggtgcttctagtctgaactggtatatgggctgggctctatgtatgcggtgtatgttcagtaagtatgctgtaagcctgtaacgtcacccgtctcgtgtacgggtggaaaacagtgccgcttagcaacgtccatgtcctcttctgaacttgtcgcagtgcacatcttgtatatgtgtgagatgtactacgtgtcgtctgcccgtaatcggaagtatccagcccgccgatgtgttctgggaaaaatgataggtgcgtgcatactgctgtccctgtcgccgtgtcgccaactcacgacgtcggcggttggctcgcaagcagctcatcgactctgatcccttcggcagttcggcacttcggcttagatccccccaacacagcaacgaccatcgtcgtcgtgggctggaggagccttccgagacgggatcccacggccggccacccaaattggtttctgcgcgacgccacgacttcgatttcgacgaacacctcgagggcatcgcagatttcccacacatgtaatcgaatctacattaaatatagacaaaaatttaaatcgcgagacgaattaaatatagacaaaaatttaaatcgcgagacgaatcgaaaaaataaaaactctaattatacagacgaatcttttaatcctagttaatctataattagactgtatttgttacaaacaaacaaaagtgctaacgaaatt

SEQ ID NO: 4208 - DNA, 4259 bp, Sorghum bicolor
agacggcctctaggcattccatcagtccctgtcgctgctggaatgatcaacccatcggatttccaacagaaggtggtaaacaatgtggatcatgtcgtcaatcgtatcaagtcaatatcaccacattatctggctgaggaggtatgctatttcttgtctcttgatttgtgccttttttctgaagaaagtgtttccagatgatattatataagttatgatgcttctgattaccttttacaaaatagagaataaaaagatgcttttgtgggaatatggcaaaagggtcaggttatttggatgtaactctagtttggtatttggacatggctgcatggttttgacattatcaactattgtcacgggtatctgggggcgttggtgtttgccaatgatgactcaggtgcatatcgtttatgttttgtgcaagtatgctgcatctgactgacgattcatctcctgttgtatcaggaggagaatgcaaccgagccaccgcagtcggtacaaagaggcgtcaccgagctggtggagtcggcattgtcgtcgaggaacctgtgcatgatggatccgacatggcacccatggttctgaaggcatccagcacctttctgatgattgtagcctgaccaaacagccggcgtgtgcctagtcgtagtatctggtagtcttctcgtagatactgtacatatttccttgtccgacaacgctggttgagactagaaactccttgtgttatttatgtagataaagacagggtgccatcctgccctgtattggcgcagcttagcttaatctaatctaaggttaattaaagagtatttattatctagcatattgcggtcatagctcaactttactagtaatgttgttttcttagaaaagagctttgtaagtaaagatgagctgttttgataaagttgtttgacaaaacagcttttcacgtgcatggatgaaacaaagaaatgggagaaagagagccaaggtaagctgtttttttcagctttatttcaactcatgtctttgtaggagagagaagaaaaactattttgaaaaaaagtgtttgacaaaaaaaacagctcataccagcttcatatgaagttgttgtgaggtgtgttaaacaggtcctatggatgtcctgaaattcaggcaaattgctcgagttacactctgccttctgttacggatgcgaagataaaatcgcttagaaaaaaaaataaaatcgattaaatttcaaagcacctactggtgtttcgaagtgagacgagcaggtcagctcttacgggttaatctatataccacgtgttattgtattgacgtgcggactgcggactcaagcaccagcacccagcagtaggtttcggttccaacatcaaggtcgtgactcgtgacggtgcgctgcccgtcccgacggttgttacgcaccgacgtccgtgcccaactacccaagcacctgacatttccttaatttatacctttttcttgggttttctatttagggactcgcaatctccagttggtggcatgggcaacaccgacagtggccggaagccagaaaccaggaccagacgccgaaacgcgtgctcagctggaagttgctccatttccgtacacggttacagttgtttcatctgaaattttgttagctttcattcatgaaaataacccggaaatatttactgtgttcctcctgttttactactgttctctacgagtccggaaaggaggcactaaacgtaagcactgaatgaatcacttaaatgtccagaaagcagaaccgttaaaaaaagaaaaaaaaaaaaaaaaaaaaaaaaaaaaaaaaaagaagattccttaagcctctgcttggttggttttgggacaggcaggccggaaggaagcgtaaagggaatggcggtggttggtgacagcaacaggcctccttcctcctcgcgtcgcgtcgcctccgcctatacctgtcgctccccctgcctcactcttccttgcactagttgcggcaggcggcaggcaacgccgtggtgatctgagaggatggattccaggatctccgtcctctgctccctcgtcctcgcctcctccctcctgcactgcgccagatccgacggtaagcgtcaggcttctccaccctctccgcccctccctcccttcttgtgatgctaggctgcctggtttcggtttcgctgctcgcggatcctggtgcgccgcaccgccttctctggttgctgctgtaggctgtagcgccagcgattccattcgtcttctctgctgcaagtgtgtaaccagcaggcgaatgtagttttgactcttgagccactgtgatctggaaatgtgcacgagctatgaattggacgtggtctcgtggctttgattagctacctagctgctgagaattgtttcagcggccgcacgagcttaggtttcccatgggtcttcttttattctgctatattctactatccaattatcaaatgctcagactcagagtcagctcaggcattggctgcaagatctgcacccagagcagaggcacgtcacatgtttcatcgcagtgctcggtagtagtattatattattattattatgaaaaattgtcgatgctcggcagcattaagaaatggtcactccctgttgctattgctactaattgagttggcgtctagcgcgatgcaggtaagtggtgcaatttcagtgcgtttacctcagatgtggttgccttgaattaggccttgtttagtttgcagaaatttttgactttggctactatagtacttttgtttgtatttgataattattgtccagtcacaaactaactaggctcaaaagattcgtctcgcaaattgcagacaaagacgaactgtataattagtttttgtttttatctagatgagacggagaactttggaaatttttggaaactaaaccaggccttagtgatcgtcattccttttaaaaactatgtgtcaagcgaatgttcatcaggatgcattcggctggatgaattatggttttggatgttataattatcatgtcttctaaagatgaatgatacgagagagaaaaaaaactacttttcactgcaacatctgatacacacattacacatgaaatttagtagtgatattctggtaggaggcactgaacttggccttttcaggtaatgacgctcagcttctcaagggcatcaacagctacaggtcctccctcaaggtcccggcgctgacggagaacacgaacgcggcgtgcctcgccgagcagctcgcgaagcagttcaaggggcagcagtgcaccaacaccacgggcgccaacaccgtcatcggcaccgagcagcagttcccggactaccccaagtacctggaccactgccacctcaatgcgtcggtgaccgaggacggccaggtgatgccggcgtgtgtgccggggctcgtccccgccgtcgtcctcaccaactacaccaagtcgcagtacaacaggttcttgaacgacacccagttctccggtgtcgggatcgccaatgagggcgactgggtggtggttgtcctcagcaccagcacgggctccggtgactactcgccggctccgccgggctccaattgggcggcttcggctctgccgttcacccaactggttcttttgctgataggatttgtgatcttgctcatcaagtgagagtttggtatgcatacatcacagagtggagcttacatttgtgtggcttatgttataacattcggggttacaacttaacttggcaggtctcattggcattgttaagcatttttcacttgaaaagatcggttacgaaacaagtttcacagattaatttgcccaataataataaaaggaaaccaccatctccggctccgtccgcacgtccgccctctatattcgccgggctcttctcggccaacagcagtgtccacgtcacctcgaatgctcctgtccgtccgatctcccatccagccatagtaaagacttgaaacccacaagccataagctcccaaaccctcctgtcagctcggctctccctccggcgaggccaccatgctcgccgccgctcgctccctccgccgcctctccacttcctcttcatcctccgtccgcgcccttcgccgcgtcctcctgcaccatccaccatccccgccctcacttccgcctcctctcccgcctctccgaacccttacgcgcgccttcctcccgcacctcgcagctacccacgggctctccgctgcttccttctctacctccgccccatcacgcctaggaga

SEQ ID NO: 4209 - DNA, 23226 bp, Sorghum bicolor
tctagctgcggttttcttgttactcttggtggttgccgccacctagacggcttggagcagcggaggaggattggcacgagttggtgtttgttcgtggccatctcccgacgattgtgagaggtttgtgcctacctcggcggagtgccaaaggcaacattagtggattgctcgtgtcattgagctacctcacttgtgggtaggttcttgtggtgtcctagtgaggacgaggttcgtgctacatctcttagccaccgaaccaccaagtgttggtcgacacaacggggacgtagcgtgccggcaagcacgtgaacctcgggagaaaaatcttgtgtctccattgtgtttgttgattggatttctcccggtgattggacttcataatattgtgattggttcatcccctctacgcggtggtataaagatcaaatcttctctcttactttcttgcaaactagagtagcttacttcttgtatagaaactttaggtagctttctagtgtaagtagagacatagctcttgtgtgcctagtgataatatcaactagaattgttggataggtggcttgcaaacaccccttagagctagagcaaaaagcttcgctttgttatttactaacctcttgctctagtgattttgtagaactttttaataggctattcaccccccctctagccatattaggacctttcataggggcgagtgttgccagtgacgaagaagacgtcaggaagaaagggggcgtgcgagaaataaggggttacatgaggttgagacaaccatgtagggtgagttagccacgtcctataaaaaaggaaaagtctacattacctctttatttttttctataaaagtctgattttccttcctaaactctaaaatcagataaatcatctatctgaactttaaaaccttttttttacctccctgactgattataagcggttttcaaagacgattttgtctttttttacttattttcggttgaatctatgtaaaaaacatagcaaatcacaaaaagttataaaatttaaaaccaattttattatactccacatgactttagtactatttttttgctataactttaaatctatgactttctgtaattaattcatagttgtggttttatggtccaattttagtgttttttattgcactgcttgttaaaaatcttatttatcacaattggtccatatgcagttatgaattaattatcgaaagccataaacctaaagctataatatttttttactaaagtatactatattatatattcactgtgtagatctacttatatggagtctaacaaaatagaattttatgtgcgatttattatgattttttaaagattaatctaaaatctaaaataaataaaaaacaaaatcacctttaaaaaccgtttataaccggtgaaagtggtaaaacgaactggttttaaaagtgaagggatccagaaaaaaaaaacagatttccgtaatatagacttttcaaaaaaaaaaaaagcgacaccttcaggccgaaacgtccctcggatcagccgcaactcggacaccggacccgtgcagccagtcacgggcccacggcgtcacgcacccaagcgcccgtggcggagttgacccgactcaacccaacccacactggcagtctccgctccccgcgcacaagctgaaccgccctgcccttgcccttgccgcgaggctcgtataagctcgaggcccatcaccctcgtcttcctccgagtccgtccccgtctctcccccaccccaaaccctcggctcgctcgcgagcgcgagagaccctcctcctccttcccaacacgggggagccattcgcgtccggggaaccgagccagcgcctcccgccaccgcccccgcactcctccgttcggccctccgctcctccgccagctcgcggcgcgctcttccggcgccgatctccaaaaccctaagccctggcgcggtagggttggagccggacgcgcacgggcggggcgcccgccatggcgcccatcaacagcggcaacatggagcagcactcgcagcggctcctcgagcccgacctccgtgcgtcccgtgatcccctcccctgtcccgatttccttcccattgcgttttttttttctcggcgtcagcttcgccggtgaattcccagccgtctgatttctttcccattggggtttgtttgagctcttgagaattttctgtcgtttgattgaaggacattagatgcttctcgctgtttcctcttgttactatatcgcatagtaattaatttttttctgtctgaatttcacaccggtggaaggactgcatcaaagcatctttgtccactgttgtagtgtgttgctgcggctggtgtttttccttaactgatgatgtctgcaacttcttgcttcctatgtacactgaatttctcatccagatagccactttcgttcacattttcaaagacgtttactgttgaatccatttaaatgtgcgtagccttcaacgtcgtatttcaagaacaacttcgattgcctgcccaattttgcattttgaaggattttcctggctggctggctctgttctgtagcggggcgacttatggagtgtacctgctcttctttatgtttctcggaaggcgggaatgaacatactttttatgcagcagtgctctggcaccccctcccctttcgagctcactgcttactcccgcactttgttttgtgaattttgcttaaacaataaacctcgtcttgcaaaataatcactcactaacaacctttgcttcaaaccataatggtttatctagctgaatggtctgatctgatcgtttgctctaatactctgcagctgtgcaagtccgactgcagcttgccatggaagttcgggacagcctggagatgacacacactccagactacctcaactttcttcgctgctacttcagagccttctcagcaattctcaccacttacactaagccacaggccacagagaatgctgagcacaagctacggaatgttgtgatcgagatactcaaccgccttccacacagcgaggtgctcagaccatttgtgcaggatttgctcaagctttctctccgtgtgctgacacaggacaatgaggacaatgctctccttgccatccgaattgtgtttgacctcctccgtaacttccgccctactgtcgaggcggaggtgcagccatttcttgactttgtggttaacatataccataaatttcccacaactgttagctacttctttgaaaatcccaacacaagtgccagtatggctgcgtccatgcccatgcagcatttggaccccactgctgatgctccagtcacgatgcaagtgcctggtggtggtcaactcaacccgagcacacggtccttcaagatagtcacagagagccctcttgttgtgatgtttctcttccagttgtatgcaaagcttgtgcagacaaatatcccacacttgttgccactcatggtggcggccatctctatcaagggtcccgacaaggtgccaccacaccttaagacacccttcaatgatttaaagggtgcacaagtcaaggtaggtcttttgattttgtttttggttgccttttctttcaagttcatgatggattgatgattttgtttgcagaccttgtcattcctgacgtacctcctgaagagcaatgcagattacataaagtcatatgaagaaagcatatgcaagagcattgtgaacttgcttgttacgtgtcctcctgattctgtctccattagaaaggcaagatttgacctggtgctttgttgaaatcatcaaactatatgagtgttactttggaaatgctaatatctttatctcttacactgaatttcaggagctattagttggtctgaaacaagttctaaacaccgagtacaagcgagggttgttccccttgatcgacacacttcttgatgaaaggtaaatcattcttcttttgccagcaatcatgtgatcaaaattttctagtttgttttcaaatgtgctatttctgggatctcattcagattaagtttgatatggccacatcttgatttcctgataccgtgtacttattttgtgatgtgtaattgataaactacttaactttgcaaagtgcttcattttgacctgtgatcaactcatttcatcccctttccccttctttttcatggtgtttcgttatttcttagttacttttggtaggctgaataatcctaatataaagaacgcctagaaaagttaataagattttctccgctgatctaatgggtattacaaaggtgaacaacacatgacaatgaacaaggtctatttttttgcctgaaatatgatgagtccaattttcaccatcaacaatgaaataagttggctttcacacaattaaaaccagttcaaataacccccatacttaaaaccacttgtgtgacagttcaaagggagtaaatgaacttgtttaaaaacacagcctttccctgatttgtatctatttgaaatcaatctattttagttgtagtttaaaaaaacttactgtggaattgtaattagcaaaagaattatcccttcatgaggctctgtcttatcatttcctatgatagttatgtattatttccctttactggtcttgtagcatttattattctacatgtattaggccctgtttggttccccctattaaactttactccctatcacatcgaatgtttggacacatgcatgaagtattaaatatagactatttacgaagctaaaaacacagctagagaataatttgcgagactattttttaagcctaattagtccatgattggacactaattactatagttacaaatgtgctacagtacgtgttaaactttactacctccaaccaaacacccccttaactcttagtttctagccatgtctgacaccttacttttggtgttgtcagggttctgattggcacaggtcgagtttgcatcgaaactttaagacctcttgcttacacccttcttgctgaattggtgcattatgttcgagaagatatttctcttccacaggttaaacttgtctcttgtatcatttatattgcttacagatttggggtagcattctagttgttgaatttgcatgtacagctgtcaattttgtgtccccctcccctgccccatatacccaaacacatcctatgggaattttaggatagatgcatcacttaacctcggcaagcggatctgttatctggtttcttcattgcagacatcagaccataccaaacagtattatggctgagacatgtattaggcatctgatttcttattaaagctaggtgccttgtcagatctctgcctgttgttgagctactatatgacttacatggatactatatgagctactatatgactttcatggatacaatattatgcaactaattagtcacttcaatgatgctgtgatgcttagaagataaatatctctttaaaggcatacatagttccactttgtcagtattattatgccttggtgttgatcatgttgctgctgacttattgcagttgtcacggattatctatttgttctctcggaatatgcacgattcttctttaacccttataattcatacgacatctgcccgcttgatgctgaacctggtacatttgctattctgaaattctttatattagtcaaagtaggattaattcagttaggtgcagtttatgattttgaaattcttttccttctctaatatgtatatcagtatgtgagtataaaatcataaaatatatatctgtaaaactaggcactagtgttaactaaatcagtactagtaagtccctaccttttgctttaggttgagcccatatatcaaaaaggtgttgaccagcaaagcatggatgaagcacgggttttattggtaaggagtgacttccataatagtatgtcagtaattttactttttcctaatcaactatacttattacttgaaatgatcaggggcgcatattggatgcattcgttgggaagttcaggacgttgaaacgaacaatccctcaggtatacaacatgttttgtgattctttcggtcgattacgttttaaaacctttgcctaatttatcagctgaggacatggaaacatgggcgcatgcgttagatgctgctacactgcagaatctaatttcaaaaattactggttgaagaaatgtgggttgaaaacatatagagaaaatatactgttacattgcaactataatactcattataagctcaaggaaattgaatactctttccgtccctttataactgtcgttctcacttcccgagaagtcaaacgtacttaactttgaccaaatatataataaaatttaatatttatggtacataattagtagcattagatacatcattgaatctattttcataacaaacttatttgaagatataaatgttgctaatatttttatacatacatagtcaaagttaagaaagttcgaccaccatgaatatcatagcgacacctaaaaagggacaaagggagtatgtgataatcttgcaatgaaggggcacattattgccctgtgctccttaggtccttcactcccaatccccacagaaacatgagtgctatctccttacgttttcttgctgatatggtccaccttactcctctcactctatagttgcttgaagaaggcgaggaagggaaggaacaaccgaatctgagaatgaagcttgaagtcccattacaggtacgctatgtgaatgtttctttcatggaggtagcagtaccatttttttttctgtggctgactgcactcctctttcttcagaaaatcacaaaagtatgctcaaattgattttgttgaccttatatgtctagatcaaatttctccaaatagcctcggtaggttatgaaaaccatagctagtttcttagtcatgggcagatagataatttttttaagctttgcttgttaacaaaatgtgtgaggtgtttagttgcatcctacttataaaatgactgtattttttttctgaggttaaatctaatacaaattggaattgttttttttgactgatgattcaatgacctttcttttttggacaactttacagactgtgctgaatttgcaacaacctttggaatatactaaggaaatcaacgattacaaaagtctgataaagactcttgctgtgggtatgtattaattgttgtaaaatttctgctctgttccatgtctttgagcatcttatttcagttattgcctaactatttcatactgacctcatacaaggaatgaagacaataatatggagcataacccatgctcactggccacgaccccaggtattataaacctcccaaatacgtcgatatcttttggtggttctgatattatacttgagctctaatgaaccctttgatgctggcatttctattatggtgaacagcaacaaaaccaacagtcttctaatttgtcagttcaacccttcagggggctgagggaggatgaggtccaccaccttgaaactttcttcctctttatttgattgaactgttgctaatcagttttaattatctattctaggtgcggaagacatctggtgttctgaagtctggtgttcactgtctggctctgtttaaggaaaaagacgatgatagggaaattctgcaatcgttttcgcagatgttggctataatggaagctcgcgatattatggatatgttctccttttgcatgcctgacctctttaattctatgataaccaacaaccagctgttgcacatattttcgacccttttgcaagctcccaaggttctgcggcctttcacagatgtattaattaacttccttgttagctcaaagcttgaagccctgaagcagccagattcacctgcagcaaagcttgttttgcaacttttccggttcttgttcattgctgcagccaaagctccagaaagctgtgaacgcacacttcagccacacgtgccagttataatggaagtctgcatgaagagtgccactgaagttgagaaacccctaggttacatgcaccttcttcgtaacatgtttcgtgcattgaacagtgctaaatttgattcattgatgcgtgatcttataccatctctgcaaccctgcctcaatatgttactctccatgcttgatggaccaataagtgaagatatgcgggacttgattttggagctttgcctgattttacctgcccgcttgagttctttattgccccacatacctcgtctaatgaagcctcttgttcttgctctaaaaggtagtgatgaccttgtgagcttagctctacgcacacttgagttttggattgatagtctgaaccctgattttttggaacctagcatggcaaatttaatgtcagaagtcattcttgctttatggtcccatttaaggccgcctccttacacatggggcacaaagtctttggaactgttagggaagctggggggccgaaataggcgatttttgcgggagcctcttgcactcgaatgcaaggaaaatccggaacatggattacgcttagttctgacttttgagcctgcgacaccatttttggttcctctggacagatgcatacaccaagctgttggtgcagttatgcaaggcaatggtatggaagctttctacaggaagcaggctcttcagttcattcgggtgtgcctggattctttgttaaatctgagggaaaatgtacctggcgagggtgtgagcactggtgttctcggtacattgctaatctcttccctggatccctcaagacgtcgcaatgatgcttcagatatgaaggttggcagaagtgatcaagaattaatgttctttacattgctttttttttactgtagtttactaactcttatcacaaattggaagtttgccctaagtcaagctttttatctttgactgttaatataaagtttgtatgtagattgacaacacaagattggccttactaaagaacattgctttgctttacattaattgttatctgagcaaaatgaattcttagattgttgaacttatagttttctttctggtgtcttgtgctttagttatcttaccaaggccttgttttattattattattagggagatttaggtgtgaagacaaaaacacaactactggctgaaaaatctgttttcaagactcttcttgtagctatcattgcagctaatgctgacaccagtcttcatgatgagaaggatgattatgttgtagatatatgccggcattttgctatgcttttccatgttgattcaccatcctccagtcaatctggatttatgcatcctattggttcttcactaccatctagcatcaacatgggatcaagatcaagatgcaacacttcatctaatctccgggagctggatcctttgatatttttggatgctttagttgaagtgttatccagtgaaaatcgccaacatgcaaaagcttccctatctgctttgaatatttttgctgagacattaatctttcttgcacggatgaagcatactggtatgctaaggggtggtcctagcacccctatgctagtctccagtccatctttaaatccagtatattcacctcccccaagtgtgcgggttgctgtatttgaggaattattaccacggttattgcattgttgctacagtagcacatggcaagcgcagatgggtggggtaatgggtctcggagcattggttggtaaagtgtctgtggataccctatgcatctttcaggtcagagttgtgcgtggtcttctttttgttcttaagaggttaccagtgcatgcaaacaaagagcaggaggagacaaatcatgtcctaacacaagttcttagggtagtaaacaatgcagatgaagcaaacagtgaacctcgacggcaaagttttcagggagttgttgagttccttgcacaggagttgtttaacccaaacgcttcaatggttgtgagaaagaacgtgcaggcttgcttatcactgcttgcaagcagaactggcagtgaggtctctgaattgcttgagcctctctatttgccaatgcttcagcctctgatttcacggcctcttcgtttgaagaatattgagcaacaggtacgttagattcttagttctgaatcattcaaacttgaagtccttaccattgactgattttcctcccttttatgacaggtgggcactgttactgctttgaacttctgtcttgcactcagaccacctcttctaaagctatctcctgagcttgtcaattttttgcaagaagcactgcaaattgccgaggctgatgaaactgtgtgggtcaccaggatgatgaatgcaaaagtaattctcacatggaacaaactcagaactgcatgtattgaactactttgtactgcaatggcatggggagatctaaaagctcaaaatcatactgaattgcgagcaaagattatttcaatgtttttcaaatctctaacatgcagaacgacagagattgtcaatgttgctaaggagggacttcgtcaggtactcttttagctgtaccactttgtatattgacatgaaaattgaatcgttttattatctttttacttggtttctgtactttgttctcactattctaatcttctcatgttctaattgataacttcatttctgtaggtggttcagcagcaaaggatgccaaaggatcttctacagagcagcttaaggcccattctagtaaacttagcaaacacaaagagccttaccatgccattactacaagggttggctcgtctgcttgaattgctgtcaaactggtttaatgtcactttaggtgccaagctattggatcacttgaaaaaatggctggagccagaaaagcttgcccagactcaaaaatcttggaaggctggagatgaaccaaaaatagcagcaggtctgtatttcttatattgctctgctggctttacttttttcttcaacatgagtctcaaaataaatgcacatacctggagcaagctatatattggattacttattacttatttatggtggttgaattacactagttttatggagtagatgattctggtctgcttttagaaataatcattgaaaaactaccaatctcttaacaagattgaagttgaccactttgacctttccttgtaaccaaccttgtcctgtgtgctcatgttggagttattcttgtctcttatctgattttactttctttcttgggcagctatgatcgaactgtttcaccttcttcccccggcagcaagcaaattcttggatgaccttgttaccttggtaattgatctggaaagggcacttcctgaagatcagttttacagtgagatcaacagtccatatcgtgccccacttgctaaatttttgaatcgttatgctgtggatgctgttgactattttcttgctcgattaagccatccaaagtatttcaggaggtaaatacttggcaaattcaagtcttcttttgacattgcacattatattcttccctatttatctgaaaacacttttgtacatgtttcattcagtgccacatactggttggttttatgtgagcattattttgctaaatgctttagtttttttccctgttcattgatgtcatacaaaacttgacaagttcaattgtttgagctggcctaattccaaagaattttcgggttatgctgcctgcatatattttgacatgcaccctgtgttgtaatgaagatggttgataagcaaattgaatggttgttgcatagcattaaattgccgatctgatttgtattgtgtgtcctcattttcattctttggtttttactataagaaaaaaaatcaccttactgttctggtgtacaagcgttttatttaactatgtgaatagccatttgttttgtagaagatgatgcactacctattccttaggtttagcataatgatttcatggacttatcatctctggaaattgtttcgaaaattcaggtttatgtacataatctgctcggatactggggacctaagggatgaacttgcaaggtcacctcagaaaatacttgcaagtgccttttcacagttttactctcaaactgaagcatctgctgctcaattatcttctgtaaaggatgaagcccttactggtgctatatctgagagttttacagtacaatcttcatccaacatggttactacttcggagagttactttaatggattagagcttgtctcagcccttgtgaaattgatgccagagtggctccgtaacaaccgggttgtcttcgacaccttgctacttgcttggaaatcacctgcaagacttgcgaggttgcagaacgagcaggatttgagtttaccccaggtagtcataaaaattgctatattaatttgtacagtgctcgtgtatggactctgacatatcggacttatgctttactaatttaatactaaatatcaattgtctgtcttccgctgtcaaatctctgctgtgtgtttcgaggtttatttattttttatttccatttgcataaattgttcaagttactcaagatgtctttctttatgttcattttttagtgctagcttcgtaaaacgagagttatgctttatcttaaaaacaatagtggattgaccttaaattcttaataagtaacaagctacttaggaatgaaatccgttatatgtaacagctaaataaaatgctttacaatttgtttctatcatatggaatttatttatatcgaaaggattgtgtatcattgtaatttagtacttgtgttgtgtatgcaaaagcctaatactttggcaattgactctgcatattcaatatgtgtccttcactgtccactcctttgaagttggttttatttaattgctatcatggaagtttagtactttcatgccaatatctgcacttgattccttcaacattctagtgcttttggttttgatgatcttgctttcttaacaggtgatggaaagcaagaggcttatcaaatgcttcctgaattacttaagacacgatcgcactgaagttggtgcactctttgatatgctatcaatattcttgtaccggagtcgtatagattatagttttcttaaggaattttatgtcatagaggtaatgccatttcttgtttctgaatcatgaggaattttgtgtgtatttattgacttcctatctcatctttacatgttcattttaggttgcagaaggatactccccaaatttgaagaaaactattcttaaccactttctgaacattttccagtcaaaacaatatgggcaagatcatttagttgttaccatgcagattcttatacttccaatgctagctcattcttttcaaaatggacaaagttgggaagttgttgatcctactataattaaaactattgtcgagaagcttcttgatcctccagaagaggtaacaatatgaatcttggctgcagccaaattatctttcactcttagcacatggatgatgaatattcattttcttcgtttctctaggtcagcgtggaatatgatgaaccattgaggatagaacttcttcagctagctacactgcttttgaagtatctacagactgatcttgttcaccatcgaaaggaactcataaagtttggttggaatcatctcaagcgtgaagataactccagcaaacagtgggcctttgtgaatgtttgtcatttcttagaggcctatcaagctcctgaaaagattattttacaggtaatgtgacataaatttctcttagattgatgttgcatccttaccattttcttatatccagctaaaaatgtgccatatcatttttctaaggtcttcattgctctgctacggacatgccaaccagaaaacaagttgctggtgaagcaagctcttgatatcctcatgcctgccctacctaggagacttcctcctgaaaaaaatgatagccgcatgccgatatggatcagatacaccaagaaagtccttgtagaggaagggcattcaattccaaacatgattcacatattccagcttgttgttcgccatgcggacctcttctatagttgcagagcccactttgttcctcagatggtcaactctcttagccgccttggattaccatactacacaacagcggaaaatagaaggcttgcaattgaacttgctgggttggtagtgtcatgggaaagacagagacaaagtgagatgaaagtggcgcaggaaagtgagacccagaatcaattaggcgacatgcttaatccttctgttattggtggtgatccaaaacgctcagatgttccgtcgtttgctgatgatttgagtaagagggtgaaagttgagcctggcttgcaacctctttgtgtaatgtcgccgggtggggcatctatacctaatattgagacacctggatcttcagggcaacctgatgaggagtataaacctaatgcagcaatggaggagatgatcattaccttcctcatcagggtgattatcgtttaccttttgtcctgtaaatacatgctgaactgcatcggtagattcctcctattaaccatctagctgagaggattcttttgttgtgtgttatgaacttacggtgctttgctttcttttgtggtatatgtgatatattccaacttgtgcttgagaaattttggcatatttcatttatggatgaaggcatttgtgttcaattgtccaccagtctcatctgagtattggtcacatgttcatgacgtgaaactactactttccacagctttgctactatgttgcacaatcagcatgtgcacagttatagttttagcattaatattgtttttgtttcttgcattggagttgcatatatattaatataattgttcatttggagaacaggtatcgcttgtgattgagcctaaggataaggagtctagcgcaatgtacaagcaagctcttgacctactgactcaagctctggaagtctggccaaatgccaatgttaaattcaattatcttgagaaattacttgggaatctgtcacccactcctcagtccaaggaccctgcaacagccctcgcacaaggccttgatgttatgaacaaagtcttggagaaacaaccccgtctcttcatccgaaataacatcaatcatatttctcaagtaattccagattttccttgttctctcgacatggtctttgttgtaatttatgttttcattgatcaggacattctcatgctttgcttttgttttatgggtcattttggttagatattggatccttgtttcggcaacaaaatgctggatgctggaaagtcactttgttccttgctcaagatggtgttcagtgcttttccccttgaagcagcaacaacgccacaagatataaagttgttgcatcaaagggttcaagaactcattcacaagaatcttgctgctgttacaactcaacagatagcacttgagcccaacagtgctaactcaatcattagtttttcactgttcgtcctcaatgcacttgcagaagtacagaaaaatttcattgacccgttcattggcttgcttttccgtgtactgcaacgtcaggcacgtgacatgggatcttctgctggcagccatatcagacaagtatgttagtgtgttaatgtctactagctaacaatctgaagttctcttatattccacttactccccccccccccccccccccccccctctcttcttttgcaaagcctttagctaacttgagtactattgattgctttttagttattggacccttattgcacactatcttgtcccgtcatccttgcgtttcctttttggcctcttctgcatgaaaatgtccctttagtcgtggttgaatcggatctataagctgtgttctgttaccatttcaaggtgccattgacattttgataattccagggacagaggcctgaactggattcatcagttaactcacgtcctaccatagattctactgtcatatctaacatgaagactgtcttaaaacttataagtgagagggtgatgtcctcttctgaccacagaaaatctatgggccaaatacttcaagctcttctttcagagaaaggcactgattccagcattcttctgtgcatactagacatgataaaaacttggattgaggaggattataggcttgcttcatcaactggttctgttagttcacttaactcaaaggaaatactaacttatcttcagaagttatcattagttggcagaaaaagcttccctccagctgcacaagaagaatgggatgcaaaatacttgcagcttctttattcactttgtgcagattcaaccaagtatggatatctctacaaagcaagcctttttagtcttctgtaatcttttctttaatggtttctattcttgcaggtatccattggcttttcggcaagaatttttccataagattgagagacagtatatgcttggacttagagctaaagacccagaaatgaggaagcgattcttcaagctttaccatgacacagtgggaaaaacattattttctagattgcaatttataatacaggtacaggactgggaagcagtgagtgatgttttctggttgaagcaaggccttgatctcattttggcaatactagtagaaaatgaaccaattacacttgcagcaaattctgctcgagtaccagcgcttatgatagcagggcctgttccagatcgcatcaccatgccacagcaagttgctgatgctcaggaaagcatggatggtacagcactatcgtttgactctcttgccgcaaggcatgctcagttcttaaatgatgcgaacaagcttgtggtaatttcttgcactctgaactatgtggtgcccatgaaacctgtgtggctgcctattgtacattttaaatattttgttagatctgaatgcttgttgttctgaaatcatgtaggtggcagatatcatggctccattgaaggaacttgcatttgctgatcccaatgttgcatatcatttatgggtgcttgtgttcccaattgtttgggtcaccttacataaagaggaacaagttgccctagctaagccaataattgcccttctatcgaaagattaccacaagaggcagcagggttgcagacctaacgttgcccaggcacttcttgaaggtcttcatttgagccatcctcaaccacgcatgcctagtgagcttatcaaatatattggaaaaacttgcaatgtgtggtatactgcaattgccttacttgagagtcatatggtgcttatgaacgaggctaaatgctctgagtcattggctgagttatacagacttcttaatgaagatgacatgaggtgtggattatggaagagaaaatcaatcactgcagaaacaagagctggtctttcacttgtccagcatggttactggcaacaggcacaaaatctattttaccaggctatgattaaagctactcagggaacatacaataacaccgtcccaaaggctgaaatgtgtctttgggaagaacagtggttatcctgtgcgtctcagttaggccagtgggaagtcttagctgattatggaaaaggggtggagaatcatgaaattcttttggactgcctctggaaggttcctgactgggcatatatgaaggataatgtaatttccaaagctcaggtagaagagacaccaaagttgcgccttattcaagcatttttcactctccatgacaaaggtactaatggtgttagtgaagcagagaacctcatcagcaaaggtgttgaactcgcactagaacagtggtggcagttgcctgaaatgtctgtacagtcacgaatgcctctgctgcagcagtttcagcagttggttgaagtaaaagaatcatccaaaatactgcttgacatagcaaatggtaacaaaccagcttcagcaagctctggtgctaattccaacccaaataactcattcgctgatctcaaggatattcttgaaacttggagacttcgtacacccaatgaatgggataatatgactgtttggtatgatctgctccagtggaggaatgagatgtacaattcagtaatagatgcattcaaggactttggtcaaacaaatcctcaacttcatcatcttggctaccgagacaaagcttggaatgtgaataagctcgcacacatagctcgcaagcaaggtcttcctgaagtttgtgtaactatacttgacaagatgtatggtcatgctactatggaagttcaggtctgtccctaccatcaccacgatagtacttcgaattgcagtatcttcttatttcgttagatcattattgctttggttgcaggaagcatttgtgaagatatgtgaacaagctaaggcgtacttagaaatgaaaggtgaactagtcagtggtcttaacttaatcaataataccaatttggaatttttccctgtgaagaacaaagcagaaatatttcgtctcagaggtgatttcttgctgaagatgaacgaatgcgatcctgcaaatcagtcttattcgaatgctataactctttttaagcatttgcccaaaggatggattagctggggaaattactgtgatatggtatgctgaccatccttttatgtcgtcaatagtaaccctttcaaatttccacatttgctgaccttaagtttgattgttctctttgcaggtttttaaagaaacaaaagatgaggtttggcttgagtatgcagtcagttgttttttccagggaatcaaatatggagtttcaaactcaaggagccatctagctcgaattctctaccttcttagctttgatggacaaaatgaacccgttggacgggctttggataaatatctggagcagctgcctcattgggtttggctttcatggatacctcagttgttgttgtcattacagagaagtgaagcccaacacagtaaattggttttgctgaagatagctcaagtttacccacaggtataatcattgtcagctgtgttatttgcatttcctgtaaaaatagcatattcccttttttttgcatgtacatatctgaaacatgctgttacaggcattatattattggcttcgtacatacttgatggaacgccgtgatgttgctactaaaactgaaatgggaagaaacatgttggctcagcagcgcatgcagcaagctatgatggcaaacaatgcggccaataacttacctgacgggagtgcaaggacatctaatcatgcaggtggtaacatgccatctgacaaccagtctcatcaagcttcccagtcagttggtgctgcaggttctcacgatggtggtaatgtccaaggacaagatccggacagatctactgctgaaggtggcacaaatactagtcatgatcaaggtcaacagagttctacaggtgctgagggctcacaagttccactaaggcgtaatagcggacatgggtgggcaacttctgcagcaagtgcatttgatgctgcaaaagacataatggaagctcttagaagcaaacatactaatctagccaatgagcttgaggtaataaataatgacattatgttctctgaactcatgttaatgaggataactggataagcattagtttatttattttgctacattttttggttttcttttacggattacgcttggtgcttggtaatactgaatttcaaggctgatttgtttgcctgtctagaaaaaacataacagagtggataaggttcttacagtacaagctatttgtcttattttagttatgcaattagtttagcaaaaccatgaagcatttagaaagggggcattaatgtatagaataaccaatttagagcttgtgattataaaaagtggtgaatatgtacttgtgattatagaagctcatgatttttccaagagtaattgctttatatgtgctgattggtggttatctaatgttgtttattgctggttcagcttttactgtcagaaattggatcacgattcgttactctgcctgaggaaaggcttcttgctgtggttaatgctctgcttcatcgctgctacaagtatccaactgcaaccactggcgaggttccacagtctctcaagaaggaactctctggtgtatgtagagcttgcttctcacaagatgctgttaacaagcatgttgattttgtgaaggagtacaagcaagattttgaacgtgatcttgacccagagagtgctactacttttcctgcaacccttgctgaacttacagagagattgaaacactggaagaacattcttcagagtaacgtagaggatcggttcccagcagtattaaagctggaggaagaaagtaaaacacttcgggattttcatgttgttgatattgaactcccagggcagtacttcacagatcaggttggttccatttttactctagtaaacatatcacttgcaagcagtgcataattaaaatggatacttcagtacatttttttcaatgtagcattgttctattatgtgaaaatgccaccagcctttctatgttcttatactatctatctgctgtaggaaatcgcgcctgaccacactgttaagttggacagagtcggacctgacattccaattgtccggaggcatggcagtagctttcgacggttgacactcattggttctgatggttcacagcgccattttattgttcaaacatcactgactccgaatgctcggagtgatgaaaggatgctgcagctattccgtgttctaaataaaatgtttgacaagcacaaagaatctaggcggcggcatctcgctatccatactcctataattattcctgtttggtcccaggtgaaatattctttttcccccttctcttacatagtactgcaacaataatttattattgtgaactttttttgcttccaagtacctagtacatggagttcttgacgtgacaccatttttttctttttaggttcggatggttgaggatgatttaatgtatagcacttttcttgaggtgtatgaaattaactgtgcacggcataatagagaagctgactcgcctattacaattttcaaagagcagcttaatcaagccgtttcagggcagctctctcctgaagcagttgtggagctacgtctgcaagcatacaatgagattacaaaaaatatcgttaatgataatatcttttcccaatatatgcacaagattctgccaactggcaactacctctggaccttcaagaaacaatttgcaatccaagtggccctctcctgcttcatgtcgtatatgctgcagattggtggcagggctcctaataaaattctgtttgctaaaaatactgggaagatcttccagactgacttccatccaggtattattggtgacattaattgatatttctgaatacaccccaaggaagattctgattgttcatttattcttttgtagcttatgatccaaatggaatgatcgagttcaacgagcttgttccatttaggctgacacgcaacttgcaagctttcttctcgaattttggtgttgaaggtctcattatgtctgccatgtgttctgctgcccagtcagtggtttctccaaaagtgagcattcacactcaacatgcttttacatttcgacatcaataaatggttattgtacggtaggcaaagacggtgaattagaaattatttaccatgctttcatggggagagtcagtgaatgccactgaatgatttccttgtctcacatttgggcttggagtcaccttgtgaatagcataaacaggatttccaattccagtgtcataaaaggaatttatccttatttattgtggttgtagtggacttgcatattttttgttggatatgattttattgttgttgtaatttggaaattctgattggattgttttcttgtgtttcagcaaagccagcacatttggcatcatttggctatgtttttccgtgatgaactgttatcttggtcgtggagacggcctctaggcattccatcagtccctgtcgctgctggaatgatcaacccatcggatttccaacagaaggtggtaaacaatgtggatcatgtcgtcaatcgtatcaagtcaatatcaccacattatctggctgaggaggtatgctatttcttgtctcttgatttgtgccttttttctgaagaaagtgtttccagatgatattatataagttatgatgcttctgattaccttttacaaaatagagaataaaaagatgcttttgtgggaatatggcaaaagggtcaggttatttggatgtaactctagtttggtatttggacatggctgcatggttttgacattatcaactattgtcacgggtatctgggggcgttggtgtttgccaatgatgactcaggtgcatatcgtttatgttttgtgcaagtatgctgcatctgactgacgattcatctcctgttgtatcaggaggagaatgcaaccgagccaccgcagtcggtacaaagaggcgtcaccgagctggtggagtcggcattgtcgtcgaggaacctgtgcatgatggatccgacatggcacccatggttctgaaggcatccagcacctttctgatgattgtagcctgaccaaacagccggcgtgtgcctagtcgtagtatctggtagtcttctcgtagatactgtacatatttccttgtccgacaacgctggttgagactagaaactccttgtgttatttatgtagataaagacagggtgccatcctgccctgtattggcgcagcttagcttaatctaatctaaggttaattaaagagtatttattatctagcatattgcggtcatagctcaactttactagtaatgttgttttcttagaaaagagctttgtaagtaaagatgagctgttttgataaagttgtttgacaaaacagcttttcacgtgcatggatgaaacaaagaaatgggagaaagagagccaaggtaagctgtttttttcagctttatttcaactcatgtctttgtaggagagagaagaaaaactattttgaaaaaaagtgtttgacaaaaaaaacagctcataccagcttcatatgaagttgttgtgaggtgtgttaaacaggtcctatggatgtcctgaaattcaggcaaattgctcgagttacactctgccttctgttacggatgcgaagataaaatcgcttagaaaaaaaaataaaatcgattaaatttcaaagcacctactggtgtttcgaagtgagacgagcaggtcagctcttacgggttaatctatataccacgtgttattgtattgacgtgcg

SEQ ID NO: 4210 - DNA, 4180 bp, Sorghum bicolor
aaaactgagtagaaaaaatactgagcagtactggagagtgttcagtatcaacttgcccaacactcaggactacgaaatactgaacaatactgaaacacgaatacttaatgatactgaattttgctcagtagcacttatatatatatatagtgaacttaacaaaactggttttgagattttattatttttttatgatttttataaactcgggtagaaatgctacaaaatttgttatattctctttatccctaaaagcttcaattcatggagtcaaacttttttaagttcgaccaactttataaaaagaagcataaatatctataacgtaaaatgaatatcttataaaaatatattatatgataaatctaatcgtattaatttggtactatagatcttagtgttttttctaaaagtttgatcaaagtataaaaaatttaacttaaaacaactctaagaagaaaaagtatagcttgtaatgcaacttgtagttcattctttgatagtacgacattacagcgatcaagaagtcatccaaccgtagtccttcaattggacgaactaagaaatcgtccaaccgtacgattacttcaattttagcatatataaaccctaaaccctaaaaccctaaactaataataataataataataataataataatagtaatagtaataataataataataataataataataataataataataataataataataataataataataataataataataataataataataataataataataataataataataataataataataatcatcatcatcatcatcatcatcatcatcatcattatcatcattgttggatgatgatgatgatgatgatgatgatgatgatgatgatgatgatgatgatgataacaattaaccgacggttggcctaaagcaaccatcacgattaattgttgctaaccgtgacggtcactataacacaaccatcactgttaatagaagattaaatgtggcggttgtgttacagtgactacctcggttaacctattaatcgaggcggttcccgggccggtagcccaaccgaggcgggccaccagcccgcccgcttccgagggccaaaacaaaaaggcatggtaaagattttctatagtagtgtggtgtacctagtctatttcatgcttcagttgcagtctttccatatgccctcttattcctgtgacactattaagcgaaggaggttaatttttttttgctccaatggcctcccattttcttggtggcctctaaaaaactatcttctatatcattctattggagataaaattattgatgagttgctagagatggctcttaattggagaccgttatattattatctcgatctagcagtctagctagatagcaactccaagagttcatttaaagagagatgtcaaattacatgattttggctattatctaaaataaaaaacacaccaaactaataaaaaagtaaaatactccaacaagcttttctaaatattatttccttgtccataattaaaactgccatgtaatctcgttttcttgggtatcggatccgtccagtcccacgttgcacggggagagaggagaggacgtacgagccagaggacagtgtagagggaaggagaggtcgacagacattcttctattattagagactcattttacaccaaaagtgatcaaactagctcagttacgtacgtacgaatgatgtaccaaacaaagccatttaagcgttggccatgtatacaaggtatccaacgacattttgttatgcaaatttcgtgcactgtgacttaaaattccaatcatgttgactaatacactacttcattgactatctagagaaggccactccacgtacgtgtacggtcatctgacatgaggtttttgatcgaaggttttcaatctctaacgacggatggagctctataaatagacgcatgcacaaacatagtagccagacaacaacacaagcaatatatacaaaactgatctatcgggagagtgtagggtgaccatggtgaaggtgcagaggatgggaggggttgtgttggcagcagcagtgctgctggtagcaatggtggccatggtggcggcagaactcgtgccggtgatggacaaggacctggagtcggaggccagcatgatgaacctataccagaggtggcgcagcgtgtacaacgggtcgttggaccacgttgagaagccaagcaggttcgacacgttcaaggagaacgctaggcacatcaacgagttcaacaagagggaggacgagccgtacaagctcggcctcaaccagttctccgacttgaccgacgaggagttcgatagcggcatgtacaccggagccttgctcgaagacaccggcaatgttagcctcagcagtggcatgatcgacgacgacgacgacgatgagctgctggcctccgccgccaacaagaaggtgccgtgcaagtgggactggagacgccacggagctgtcactccagtgaagaaccaaaaaaaatgcggtgcgtactacgtgtatatatatagttttccatgcatgcatgttctgactttatatcaactttttgctacgcatgatttaatttataactaaaatacatacgtatgtgttgtatctaaatatcaacttacaatttaattagaggattatttccatatatgttaaaaatttgtggtgtatattatgaatgcatgcttgcagggagctgttgggctttcggaatggtgggtgctgtggagggcatcaacgcaatcaagacagggaaactaaagtcactgtcggagcaagaggtgctcgactgctccggcgccgggacctgtaaaggtggggacccgtacaaggcattcgatcatgccaagaggcctgggttggccctagaccaccagggacatcctccatactatcccgcatacgttgccgagaagaagaagtgcagattcaatccggtgcgtgtgcgcacacacacacacacacacacatatatatatatatatatatatatatatatatatatatatatatatatatatatatatatatatatatatagtacaaacagttttgagaagaaaaaaatatataaatcaatctcaattctaattgcattctgcatgcccggcccgactgcagagaaaacatgtggtgaagattgacggcaagagaatgatgagagacaccaccgaggcgaagctgaagtgccgcgtgtacaagcagccggtggccatcctcattgaagccaaccacgccttcagccggtacagtaagggtgtcttcacgggcccttgtgggacgcgtctaaaccacgtggtcgtggtcgtgggctatggaactacaacaaacggtatcgactactggatcgttaagaactcgtggggcaagggttggggcgaaaatggctacatccggatgaagcgtaatgtgcgtagcaaagcgggtctttgcggcatgtacatgaggcccatgtaccccatcaagaataagtaattgaccggccttgcctgatgcccgtcaccgcctcatgtggctgctagctcctgggacctacctactacccaaatgtttaactacatgcatgatgatgtgtagatgtacacgcaacctcatctacgcatatatataataaaataaaaatctactttctcttttttatctttattatcagatgtgttgctgtgaaacatcgtgaaagaatgtcacgttcaatttatgtttgagctagttcgcttcggtgggagagaaagtgtgcacgctttgcccatctggatctgtaacacaacattttttggcaaggggtgccatgacctaccaactcgtaggcacaaacaaacctatttaaatttacttttacaaggagtcaaactcaggatttaaggtgcttctaaagctcttataaccgctaggctacgtgatctttcgctaacacagcgaagttaattcttccttggagtttgcttggatctcttcctggtatgagctactccgtactttggcctgtggaagtttgactacaccagcaagcgtagcacattgcacatgacgcttggatgcattgcttggtctgtcgagggtcgaggcgaccatatttgtgcgcgtcactcgcggatcctgctggccgccgacggctggctttgggggttcattctctggctttgtt

SEQ ID NO: 4211 - DNA, 4272 bp, Sorghum bicolor
ggaggaggacgaggacttgagctgggaggtcgatgatgaggaagaggaagaacagcacaaagacagcacggaggagcttgcagaaaggaggcaagagacgatcaaagaagaaatcagacaggatatggctgataaagaaaatgagagtgttgtaggagaaagcagagttgagggggtggaagaagcgcatgatttggtgaaggaagagaagaatgccgtcgagccacaacctgttctcggtagctctttggtggtagtggacaaggaggaggaacgggaaaatgctgatgatgagccacaaccagcggttctaggtagctctttggttgtggtgggtgagggtgagaatgcagagccctccaagtcaaatgtggaagaatcaggtgacaagaaggaaggagcaaagcatgagacaagtgattcgagcaaggacagcgattactccatagtgtccagacagcgaacggcggaggaagaggatcttgaatgggatgagattgaggatctaggagagcatgaagaaaagaaaggcggcgcccacacctcaagccctgctctgaaggaggagctgcgcaagaggctgagtgttgctgaagatgatgaggatttaagctgggatatcgaggacgacgatgataatgcttgaatgccaatggtgatatggaagtgtcaattgtatttctacatttcttacctttcattacttgcgcaagatactgtgatttgaccaataatgattggttaattgtgatcctcatgctatggacacgtgtgtacactgtaaactctctagttcgatgatatcaagtggcaattggctaagcgtcaatctattatgttgtctttctggtatttactgtaaacatgccatgtttatttgacttgcgtcacgtgttacaatgttgtttgtttattaatgtacatttgctgcatcagaatttagtataacatttgaacaatttatatcagaaccaccattgtcacagggcatttctttcagtagcagagcttttgtcaagttagtccagatagtggatgagcatgatgaatgaatacctttagagtaccttgatggttcaaattgccttcagtcaccggcgagtagcagaaacaacaaacattgacatctccagtcattcatttaaaggttatggagaagctaaatatgttttgaaggattgtctagtactcggtgctttttaactgggaatgtctctttgcatactatgcatcaccatttaccattgtcacacgtagcttgcttttcgctgcaccagattggaaggccagggcatcacatttgcctatgatttctgcatatatatactgtatataatctataaagactaagtcgatgtcttttccagttttccttctgtcttctgcctcaattgcactggaagttccaagttatttgctgcctggcggagtcactgtttagttcttttatatgtggagaaaaagaagcagagaaggtaatctttctctcgagagctttataagactcctgtgtagctgaattctctgcatagcaaacggtcctttagctggttctgcgccgtgtcccatatttctgactgccgttacggtcaattcttggaatccggatactactgggagcatcccataacattgtttttattcttttttttacaacaacacttgttttcaatcacaattgatgtgcagtgtcaccatcaccataccgtctgcagttttgtttttttacctttctttcattctttctttctgttttcatgatgtgcaccgatcagagattgctaatggtaaacggtgtagacaaattgctaataataatagcttggacaaaaggtttctaaatattctggagaattggagatttttcaaagagaaatgtcatggcaaattcttttctcaatgaactgggcctttgtgtcggcccattacgggcctataaatgattggcccacggagcgaatccacaaaagccgtgtggcctccctgactcgttccattccttcgcctccgtcaggtcaggtcagcctccctctcgcagatccccacccgctccgccgccggccaccgcgtcgctcccctcggcagccaggtacgggtcaggaagctctctccttccctttgccataaacctagcccgccgtagcgcctatttgtcctcgaatccggagcgggcgaagggtgggtagcttacctattctgatttggtggcgccgaatgcatcgcctgcgtcgttggggccgtccctccgtcggatctgcgctgttacgtgcgcctgcgtttttatctctttcactcatgtcgatgtgacgggctctttacccgcgatttcgtgatgtcgtcttctccaacttgggtgttcgactccgatctgctggctgctgccaatctgtatcttacctagtcgagcgattggattaagcggttcagactctggcttgttgaatcgtgccgtgtggtgtcatggttagctgtgtctctcggattggtgctaccttgcgatatcaagacattgcttaaggtacttacgcagtattactgattgcgaagagatgtgaaatcatagtttccccctgcgcaatgcatggacctagacatctagtctcttagcttttgatctgaagagttgtttgatgctgaggttatgaatacgaataacgattctagaggtttgcctttgagaaatggttaatgttaggtgcataacattgcaaattattttaaagtatctttgaatgtttgagactttcttgcaatggaattttcttagaaagacacgattcataataccatgcttggaaactttattgatgcaaattttaataaatatttaattttgtactacactgttctggtcatgttcaaccaggacactttggccaaggatttgcctttccccttaactctgcccagattatgagtgctttgaagcctgtactctacatgttagtcctggatgatcacttgcactacttgtttctttccagctatctagtatagatcagctgtcaccatatgattggacatgtgtttgcatgtaaaccaaattgtcttgtaatgtttcaaaaggaaatacaaaaaaaatgtgattgcagtatttgtggattctttttagacagaaatgattggattctagattgctacccccccttatgttaccgttacaatcagtgattgcaccctaagtaaccatggaaagtactctatatcagaagattagttcaagaaggcttgttctcgcattatggaagtataagtttattctcttttgatgcaggatgacagaagcaccatttctgccacgtgagaggctcttcaagcagcaacattacttccagcacttgaccaagcacacctacctgaaagggcgctatgatgtgatcacctctgttgccatcccccttgcacttgctgcctccagcatgttcatgattgtaagttttgaactttcaacctaagagattattacttgtttaactttccttctttttttttgtttcctctcacctggtgatttgtttcctggttttatgaacaggggcgtggagtttacaacatgtctcatgggattgggaaaaaagagtgatcttcccctggttaactagtgtttctgcctggcatggaagtcataccatccagattatgaagtcttctttgcttgcaaaataatgctgtcaaagaacaattcgactacattttcacatcaattttctgtttgtatttgttgatatgaaatgccagcaacttgaagatcagcattgtcactgttttggttaattactccatccctttcgtcttttgtgtctcctctcaattgaagctggacttgcattttatttccctgaggtgaaatcatgttactctgttcatgagctgcgccacgccatgtcatgcacaaatctggctgaagcatgcacgtaagaggtctgttgtgcacaaaactgtcaaaccaggcagaaaatgtggttaattagtccccatttcatataagaaatcaaacccatttcgtttttgcggcttgatgtttctccacctccacggaagaaccaacacttatcttgtatatcaggttgacgactgtcatctttgttccacccctccactgaaaaaggacagaactagtcgagcttattttatccaaatgcaactgtaacgttataactcagcttttggttctattttatcctaatgcgattgcaacgtaataataactcagtttttggttttgggaattggaatggagacgcaagtacttgctacacaggaatgcttcaa

SEQ ID NO: 4212 - DNA, 5941 bp, Sorghum bicolor
tcataatagatttgaaatattttttaaccaagttctcggtaggtatcactgatagtctatatattagccaaacacaagtactccttctgtccaaaaatcattaatttattattataaaggtacccccttagtcaaaaaaagaacgcaattatggattgcgtatcaggtaaagtggtttccttttaactaagtttctaataaatattattatgtttatcttcaaacaaacttattataacaatacattttttaattattcaaataatatttatttgatattataaatattgatacttttttttatttataattggtcaaactaggacactctaacatacacctgctagccagagatctagatttcacgtttgaccaaaattatggagaaaaatactaaaatttgtaacgtaaagtgagtatactataaaaatataattaagaaagaatctaatgatacttagttagtaccataataataattattttataatataaatttggtcaaacttaaaaaagtttgactctccaagattcttgaaatgacttacaatttggaatggagggagtactatttatctgttataaacttagttaaatttaagctaattcgatcagcacatatctataattatgtttttttataaactaagggagtacatattagttgataagaaggacttactctctccgcaccaaaataaatgtcgttcttatttcacgagaagtcaaatatttttaacttcaataaaatatgtaaaaaatattaatatttacaatatacaattatctagacttattttttacgtaaaaataaatttatttgaaaatataaacattattaatattttgtactgtaccattctaatcaaggccttgtttagttcatcccaaaagcaaaaagttttcaagattctccgtcacatcgaatcttgcggcacatgcatgaagcattaaatatagacgaaagcaaaaactaattagggctcctttggattgaaggaaaaatgcaggaaaaactcaggattccagattcctaaggattaaatactgttcacacctttggatcaaaggaaaggatgataggaaaaacaaaggaaactttcctatgccatccattctagagaaaaatacgggaaaactaacatccactctagcctcatttttccactaggcccgaggcagcactagagattagtacaccccggtagaccttgaaaccagtgcatttaaagtattaatcagtttagaaagtgacctgccaagccattagttaaataaataaacttgggttatacggtttctaacattcctattcctgtgaatttcccatgagtatccaaacatctatcttctacagcattcctatagttccaaatcctctattttacaattgaattcctataatatttctatcattttcctatcccaagcttttgctatcctacattccaaaggggcctttacacagtttagctgaaaaatcgcgagacgaatcttttgatcctagttagtccataattggataatatttgtcacaaacaaacgaaagtgctacggtaccgaaatccgaaatcttttcggaactaaacaaggcccaaattcgacacaaatatcacggcgggagtactgtcacaaaggaaagtctctatcgttatgattcaacttggtacggaatggagggcacgttcccacgcggcatgcaggattttgatttttctgccgcgcgttcacacggtgttgattgataaaaggttgttgggtgtcctcctacacgctacagcttccttccctcacgcgcaggtcaccgcgacccccaatggagtcatggacaaggaaggcgccacgtcctttgtccctgcccacgccaaggacaaaagtcacatccccaaatccctctcagctcacagtcactgtggccgcattcccacgtccatttcaacacagcagctccggaagcttcccatctccctccctccctcccactcccaccgctattctctcaactctgaggatcactcattgctcattggcctgaaccctgtcctgtctgtcacagttcaaaaaaggttccagttcatcatcgcccaatgtcttgcttcggttgaaagccgcgcgagatttctgctgctgcttttgtggagtttggcttcggattggagacagaccgtaggcagaagagtgttcttgcgggggcggtggtggtttttggcgagtgggaggacgcgaaaggcaggcgtcaggcgatatgcctttcagcagcatgatccatgagatgaagggcgagatcggcgccatctcgtcgcgcggcctgctgcggttccggtcggggggtcacgccgccgctgccgggcgagcgtcggcagccgccgagccggacgaggcgctgcgggagagctgctgggcgcgggtgccccccgagctcttgcggatggtgctggccagggtcgagcacgaggaggcgcgctggcccggccgcagcgccgtcgtggcttccgccggcgtctgccgctgctggagggccgtcgtcaaggagatggtgcgcgtgccggaggtgtctgggaaaatcaccttccccatctctctcaagcaggttcattttggttccccttccccccaacgaactctgaatctctattatgtgttcggtattggtctggtgctttggaaaaagttgtttgtgtcaccggattcttttcaccttgattgagtagtcattgtcagtgatggtatttgccatactgcgttcatcattttctagggtcaaagcctccatttccaagttgcgtgtctgaccattggtcgtatcaggcagaattccattgttggtgtgctacctacctagtcatatttgttaaattctgtttttggtcggaaccaggttccccaggcttcggcagaggtcttgttgtggttttaaactgggctgtatcgaatttggtcttttgacaatagttaaaaggacggggtgttttgccctggaactctaaaaacgaatgttcttgagtacaagaaatttgtcgagaaggttaggtaagtcgagatactattctcaactcagaggaggtaagattagtagacggattctttatgaatctgttcctcaagtcagtttgcttagaatcaagtatgcaaggtcaaatgttactttaggaactagtaagacttgtttttacagtcggctctgtcgaaacggtggatagattcttattgttgtttcagtcagaagagggttaacgcttgatttgaggtttctttgactctgaaattttgttcatcaatttattttacttttattaacttgcaatttcaaatatgtaacctgcagcctggtccaagggatgccccaatgaaatgtttcattaggaggaaccgggcgactcagtcatattctctgtgcattggaatcactgatggtatgcttttctcaccccctatatgtatgactcttgaacgaatacagtgtggatgtcatcattgttgatggacactgcttttcttttgctctgcagcgttagctgatgatgggaaatttctacttgctgcacgcagaagtcgtaggcccgcaggcactgaatacctgatctcgcttgatgcaaagaatacatcaaaaggtacctgcattggcaagctaaggtgagcattcaagaaaccgtgtctgaaatttaaaacactctgttttttcaatgctgtgcatccgatcaaaagtattactttgacagagacctgggtttaccatattcttctctgttaatcagatcaaacttcttgggaacaaaatttactgtctatgatgcccatccaccttgtaccggggctgtggtttcaaagggtccgtctgcacacatgatcggttcagcccaagtttctcctggggtgcctgctgggaattatccaatttcgcacatttcttatgaagcgacttttggttctaggtatggcaaaccatgtggtagacacttattctcccaatgttaggttcatatatttctttccaagaaaacgttctgctatgaataggccatctgcatttttatgagaattacaaatactgcaacatcattttgatttttttctcctaatgactattattgtagccctgtttataactgctaattgaattgctgatagcaatcttattgtagagaattgctattactagctagcaagccaacataaagaatgtctgggttcatgacatgccaataaattaagcggattcaaagctttagtggagcagttatattccaggacctgcttaggattatacattagtatacaaaccttatagatttaattatagaatctaaagccagaacttggtggttagaaagtagctataggtttaatgtagcgtaacagaaaattatattaactgctgactgctggtttattacatgagagttgtaaagattgtctaatgttttgcaggtatccaagaaagatgaactgtgtcatggattccatccctttatcagcaattaaagaaggagggactgctcccacgcagactgaatttccatcaattaactccaactcttttgcttcagttccattcttcaggaaatcaggtcgtctggatagttcaggtgttcagctagccactcagaatgaagctaagatggtgctgaagaacaagtcccccaactggcatgaaccactgcagtgttggtgcctgaatttccatgggcgggtcacggttgcatctgttaagaacttccagttggtggcttcaggagagagtgatctgaataaccagggtgatgacgacgtgatactccagtttggcaaggtcgggaaggacttgttcaccatggactaccgttatccaatatctgcattccaggcatttgccatctgcctgagcagctttgataccaaaattactcgcgaatgagtcaaggtgcgattttttatttgctgatagtccactttagaagctgctcaaacacgctatttttttttctaaatgctgtacatcaccggcatgatgtttccatggtactataggcactgctcagcactctttatccaagtcattttgcttggtccttaatttgtactgcaaatcctgtacgtctttatttgtgggacggagggagtatgattcaacgacctgcaccaatttatttactttcatgtcttgtttccctgcaggtgcgagggaggtgaaccagcaagatacagcaagaatacctgagctttaagccggagagtttggtgataaagtaatcatggtagagctgaatacttcttctgttgagtactatcgtgatgtaaatagcaatctagcattctagctggagtggtttgcattgagggttggcaagtgtgaacatcagaccagagtatcctgaagtttgaccttatagtattgaagttgagagatcatacttgtaaccatctgagtatatacaagtgctgaaggtctgatttctccctgtgttctgttctgtgttataattacgtcgtcgacagataatagttgactggaatacagcatcgcttataaatataaatggtctcaagttgagacgttatgttaacaagtaatgaagcctccagatatccaaaaaaaaaggacatcatcaaatcaaaagaaaaaattgcatatatggggttgcacatttgcaacgctgatgatccactaatacttggatcatctcggtcttctcagctaaatctagtagcagcgaatattttgtttggaagtctaaagaaataatgagacaggtgattgatgcatggtttttttgtgatgagttgaaataggtaggtaggttcaaagcgtgttggcctccctgggtcctgacacagacacagccatgccgcgctcctcgtcggtggggccgtcgtcctcgtcccactcgccgcacacgacgctgcgcacgaactccatgaactgcgggaagtggtcgggcgagaagaactcggcgcccatgcg

SEQ ID NO: 4213 - DNA, 5011 bp, Sorghum bicolor
taaaaagaaactaagatttatggtatcaaattagtattagattcatcatagaatatattttcaaatgatgtgtattttatgtcatagatattgttattttttttctataaaattagtcaaacttaaaaaaattttaactgacacatattctaggaaaggaattgactcttttacggactgagggagtagaattttacggggggcggaggtttgtcgtgagtattgttttttgaacagaggtagtatcaatttatgatactgaggactggtcagtggtgctgtattgtgccctgccactgccgctctgggcccatcttctgtccaaggtttgcatatgcttgccgcccatccgtccgcctgccgaagtggcaatccattcactcacatggcaggagccgagagcggagccatgtgtttggtttgggcatctctctattctctggtgctctcaaacctgaaggggtgcagtcactgttaccatgaatgatccaaggaccaagggccagggcttgtcgtcgcggattcggaacgacgacacctcgtgccacctttggagtcgattctcgaaccttcctagaacacaatttgttgttatgtgagaaaaacaatgttttttcgctcaaaagtagtgctgaagaatagggcaacacaaaccttttcaaaacagagtgaagaacctccgtcaagaactgttactaatgagctaataacgagtcaaaggtttaggtaattttggggttttggccaaagtctggtgacagcactggtccgcaatgcagtgctcgcgtctagtgttggagttagcatgagtcaagaaattgatctttgatgttctatttatgagggttttgttatcctctcatctttcctctatgcttggtacacatgtgctgtttggtgacgtgcaccgtaacacaaatgtaatcaaaattagttcatttgtacctgcggccggtaacgttcccaggccggtaatcaaaattagttcatttcgaaccaaacagcctctagtgtcttggcattctctgttacccacttgcctgcaacaacggtaaaaaacttttttttcaagtgcaacggtaaaattctcgtggaacactcatcctccatcgattttatttttttaaaataacccaattgtaagattacgtaggactaatttttagcagctaagggaatgcatcttaggcaagttcaactaaattattactccctctgtcttcaaataaagtgcattgtgatttctaaaatttatgttgaaatacaatgtgttttattaatgactatttttcgatttggcaaggtttattaaaaaggaagccatgattcgaggagaaattttataattagaataatatatggatatatatgtcatttgagtattctttgtcttaaaatttttagaacgcattgtgttacatgacagagggagtaagtgttcggttgacaactaaatttagaaggaaaaaaaaaggtaaacttcacgtgttatacagtaagaaaacgtagcaagacttttttttagatacgataaaatgtagctttaaattttcaaggcacactttgtaaatttagttgtgacgaattatggcctggaagtggtaaccaaacaatcctagcacgttgccgttggtatcaaacggccctggtaggttgcattggagtattattattcgctcttctgccccgcggcgcctattaattgtttgtagttttgctacacatggatcctccaatcatagagcccgcccggccttgcactcgcaccgtcgtcggagactacagtctacaagagtcatgtgaagagacactagcgacgagtgaggcggtgtgagggtgatcgatcgtgcgagctgtaacgtctcgatcgtcatctctccctttcgcgccatcaatcttttgcctcctcactgcaaatcgggctcgcattcctcttcctcctctcaaccagattcagatattcgcccggggtcactcttgtcgcaagtggaaggaaagccatgtcgtccgccgccgcggacgcagccagcggcaaggaggcaccggcgtgcgaatcctgcacaagcctgccggcggtggtttactgccgggccgactccgcgaggctgtgcctgccgtgcgaccgccacgtgcacggcgccaacgccgtgtccacccgccacgtccgggcgccgctctgctccggctgccgcgccaccgccaccgtcaccgcaggcggcggcaccttcctctgcgccaactgccactttgggtcggaggaggaggaggggcgacaccgggacggcgacgatccgcagcctctccaccatgaccgtgcagccgtggaagggtacgtcgggtgcccatcgatcgccgagctcgcggccatcctcggcgtcgccgggtacgacgagaaggcggcggcggccgggaacggagggtggtggcctgcctccgcctgggaggatccccaggtgctccgcttggaggacgtgatcgttcccaccacctcttgccatggcctccagccgctcctcacgccgccgtccccagaggtacggtgctgctgctgacctgctagaacagccactgctcactgcccgacaaaaggaaacaaaacaaaaaaagaactctttttcctcttctctaatggttgtcttgcttggtgactggtgagctagaaccggagctccggcggtgagatggccgacgaggttgtccggcagctgggggagctcgccaagttggaggcgactgtggcggcggcttacgcggagatggagccggctgacggcgagcagctgcctccgtgggcgtcgccggagcttgccattggacacgccgacttcggggctctcgacgctggcgccgcctggcatgatgcagcaaccatcgcagcagtgccttccactgaggttcggtccagtgtccggtcacttctctacgaatctctctactggtctgcttgattacactgcgaactctgatttaacccaaactaggccaaatggatcccatcaacattgcaattttgtcgatgttgtttgggtatatggtagaaaaaaaaatgtgaattgcctcttgagttgtccttttgaccgtgtaaaattttctaaaaattggaacacctgaaaccatttttaaataaaaccaccatgaaagttgccgataggtgacagtgtgagctgtgaaactacactataaagccaacatatgatacagtgaccattctgggacatactgtgtcggtgtgccccgttgccatcaacttaactgcgtccaacaaacaattgtacggtgaatcagctctcgttttaaatgtgagttgccaacgcaaccaacccgttcagtacagcgttgcattgcaaaggcaagatattacaggttttcagtagatgtagtagggccttgtttagatacacccaaaaacccaaaactttataagattccccatcacatcgaatcttgcggcgcatttatggaacattaaatatagataaaaatataactaattgtacagtttacctgtaaatcacgagacgaatcttttaagcctagttgctccatgattggataatgtttgtcaaataaaaacgaaagtgctacagtatcaaaatctaaaaaaattttggatctaaacaaggcctaggtagtagcggtgctaaaacggaaagaagcatgagcttcttgatgagccgtctcctcagttgcaatagtttcgtttggtcacaggagcaggaagcgtggatcgcggccggctgcgacgtcgacgcggcgggccggacggacgaggaggcgcgcgagcacgctgctctggctccggcgccggccgagccgtgcctgtcctcgttcgtggagatgtcagagatctgccccggcagcgtcgtcaccctcagccacggcggggttggtggcggcggcaccgccgacgtcgacaacagcgggaagacagacgcggagacagccccgcggccgcagctggcgccgacggcgccggtgctggtggcggtgccagtgccggtgacggagaagatgggcgggtacgacgtggcgtaccccgaccgcggcacggtgatctcgcgctacaaggagaagcggaagaacaggaggtgagccatcgatggagccgtcgtcgtcgccacgcgtgtcggcacctttctcatgcgtgtcgctcgctgctctcgcacgttttgcaggttcgacaagcagatccggtacgagtcgcgcaaggcgcgcgccgacggccgaatgcggatcaaggggaggttcgccaagtccggcggcgaggtctgagacgcgcgcacgcatgcggcgctcactctcgatcggtcgtacgtcgtcgacggcaacaacgaacgcctagtgaccggccggagcaggggaccgcgacacagcgcggcatgtgtttctcgttggttgtttggttggtgtcgccggtcacgagcacgcactgtgcttccgtgcagctgaaataaataaataaataaataataaatcaactactcgtgctgcactactgtactgtactgtacgttgaatagaggacttgtttagttcactctgaaaaccaaaaagttttcaagattctccgtcacattgaatcttaagtcacatacatgaaacattaaatatagacaaaaacaaaaactaattacacagtttagctgtaaatcacgagacgaatcttttaatcctagttagtcaatgattgaataatatttgtcacaaacaaacgaaattgctacagtatcgaaaactttttacttttcggaactaaacaaggccagcgccgatctgtgcttcctcgtgcaggtactgtcgcctacttttgcacactcctttaattcaatccaacacgtctccaccaccaaaatttcaagtccaaaatacatggccgaagatattatttactgatttattgttaaagaaaaatattgttaaataattaatagattcagtaaattggctcaaataaataagctcgattcatcttgatttcaagtgtgttagagtgatgcgaatctgaggttga

SEQ ID NO: 4214 - DNA, 7934 bp, Sorghum bicolor
  misc_feature (2389)..(3592): n is a, c, g, or t
caatatctaaacattccatcatacggctttttatattttgtcaatcctaaaagggtgttattttcttctaccaaaaagaaggaaagaaaaatcaccgacacatgcatctaggccgggccagagccaggccattccttgttccttggattcaggcgccgtgttcctctaccaccacctgtacaaacgcagtgtactgtacgtgcaacgcaacggtttgcagcagtaactccgagaggtatgggcgaggagcagcaggcaacgaatgggtggtgttccccgtcgtggagggtggctccgtgctccaatggccgagcacccccaagctgccggtgtccagtgcagacatgtccgtctcttccaaggcatctcccctctcctcctcgggattcacccgtgacaaaagtttcagtctttcacagatggatactggtgactgatgaaagaacatggtgagttggtgaccttctgctactcgtcgttttctcttggatctttctggcaactagtagccacagggcgctagtatatagtacatgttttttttttgttgtcgagtcaattcgcatcctctttttcgttgtcgtcaataaacaatcttgtctcgagagcgactgttgcgtgtcaaagggagattagcattgctttcaggctttcattcagctagatagctctcctgcatgattcaccaagaaatgatgacagacagcagagtaacacaacataaggaagatggtgaaattctttcttttacgtggaaaagggctttgatcccagttttctgttgaaaagaggccgggcaagtgtatgattgaaagcacatacatacatacataacctgaccctgcttgttattgcccttttgtttgttcccttttgcagtttgataatccatcccatgcatgcaaaataatgcattataggcaccctgtctgcttgtgtctccttccccaagagacaaaaaacccaagggccctccagtgcctgcccctcagcttttattcttttcatggctgtggtcacatccctagggaaatataatataaagaaaacatctctcaagaaccagcatgcatatattagaaagaaaagaaaaaaaaagcgtgcacaaaagctaccaaaacaaatcatcacttcctctggataagcaaaacgtcatacgaaaaaatagcacttgttttcctagatgctcaaacagcatacaagctccttttttcctctcaactttgaatttgtttaccatacatttatactccctgaatacttgacagtcggagcttcttataattaccaaacgccgaaccgaggtgatatataatcagtctcgagattgtaactaatgcctcttgcaactaacaatgtagtaattccctaatttgctaggatagcaggcccacaaaagcaatatattttcaggtggggatcctttttcctctagcatcttaacaacaagtactactacataggattacacttcagtgtatgagtaattaaatattgctttctctattctaaattataagtcgatttaaccttttttattcatctattttattatgtatctttacatattatttatctagatatatagtaaaatagatataccaaaaaaaaagtaaaagtgacttataatttggaatatcgagagtaagaacaaatacatttacacttctcttttagttatttactccctctgacccgtaaataaatgtatttctttgactgatacgattcatgtttgaccatttgtcttattcaaaaaatatgtatgattgaaagcatttattaaatttgtgggacaacgggagtagacaataagtaattttataattatctgactatggaaaaatataaaatctcttatcattaattttttaataattatactagttagctgtttagtattattattgttttaaaatccagccacctagaaaatagcaagtcccataaattaattttcagtttctgctccctgctactagtaaattaccatcctgtccatggcgaatttgtgcgtaatcctcctcctacggtcctcccggcgtaggctcatcgaggcggaagaggtcatcagcctggcgcacatccgtcagcgttaaagcgttacgttcgaggggacaccatcccgcatgtttgtaatgttttcttcatcctgtccccctccctcgctctcagatcggccagggcacgtacagcaatgtgtacaaagcgcgggactcgatcagcggcaagatcgtggcgctcaagaaggtgcgcttcgacaacctggagcccgagagcgtgcggttcatggcgcgcgagatcctcatcctgcgccgcctcgaccaccccaatgtcatcaagctcgacgggctcgtcacctcccgcatgtcctgcagcctctacctcnnnnnnnnnnnnnnnnnnnnnnnnnnnnnnnnnnnnnnnnnnnnnnnnnnnnnnnnnnnnnnnnnnnnnnnnnnnnnnnnnnnnnnnnnnnnnnnnnnnnnnnnnnnnnnnnnnnnnnnnnnnnnnnnnnnnnnnnnnnnnnnnnnnnnnnnnnnnnnnnnnnnnnnnnnnnnnnnnnnnnnnnnnnnnnnnnnnnnnnnnnnnnnnnnnnnnnnnnnnnnnnnnnnnnnnnnnnnnnnnnnnnnnnnnnnnnnnnnnnnnnnnnnnnnnnnnnnnnnnnnnnnnnnnnnnnnnnnnnnnnnnnnnnnnnnnnnnnnnnnnnnnnnnnnnnnnnnnnnnnnnnnnnnnnnnnnnnnnnnnnnnnnnnnnnnnnnnnnnnnnnnnnnnnnnnnnnnnnnnnnnnnnnnnnnnnnnnnnnnnnnnnnnnnnnnnnnnnnnnnnnnnnnnnnnnnnnnnnnnnnnnnnnnnnnnnnnnnnnnnnnnnnnnnnnnnnnnnnnnnnnnnnnnnnnnnnnnnnnnnnnnnnnnnnnnnnnnnnnnnnnnnnnnnnnnnnnnnnnnnnnnnnnnnnnnnnnnnnnnnnnnnnnnnnnnnnnnnnnnnnnnnnnnnnnnnnnnnnnnnnnnnnnnnnnnnnnnnnnnnnnnnnnnnnnnnnnnnnnnnnnnnnnnnnnnnnnnnnnnnnnnnnnnnnnnnnnnnnnnnnnnnnnnnnnnnnnnnnnnnnnnnnnnnnnnnnnnnnnnnnnnnnnnnnnnnnnnnnnnnnnnnnnnnnnnnnnnnnnnnnnnnnnnnnnnnnnnnnnnnnnnnnnnnnnnnnnnnnnnnnnnnnnnnnnnnnnnnnnnnnnnnnnnnnnnnnnnnnnnnnnnnnnnnnnnnnnnnnnnnnnnnnnnnnnnnnnnnnnnnnnnnnnnnnnnnnnnnnnnnnnnnnnnnnnnnnnnnnnnnnnnnnnnnnnnnnnnnnnnnnnnnnnnnnnnnnnnnnnnnnnnnnnnnnnnnnnnnnnnnnnnnnnnnnnnnnnnnnnnnnnnnnnnnnnnnnnnnnnnnnnnnnnnnnnnnnnnnnnnnnnnnnnnnnnnnnnnnnnnnnnnnnnnnnnnnnnnnnnnnnnnnnnnnnnnnnnnnnnnnnnnnnnnnnnnnnnnnnnnnnnnnnnnnnnnnnnnnnnnnnnnnnnnnnnnnnnnnnnnnnnnnnnnnnnnnnnnnnnnnnnnngcccttttagaacgtcgtatcgctcccatcaagctcgacgggctcgtcactcccgcatgtcctgcagcctctacctcgtcttcgactacatggtccacgacctcgccggcctcgccgccagccccgacatcaagttcacgctgccccaggttgagatcccattccgctgacagcctgacacagcctcgcgctcaattatgtgaaatgcgactgattgaggtgtttatacgggggcaggtcaagtgctatgtgcatcagctcttgtcagggctcgagcactgccacaaccggggagtgctacatcgcgacatcaaggggtcgaatctgcttttggacaacaatggtgtgctgaagattggtgatttcggtctggcgtccttcttcgaccccaaccataaacagccaatgacgagtcgggtggtgacactatggtaccgccctccagagttgctgctgggtgcgaccgattatggagttggcattgacttgtggagtgcaggatgtatactggctgaattgctggctggaaaacctattatgcctggacggactgaggttagctactgaatgcttcactgttgcattatattgtccctgaaataccgtatggctattggcactcgctaagttgccatttaaacgattctgtttaccaagtctgaaattttcattaccaagagaattgtagtgtattatttagttgtgatcatgctgcagtagtgcactacttctcatgtggaggcaagcctccaaattttcaatttcttacccaagctatattagttttgttatcttgttagataatagagcaatagcaaaatcatataaaaaatgacattttttatgattaaaaaggacatgttttcatcagggttaattgttttactataaatgtgctttcttgataatgcagacctgtacctgattcattggaataaagaaccatatcaatcatttgaaaatctttatcttcttagtgtctcttggcacctttgttacacggtagaccctgaatcacatgtttttcttcagagctctgatgctgaattattgtccacaccaaacaattcaatgaaataatttggaaatgcaacagacagtttaatgatggtcatatgttcagtcacaattttgattttcatccattgctttccatgatatttccttttttttgatcgggtgtatgtctttcaggtggaacagctgcataaaatttttaaactatgtggctctccgacggaagaatattggaaaaaatcaaagttgcctcatgcaactatatttaagcctcaacagccatacaaaaggcgaatagcggatacattcaaagatttccctcaaacagcaattcgattgatcgagaccctacttgcaattgatccagctgatcggttaacagcaacttctgcattaaacagtgatgtaagttgcttcagttgttatcattctgttattattttctttactagataaaataagactttgcttttatgaattaattaccttccctgattttattaacgacagcatactagttcaccaggaatattagcacccaatggttgatggtagtaaccactttcatttctcaaaatttagtttcagaagagattatatagaagctagtttaatgcttcatgttagtccttgaaaaaaatgttcctttttccagatttttatagggttatcgatagttcaatttttactcgacatagaagtatatgatttgttgaccactttggaacggattgtagacaagctagttaacatgtcattactctatgttagtccttgaaaaaaaaggtgttcattgtttccagatttctagagggcaacaatattcaatttttatggcacatggaagtgtaatgactttagccacaacaacttaaaagtgttacctatgtattgatcaagatatttctgtttagttaaaccactttgattcttaaaatttaagtttagacttatgaaggctatggatcggacaggaagagagagcgagagcgagaggtaaacggagcgagagcccccctttcccctctccacctgggagaggaggttctctttgtgccccttggttgtgttattatttacaaaaatgccattaaaggctacaaagggtctccaaacattattttgtaatccctagcccatgtaattgggcctgaaacgcgatagtgggggttgccaacatgtaatacatcccgaacaccttggtacccgagtccaaatgttattccttttaaatacaatattactggtcttatttgaatgtatgtctgtaatttatgcattgttactgtgaacaattcttttcaaaagcaagacccttactttcactatacatgcagttctttgcaacagagccttatgcgtgtgaaccatcaagtctgccccaatacccgccaagcaaagaaatggatgcgaaacgaagagatgaagaagctagacggtttgttgccctaacacccacaaaattccatctatgttttccatttgttgttctggatctctatattgtcatctatgcaaaagaatgtgtgatgatgtgaaatctgtagttgatactttcttccatgggtgataaaacttgggtcaacagtgctcatgctgatgaccggaagacaaaatatgacaaaaatgtgttcagcttaggaaaattttatttcttgtcttgaaagtaactttggcccactgctaggacatgtactgatctaggagtatactaaagtgggagtcttggctgtcgtgccaagattccaggatttctgggaacttgttgagaataatgcttggacatcatcatatggagtactggttacacatcatgatgagtcatgaaacattttgtctcccgtttttctgttgtatattgtccttgttagatgcagttgtcttaccacactttatattagcattctggttgctctttggctgactggcttaattattggatggacaacagcttaagggctgctggtggtagagctaacggagacggaacgaggaagacaaggacacgggatcggcctagggctgttccagctccagaggcaaacgccgaactgcaagcaaatattgatgtatgttaattctttgtttattggcatgaacttgtttgcatatgctatgttgcatggcatctggaagggccaaatttagtttcttgggctaacacaattcttttttcccccctctacagaaaagaaggttaataactcatgcaaatgcgaagagcaagagtgaaaagttccctccaccgcaccaggatggtgcgcttggatttcccttgggctgttcgaatcacatggaaccttcatttgagcccccagacccttcttccttcagcactgtatttcctttcgataaaagcacagtgcctacctggtccggaccattggcggactctgcagctggcaaccaaaagcggaaacacaagtctggccgctcctcaaaacaaccagcaaccgcccgtgctagatgatacatcatgtcatgcttagggcaaatcaagtcttcaatacccccaaaaaacaaaaatacttcgcagtggttccaacaaactgggttaatctgatttggaatcaagagctacaacaatgaattgtttttttctcagatccattcatgtatggattttttccaaacatcggtcaatgtataggctggagagggagctggattagtcaattatgtacattaggttctcttttccattcttacaagcagcaacatgtcatgttagattaattaatttgagtgaggaatggaactgttaggtcaacttagcaagtcatcactctacatagattacttccaatcaattgaatattttttacctgttattttgtcaataagttacattatctgtttttcctttattacattttacaagatcttcaaacagaatcaaaagcgtagtaaaattcaaatgccttccgcttttatgctcctccagatctggcacttgacaagttccatgccagaaactctagtaatctttgtgctactagcgtggccgaaggttgtatgtatcactcgagtctcctgatatggagattgaacttttcgcagatttcttccagcaggacgccgtttgtttggattaaataaattatttggattaggcgaattccttgggggcgcacgaagtccgggtcgatcctgctgtccacttcgtcctgcagctcgtggaagacccaggagccaggagttgctgccaaggcttccgtcaccctctgaggtctgagctgtatggatcacacttcacaccacacgccatgtctcctggaccagggaagctcggtcagatctgtaccgctatatgacagttacacag

SEQ ID NO: 4215 - DNA, 6014 bp, Sorghum bicolor
  misc_feature (1017)..(1116): n is a, c, g, or t
ctcaatgagggctatataaatagtgaccaagccatgtatcccaactccatcagcactcaccatatacatattgttctcctacctacgtgaacactacaatggcaaccgctaggtcatttctcctgatcccggtcactctctgcttcctcctcgtgctggcagcagccgttgagcagcagggcaaggcgaccaccaccctcctcctcatccatggcaaagcgctatgcaagagcaacccctccaggatcatcagcagtaagcataagcataatggctcaagaagctaaatttttttatttagtacatataattacacatatgaaatattttgcttgccgtacgtcttgtgtcaccgtgcatccatcacgcatatattaatttctgcaatttttgcccacacagacgctcacgtgcagttggttatcaacaacaccactgtctccggcggcgccggcaaaacgacgagcgacggccacatcctcatcaccgtgaaactgaactcagagcagctggccgccgtgatgagcaacagcagcagcagcagcaaggcgtacgtcaccgctcctccgcacgcctgcggcgcgccaagtctccccgccgggaaggtggtagcggcggaggtcaagccgatcgctacgatcactgtcagcgaccatgacgacgctggcagcgtgcagaggccgaccattgccgccatacatacggctgggtccatccttttagctgcagtcgacgaattcgcctgcgtggcgattactggggggctattaggcggatctctcatcggttagaaccatttgatgtgcaattcgatcgtttatatatgtataatacgccatcagcctctttccatgacacgtactgttgggcctgagcgtatacagactagctttggtggcgtagatgataaaaattgggtgtcacataatggtaccgatgaaaactatctactatatcgtaataataaaatcagatatatctgttacctacgcatgggcgcatggcctgtatgaacannnnnnnnnnnnnnnnnnnnnnnnnnnnnnnnnnnnnnnnnnnnnnnnnnnnnnnnnnnnnnnnnnnnnnnnnnnnnnnnnnnnnnnnnnnnnnnnnnnngatgttgcttgtgagttgtgacctagcgcgacgtcccaattctgttggagtcaaagagcataatgtgggcaaactctggcagtgatgactacacgcaagtgtctgggggctccgagagtagcagcacacgggcgagtgcttagagggaggcagtgtctcaacccacaccatcaacaacagcgtttgtgtggtggtaaacacagtgactatagcgctcctccaatatgctgtggatagagggattgcatgagaaaattgtcataggaaaggagattgaagcagtctcccctttctttagggagataggagagatgttgagggttttagaaaaaaatagaaaaaaatattggagcatattattttcatcatatttttttagaaaaaagagatttgtttttctcaatcgtgtggagttgctttcagtgtatttttaataaaatgagctaagtactatctcctacatgccactcatcatttatgtcccacatgcaagaattttttttctatatattctctcatgtcatctatgaaagagagaatttattttttgaaacatatctatgaaagagataatggtggtgtgctattgatgaattggttgaatatagcacttttatcctcacgctagtataaagtttttgacctctaccttgttcattgtggtagctaatgcgtttagacctggtcatggaagacccgcagatcgacgcacgcacaaccattgacgtccaggccttaacgaacgaatatttcatgttggttttggcccagcccagttaatagcaatttgggcctcattcttctcaagaaaatggtccagcccatctaccttgcccgtcattaattgcctcgtatttaagttctctacgctcccatcacgcactagaaccctagcgcccgtcccgccgccgccgcagccgccgctgcagcaccaccgctccgtttcacaaccatggtaatctcgtctttctcctcttcctcttcatcgccctcagaacccgctactggcttacacgataacctcctccgcagggtatcgacctcgtcgccggcggccgcaacaagaagaccaagcgcacggcgcccaagtccgacgatgtctatctcaagctccttgtcaaggttagccccccctctcgacccagttctctaacgctctcgacgttcaattggtattcgcgggttcagatttgaagcgattcgctcctcgcacgcagctctaccgcttccttgtccgtaggacaaagagcaacttcaacgccgtgatcctgaagcgactgttcatgagcaagaccaaccgcccgccgctctcgatgcgccgcctcgttaagttcatggaggggaaggtagatatctagtacattgggatgccattttggtctttgtcaacacccttgatgtgaggtttaaatgtgggggttaatttttgatccatgtgccttgtggggctgcagagtgatcagattgccgttattgtgggcaccgtgactgacgacaagaggatcaacgaggtgccggcgatgaaggtgtgtgcgctcaggttcactgagacagctagggccaggatcatcaatgccggtggagagtgcctcaccttcgaccagcttgcgctccgtgccccgctcgggcaaaacacggtatggctatttatgttggaaattcacctgttgcttgctgatggtgatgcttgatacagtacatcgaaaacttgtagatagcagaagataagtctatttagtctggttgtgtttgctatactccaatatgtctgtagtattatgatgaacttgtagatgctgtttaatgggttgtagacactaaatgttctgtcctggtgcaatgcaatgtacggcaatgttttcaggtcgactggtcgaacctggttgacctgggaccgactaggacgattaatgggttgtagacagtagacactaaatgttctgtcctggtgcaatgcaatggacagcaatgttttcaggtcgactggttgaacctagtcaacctgggatcgaccaggacgattaatcgcgattaatcggacgacttgtacagttcgaccgtaccccgatcagtcacctgggaccgactaggacgattaatcgtgattaatcaaaagacttgaaaacattgatggacagcagcaaattccctgtaattcttcttctttcggtctttctttttttctttctctcctttttttgtagtagctgtgttaagctcaggacccctctaggtggatgaaatgtagtaactgtgttaagctgaggacccctctaggcatagttccgctaggcactcgcctaggcgcgattcagcgcgactaggcggtagtcggagggtgctcgcctcgcctatgggggtaggcggaccccaaggcggcggcagctccgtggcggcgccggtggaggtggcgcagcgtctggcggagcgtgcgctggcatgctggtggcggacggcggccagcgcgggcgagcgcggctggcggcgggcgcacagaggagggggagatgccggagagtctggcggccggcgcacagaggcgggcgagcgcgcctagcggcgggcgcacagaggcggcggctgatgcaggtggaggcgcgggggtcgggtgcggcgtgagggagcgggtgcggcgcgtgaggtgagggggatagggtttagggtttgtagtctatggaagatgggctgggcccttgcctgttgggcctttttacctatttaggctagcctttctatctatttggactcactattcagctgttttttttctctttagaaggtaatatatgtattatcagtatatatatatatatatatataaaacgcctagaagcgcctaggcgcgattaatcccgcctaggcgctaggctaggggtcatcgcctagagagcgcctagctgaaccttgcctctaggtggatcgtactaaagctgctcaatgggttttggctctgtgctctgatttagttgcgaaaggctttgttcttgtcatcatttggttaggaaatagttatgttatgaccagagattgcatctgttaccctcttctttgggcttctttccaagccaaggagataaaactggtgcatagacctacatggttggcttaccagcccattgcattttcattgttgccctggtgtcaaatggtccaaccaatattagtttgcttactgaaattgtcccagtggttgaataggaacgcatgcatgcttgtttgattaggaagtttttatttcaaatattactgcctcattcgttgttgctttgaaagtgctgcccagtgcccactatattagacttttgaagcttaatggaatctgagcaggaaaattcctctctttcctgaagatatttctaaattttcacatgacacgcttattaagttgcaaatgtcaaggttgacatgcgatcctaggttgccctgttttcaaatgttttgccaaaatgtgttttcttatggctgtgcattatccatttatcgtagcagtcaaatagaagtactaatttattattcgaactgttatgggtcatttcacatatcatgtttgttatgactatatcactatagtgtaggctaccaactacattatgttttcagaagaggttctttcacctttgaacatagatatcatcgttctcacattgaaatggtagtattccgtgtactgacgcaatgcatgttcaacacatggtgtgccagctaatgctatgactccatgacgggcatgatcattagtatttcccatcttttatgattctaaagatgaagatgaattttctattgttctggcatccattgtatcctctgagatgacagatatggtcccttgatttcattccaagttttggaactcccactgtgcctttctatattatatcatcgttagctatgaatttgtgctttggttgatctttcaacctctgaaattgtttatcttacttagaaaaagtccagtcttatctaactgtcctcataatctatgatttcttaggttctcctgaggggtcctaagaacgctagggaagctgttaagcacttcggccctgcaccaggagtgccacacagccacaccaagccttacgttcgctcaaagggaaggaagtttgagaaggcaagaggtaggaggaacagcaggggcttcaaggtctaaggagccgcagccatgcaaatccatgtcattttgctctaatcagctatacattactgttttggggtatcagagttgcaatgttttacatgtcagaatctcaagttattaccagatattggaccaatcaaattttgctcttaattttttgcgccgtgagatttttgtttgtcagcccgtgatgaagatactctcatatcattgttgttggtgccaacagtatgagaaagtctaggtgcctttttgcattgctcatctatattctcagaatttgttcatttaaattcagcgctttcacaatgtaacagtgacaccgccgtgaccgtgaaacgaagtatactgatattatattcgactctggttgcgcagtacagataccacacgtccagtaaaacaagaggaccgagtgatgacatgtttgtgcataggtagctgcaaaagaggatttgtacatataggtcttgtttagttattgtttagttaaaaaaaatcaaaatttatcgtcacatcaaatcttcgacacatgcatagagtattaaatagtttaccttttgagcctagttagtccatgattagataataattactaaatacaaacgaaaatgatacagtattcaaaattccaaaaaaaatattgccaactgaacaagaccatagtactgtatgtgcctacaaaatcagcgatacttttatagtacaaagtatgtccacggcaatttattcttggagaattcatctttgcacaaga

SEQ ID NO: 4216 - DNA, 3713 bp, Sorghum bicolor
ggaccaaggcatctaggctcaatgtagtgcatgtggggggatgtacaactgagatggagtggtttgaatgtagtgcatgtaggggatagacgattgagataatccctatagtcagacgggcatgtggagtttctttatcagtaatagacgaatagtagctagaggtttagatcttccctatctatactttaggtgtctccatctatgtatttgcacacatggagatcatgtgttttctcctctacaagggttggaccctcaacatggactttccatccatatagccacgaaaccgtctctccgtgacctcgttaggcccaccctgtgtgtttcttttctttttgctaaaaaacacaattagggaagtttggagaaactaatggagagaaaatgtgccaaattctgaagagtggagcaaactatgtataatagatgatgttgtttacggcagtgagagaacaatactaaagaacacaagggcataatcatcagatcacaccttcctcttcctcatctcccatacaacaacaatagcatctcagccaaacctccccatgcctaagaagaccaactacatgggtgtgccatcgccattgtcttcacgagcaccaataacccacaacaggaatcgtggtctcgagcgactaaagcaaatccacacaactagatcgaatcaagtcctagaggccaacaaaccaagctactcaccaccaatgtcgaatttcatggcaattgagattgagcttcctattgccaagcgtgctctagcccgaatcgcatccttcgccagagaggtggtgcgaaaatacctacatgccacaccaaagaggttgacgtgacagagctgctttctagctcttctggatgtattttccccatctagataaattatataaaataagcaacatttgttatataaaataagcatattatgatactgatatgatgtcacaaatgttaatgttttttctaaacatttgattaaagtttaaaaagataactttagaaatctatttattcaaggatagagggagtaatatagaagaggcaggaagaaatcattttttcttgctaatcatatcttttcaccaaccctgcttaaagcgaaggtcaagataactaacggacctgataaaattattctctatacacttatacagctgttcgagcgagacggacataaataatggtgtttggatggtttcttttcgtgttagctaacagactactatgacagaaagaggatctgatagctagatgacgagcacacatgcagcagacaggaagtgaagtgagtcggtgagcaacaagcttgaccacgaaacgttgcgctaattaaccaagtcgctggattaatctgatgatcttttgttttgactcttcagaaagacgccggccggccggatgatatatacgcttgctcgctctgcgtcagaaaatgcatgagttttgttttgaaacagtgtgactgatagatactactaggtcgctgcatcaacatgaacggaggataaatttgccagaactaaaccaaatcaattaagatgcagacgcatatgcatgcatataaataaattcacggataagtaaattaattccgggaaaatttaacaagcctgcagatacacggatgcatggattgctgaaacgaacaagaaactgctctcggtcgacaattgcaagcccctcgcacacgccgagaataaagccttagatctgcatgcattaggtctatcaaccactatacaagcaccggttggtcgcctggctatatgctagctcgatggatcataaacacaatgcatgcatgatgatgacaggtagatatataatcccacacgcctacatactcttcacaaattcacattcctcctatcctatatatcctatataagcacacatatacctcctccatcgtcacggcaacaccatctatcataacttgccaaattcactgcacctcaatttgatccaccgaccagtactagaacagctaatcgatggcagcttcgtcgcgaatgggcgcgctactagttgtctacctcactctcatggcggcggctctcggggtcagggcggagctcaccgcggactactacagcgagacgtgcccgctcgcgctgagcaccatcaaggtcctcgtcggcaccgccatcgtgggggagcccaggatgggggcgtcgctggtccgcctacacttccacgactgcttcgtcaatgtgagcgagcttcttcttctacctagctgatgatcaagccacgcacaccgccgccgccatgcaatgcaagccagccatgtaactgtaattaacctatacgcattgcagggctgcgacggctccatcctgctggacgacaccgacgacatggtcggcgagaagacggccaagcccaacaacaactccgtgagaggctacgaggtcatcgacaccatcaagtcggcggtgaacacggtatgcttggggaacgtcgtctcctgcgccgatatcttggctgtggccgctcgcgattccattgtcgctgtaagttctgttacttaaatcttcactctgaagtgacgacactgacagtatggcactgacactgacagtttttcattttttttttgtctgtgcgcgcctacgtactgtgaatgtccgtttctacaattagctgggaggaacctcgtacgacgtggtcctcgggcggcgcgacgcgacgacggcgagcatggacgacgcgaacaacgtgatcccgaacccgttcatggacctgccggcgctgcaggcgagcttcgagtccctgggcctgtccctgcacgacctggtggtgctctccggcggccacacgctgggctacgcccgctgcctcttcttccggggccgcctgtacaacgagacggcgacgctggacccgacctacgcggcgtcgctggacgagcggtgcccgctgtcgggcgacgacgacgcgctgtcggcgctggacgacaccccgaccaccgtcgacacggactactaccagggcctcattcagggccgcgcgctgctgcacacggaccagcagctgtaccagggcggcggcgacgccggcgacctggtcaagtactacgccgacaaccccaccaagttctgggaggacttcggcgcggccatggtgaagctgggcaacctaagcccgctcaccggcgaccaaggagaggtcagggagaactgccgggtcgtcaaccaggcgtgacgaccgatcgtcgtcgatcggatgagcgaggcatcatctgcttcgttccgtacgtacagcgtcctgatactgtcgctgctagctgcaccagcaagctataagcagtaagattctgtagcgtgtgtctttgtactcgagttcctctttaattctgtgagaaattgttcctgtgtttagttaattttttttagcgatagaagatgataggcagcacatcaacgaacgcctggtcgatggtgcaccagcaacaaactcagcccataaataatggaacattggcccaaaaataaacttgagcagcaaaacgaaacacggtacaggtgacccattgagcacctaggatacaatgatgagcaggcagttagcagcgccagcaagccgcggcggtggccgcttgccggtcgctctcctcgctcggctctgcctacagctactttttttgagttcacattggccctcatggcctgtcattaacaaacgtagactcgacgaaatcgcga

SEQ ID NO: 4217 - DNA, 7418 bp, Sorghum bicolor
ttggacaatatttgtcaaataaaaacgaaagtgctacagtagcgaaatccgaaattttttcggaactaaacaaggcccatgggaatgggacaaagctgctgtggtgtggtaggtttcgccgtgctcctccttcaatttcgtgtctggagccttgggggtcatcagctgtttctttccgtggaggcagaggcaagccaaataccgagccaaagctgagagggagtagtgcggtggttcgccgttggcagcccggctaaatctgatatctatataggtccatgtccatccggcctgcaactcaacatgtgggcctcaggtggtgcatggaacggcctcttcgtttttcttctccctttcttttttttttccgataggactggtgttcttgcccttgctttgaaatctatttgtgattttacctatattattttttcattttttcattttattttttttttaaaaactgaagccaccattggccactctacaactctgttagtagaaggtcaataagatgaacaaaatattcttttttgataataccaacccttgatcttatattcactaagcatgtgccacttgtcaaacattgctttgtatttgacacacgggtctcatgaaacagtgattaacgatgttaaatacatcatcagtcgtatttctcttcattcctgctaccaaagagaaacatagggatcgttccatctcctcaactcaactcactatgtcccaaaaccaaagacacacgtaattgattactaaaagtactaaatgtactgtattcgccatccgtgcacacggacatgcatggaaatggaatgcttggtacgctaaggctagcgtggaaggcacctcgatcgaatatgccgtcccattatgttatggatatatatatagacgccgacgacacgggggcagtagtgcacgcgtctcgtggagtcgtacgtgactagactaagcgactgtttgattacttgctaaaattattcttaaatgattagtaaaattgaactatttttttatcagtgtgtttagaaatctaactacgtgactaaagttagtaagagaaccaaacagacctgatgctagtgtgacgacgacaacaacaggatggttagagcatccccaaccgttttgcaaataagctttgcattcatgtatttgcaaaaaagtcttaaaaatacttatccaacggtttgacatttagactttgcaattttgttaacttggcaaaaagagaggaaggattggcatatatgccaaacctgttcacacttggcattgataaattggcgcgaagtgattaatgccaaaccattggagattgcctcttttcacctttaccatattttttttagacttaacaaacttcctcatttgccaaaccaattatgcaaaacggttggggatgctcttagacgatgtcgccaccgcggcctcatgctccggtagccgtccaagccacggcagacaaattaaaggatttggaaaatcctcgcgtatatacaaatgaaaacttagaaactggaaattttctcaactttttttctcgtttggctgataagctattatggaaaatattgttgtttagtttactgtaggagaaacatattgttgaatacctaacaaattcggttgataaaattaaacgaataagatgtttagacgaagaaaattcgtctgtagaacaaatgaatggttgacatggacgcctcttgaatttaacttatctgaaacagctagtacagtaaaaaaaaagggcgacctgcaaaggtaatatcacctcccgacattgctgtgactgtgataaagaatcttggacagtcgtaagtcacaaatttctcatctttggacggctaacagtaatttgagatacagattactccagattagtactactatgtcactgtccaggcagggagaaaagaattaaggaatggataatcttgatgtcacctgtctcgcgtctttttctctgcctgccctgccccttccatgccatgtggccccctgacgcttaaaacacccgccgcggccgcgggcggcgtcggcgtcggcgtcggcgtcggcgtccgtcatcgcaaaactcttctcgcacgcgtcgccgcccgcaccgcacagatcaacaaccgctcgaaattttgggggaagcaagagagcagcagagcagcgcgcatcgcgaagcggagagatggaggcgccggctcgcctccccatctccctcctcgtcgtctccgccctcctcctcctcctctcggctcagggaccggcgggagcggcggcggcggccgtgccgccgcgaatccagccgctcgctaccgccgcgctgcgccgcctctacgacacctccaactacggcaggctgcagctcaacaacggcctcgcgctcactccgcagatggggtaactcactcatgcttgcctgcctgcagctgctgcaacggccagcgctaaatcagttctgctacgttgcgcgtgcgcaggtggaacagctggaatttcttcgcttgcaacatcaatgagacggtcatccgcgagacaggttcgattccggttccaccgcggcctccaccctcctcactttccactaccaaatccggagttccgctactctagttttagtaatagacccgtttcgaaattttggtccaattcgtaatgttcgcttatttggtgcaccccccgctgctaaaaatagcagtacatccagatagctcataggtcaatgattactgttggatacatcatatatatgggactgcttgaattcactgttcaagtggcatccttgcaagcagcaactagtgtttgcgtggtgtgtgtgtgacacgctgccaaaatgccttctctaaagcagagtttgctcagacgtgttctccacctgttgttattgaacagctgacgcgctggtgtccacgggactggctgctctgggctacaacttcgtaaatattggtacaccacttggcacaacacaatggattgtttggctctagagactattttgtttgtttatcttatcttttgtttgttgatttgtttcttcagatgattgctggtcatacgtgaaacgaggaaagcaggtaatggcatgctttcattccatgttttccaaaattctctgtcaatttgcatttggagacaagcgctggaaatgattacgtatttaacgtgtaatttacttgatcatttgtatgtcatcatgttcaagcttggacaaggcactgatcaaatagtcttattcgttgcatttgttgaatggcccaaatgtatgcgttctcatttttcctggttttggtgaaaaccggacctccgtacatgtattctaaattgggaaaaatgtgtaattttgtaccgcaatgcccttatctgtatactgtttattctctgatttttggtttcgacaaaatattttttacaactctttatagagttctaaacttttccatacaacataccctcctgtacttttttttagttgctctgttacattttattttcctagcaaattgttttgcattgtttctgttctggcacattgggatggatagacaccatagctcgcaaaactggcttttttctcccaagatatactaatactgtaacacatacctattttttttttttagaaaggacagcaaaagctttgccacagattttattagaagaagaaaaaacaaaaggcaagtgccggcccagttttttgagtggaaactaggccaaaaaaaccaagacacatcttcgaacgacaaaaccacctaacaaactccatggcactacaccctcaggctacaaaaggccaacttggtctaaactctaaacatgaaacaaccaacaacttgactaaaccacttgctacactaagaatatgcacaacacaacataccaggaatacaacacaggaaaacatcacagaccacacctgacaagtcaaaggaaaaaaaaaagagagaaaaaaaacacagccacccaatcgaacattatccctgagttgccagcagcttatctgtacaattctaatggatctttcttgtaacatttaggaccaattgctgcctgatccgaagactttcccttcaggcatcaaagcccttgcagattatgtgcatggaaaaggtctgaaacttggtatatactctgatgctgggtaagtgaacatctcagttatagaatttcaaatttctatatcttctggacagttaacctagcattgacaacaataactcaataagataagtctttcaggaaatttacttgccaagttcgacctggatcactcgatcatgaaagtgacgatgctgcgatctttgcttcatgggtatgagcaagaaacatccactaaacaatcgctatataaatagttattactgcaaaaatattgatttagagtgttcatatcaacccacctatttgtggcttgaagacttgaactatgctgaattacctttaaacatgaagatattgtactaatacctgaatacaaaaaatgctttttgttcagggtgttgattacctgaagtatgacaactgctacaatttgggaataaagccacagaaaaggcaagaagactcaaatatcttcccttagtgttgatcacagtttacacatgcaaccataacatgctgtgataaagtttgtttcatggtgttatattcatagatatcctcctatgcgagatgctcttaactcaactgggcgccaaatcttctactctttgtgtgaatggtaagtccctttccttcaggagggaaatacagttacatctcatacttgttgaattgagatctccgtaatgtgctatcatgctattttaacttaggggccaggatgatccagccttatgggctggcaaagtgggcaatagttggcgtacaactgatgacataacggatacatggcaaaggtaacccatgctctttccaggggaaaaaaggggaagacacattagctctgttgatgtgctctcaaactgactaatttatgtatctggtgaaaacaagcatgacagacattgctgataagaacaacaagtgggcgtcatatgctggacctggtggttggaatggtaattatgttagtgaggagttcaagctttctgcaattttccatgctttctggaattgttcagtacactgttactctgttattgaacctctgttttatgcagacccagatatgttggaagtaggcaatggtggcatgacctcagcagagtatcgctcacattttagcatctgggctctcatgaaggtaagttttcattgagattggaccgatgtggtatgatgatatttaaatgctgcttcaattgttatacgggtacttgagtaaaggggttaataaaactgtagttcgttgaatatgataattgttatgcaagtagtactagtattgtttctccacttactgatattacatttggatgtgagaaaggagatatcctaatcctaatgcgttaactgctagcggtttcttatatactgttatgcttcaggcccctttattaattggctgtgatgtcagaaacatgacttctgaaacaatggaaatattgagcaacaaagaagtaattcaagtaaaccaaggtattattctgattcttctttgggagagaacatgttatcctggtttagcgtctcaggctacaaatatatgttttttacatagcaattgacaaccttctccttttctatacataatttcccaacataccttatccggcagaaaaatttaaatcgactatgttcatataattacataaactgttgagttgcatgtgttttattttctgcagatcctcttggagttcaaggaagaaaaattttaggagaaggaaaatatggatgccgtgaggtgatcagtccatttcccactcgttctagacagtgttgtagccatattgttgttctattttaaaatataattaggaccatagtgcatgagaatttttcagcattgtaccctatgcatgatcaatttagtaattctttttttattttataaatgtttaactttacccaaccagtaacagcctaacaatgtgcatgcctgtagctataggttgtttgtttgatgttcaaaagcttcttagcagagtagttgtatgtcaaaaaaaaaaaagaaaaaagaaaaagagcagagtagttgtttgatgcctgcatggaaggtcatcagacttggaacttgttttcccagtttcaatttaagtgcatcagtacatcaaactcacaatgtaactcgtggctgcaggtgtgggctggtcccctgtctggaaatcggcttgttattgctctatggaaccgttgttctgagactgctaatattacaatgaaactgccagcggtaggccttgatggatcagctgcctattctgttagggatctgtggaaggtaagccaaaaggtttcaattgctgttatgtgtgggagttcagttcacctttcaagcactgggtgagcaaaaataagttctcatgaaattcacattgttccttttcagcatgaaacgctatcagaaaatgtggtaggaacttttggcgctcaagttgacgtgcatgacaccaagatgtacatcttttctcctgcaaccagtgtcgcttcaatttgatcggaactcgtgaatccaagatggcagcacgctatattcaaaggatatcacgacaaggaacttcatttttcctgctgcagtctgtcccactcaagtgcagaagcttacttcgtgcagaattgtctcattaatgtttgccatttctcacgaagtagttctctttatgtttcttcttttcatgtaagttgtactgccaatgaggtggctcatgtgttggctagactgagcgagctcgcatcttattcgcttgtacgatttgaaactgtctgaaccaatgagccaagtcaaggcgattccacgagttgggcttcacccgcgttggagacccggcgtccagttcacccgcgtgggccgggagccggactgcctgccggagtgtaccgtgtacgcgtggtcgccgacaccgacccgatttttttttatatttttttttggtgcaggcacttgtcgttaatttgtaccacctcgcctgttagcacatatcccaagcagctgaataatctgtcctcaactgacgcgtcgccgagccaagtagcgatggcttgtcaccctagcgggggcattcaaggtggtgcggatgccatatttgtggctctttgggcccctggaccctgtgattctttttgcggccctgccttcctaggttttgagtagtggcctcatatgtcgcaaatacctttttggttttgtttggatgtagttggattcacatcaatttacatgtgttggtatggattggagtagaatttgacaatacgcgagttgctggttgcctcaaaatggccgaaaccgttcacttcctccaacttgg

SEQ ID NO: 4218 - DNA, 4206 bp, Sorghum bicolor
aattttttttatgtacgtacatagattttaatatagatacgtagtaaaaataatatatcaacaaatcattatttaaaagaatcaacgaaaaggtaatttggaactagtggaagtaatttattgattcatattccagctaaatcctactccctccactcacgaataatcaaaagtaacgttttatttagacgtcaacaccatctccaaaatacaattttgagtagcactttttgttaagccagtctcaatgcatgtttcatgatagtgtcatgcacattaaatagggtgccacataaacaaaattgctgacttggcagggtcattaaatgaaggagtttcatcagatgagagaggagtttcattcccatgaaactcatgtggctcggttacgtagtttatagtcttggtaactgtgcaatgaaactatgcattgagactggccttatagaataagtaaacatagggaaatatttgtctctgtgtaactatattagtttcgagttaaaaatatacttgtatctttgcaaataatatccaaaacataatacataaaagtaatatataaccaaaaaaacatcacttgttcatcgctagtagtatatgacccgaactcagattattttgctctaattacaaccatgcttgtttcccacatatagcaaacttgattataatcggcatacctggcctaattcttgtcactcggaccataactgattgatctactagtcactaataaatcggactaagttttttgcataaggaatccaagtaattcaaaattcttgcttgataggcataccattcatctaagataagaaaatatgcattttcatgaacaagcctttcttttttggtaatggctcaatgtaggctcaacacctcctccttaggtttgtagtttcggccgcaacgaccattgtcatgggcttgtcaccatattgaatgaggtttaggagccaaaggatgtgacaaaaacaatcggagatgggccgatggtccctcttctgcttccacttgagcctactcgatcgtaattctcatcctttttttctacacatgtcttgtttatttagtttgcggaaaaaacgtttttaggtattgtagcacatttgtaattatagcaattagtatcaattatggactaattaaacttaaaaaatttatctctaaaatatatataaactgtataattagttatttttaatctatatataatgtctaaatatttgatgtgattagattaaaaaaaaattgtatgagaactaaacatagccatgtgttgccgaaaccgagcgtcggtaccaaacagaatttatgctttgtttattatggacggggagaagattaacggcggcctagtgtaggtgttcaaggagtcgtatatcatgcagcttgttttgtttgagctgtagtttcttttacttaaaagttagtttttaacttttgggttttgtttgttggtatttcgctattggtattttaatgatcttttagcttctcagcacaccgagcgagaagatggtatttctcagcgtcttttagttcatttaccatcacaagccaattttttaaaagtcaacttatataacaactaagttatttgtttcaacttctgacgcaagctcaaacgaacagagcctataggagcctccaaaaatggtaaggaggggaggacggtgcgacgatggagttacagaagactcactagagagagtaaaaatgcaagcaggtctgttcataaatttacaaatagattaaatttatttacgggtttgggaacgacctcttctcgtatttgcactgcaaaaaagaacaaggccgccataccaacacgtgcctacatggctacatctacatgtacgtatcctttggattccagtccaaaagtatgggcctcaattatttttgcaaatcaggcccatatagttctcgtgggcttttattatacaatataggcctacctgccttcctcaccggccttcctcacctgcctcagagagagaaagccgacgacacgcgaagggtgaaccgagattagcggcggcggcgatggcactcccggcgtcgagctccggcctcttccgattcgtctccccgcgcagccgcccccagtccaccgacatcgtggccgccgcctcctggggagtcttcgccggcaccgccggcctctacctcgtccaggttaggatccatcggcctgctcgcatctcgtatatatccgacgttagctttttccggtgtatggaccgtggatcgcccgggtagaaggctcttaggcgtagcacgtccttgatctgtggaattgtttgctgcgtcggtgttagggtttggttgttgcagatcggatccgtgatgctcgtgtggtgtgatcgtcgttgttcgtctggatctgcggatgttagatcggtcttagggatccgtaccctggtttgatcaacaattaggcgctctgttggggtttgacttgtgatatgcttgttgtttagtcaaacttggcctctcgatcgaatgaatctaatgaatatgtcctaggctataaagttatatattggaattgctatgtcaaatgtgtctcaggaatcagaaaatcgttgcaataaataaggtatagcaaacgttgaagtagacataaacttgataccaggtcattatcacacaaacgtaatatatttgaccaggatttgtttgattgtaattttgcagaatacacaaatttctgttaccacttggcagaaatttaacataattctgacaatggttcctgccactagaaatttgtaacacatcgatattttttgctggtgccttgatttgcatcacctggttctttttatagtcatgttaaatcttgtgcctatatgctcatgtttgatgaacttatttaggagctatttacttgtgtactatatgtggagaaataagaatgtgtgttcttaatgaaaacaagtgtacctataggtctcacctgtattcctgataatgcatgtcttacagtaggtcatttgagtttgtaatgacaatagccatggagctgaaataatagcaatgttgctgaattgtggtgttgtttcttttggcaccttaaggtgatttcctccttttagtgacgcaacaactctattcgtctcaccctattggattaagacatgtgctgaggcctgaaacttatgtaaatgcaaccgtttgaggttactctagttgatccattcttttgaatcacctgattctttaacagaggatgtggtgcccttgtgcctgttttattgtgttttgttaaagatcttagtttctttcctcgattctggtcttttcctgttttactgtgtaccctgctgttttagcgcctctttcacctgagattctgaaaattttttggacttcttttgcagccatttgactggattaagaaaactttctttgagaaacctgaaccagaggcatgattctccaggcataaaaggctgcaagtctgcaactgcaactttgatacaccacttttgtccgggatgattcctgattgaagagaacttgtataactcagcaaataatatgagaccccctcatgtttccttgtttgattttattcagatgtaggcattcctcttgcatgtaatcctcacgaggggagtgatcatttgacttgtttttcatcacacagaaactgcttggttcaactgtgttatatgatcttgatggcatttctaaaatattggtccaagatgcatgtgtttaaaacctgtggctgattattgcattttgttcagtcactgtgtctataaattgatccaccaatatatctagctgattaaatttggaccatgatgtcatgctctaatgtccctgtcactgtcttcctaagatcttgtcgaataatgctgcttgcctttgaatcgttatcgccttatcggtgtaaaacaattctatcgccttatcgaataatgctacttttgctatttacaattatgcaccatccattatgactacgagtatgtatatattcagcatgctaaaggatttttgtggagttctctaggaaaacaatggctgtcgtagttaaagtacctttttatttacaaaaaccaattttggtacaaacccttagtcatagttgcgttcgcgagacaagattgtatacatccaatgcacaggtagacaaagtcttttgaacaccacagccagagagagtggtctttatgctgaatc

SEQ ID NO: 4219 - DNA, 6607 bp, Sorghum bicolor
  misc_feature (3280)..(3460): n is a, c, g, or t
atagcgagcatctacgcccaatacttcaaccctccgtaaataggtttcatcataagtaggccgtgtttacttcctgagctattttgcaaaataaccaacattcttcgtcacatcgaatcttgcggcacatgcataaagcattaaatatagataaaaaaaactaattacacagttcgtctgtgatttgcaagacgaatctttaagcctagttagttcatggttgtacaacaattgtcaagtacaaacgaaaatactacagtagcattttgcaaaaattttcatgaactaaacaaggcccagctgagctagctctaataataagtaatgagacacaaagtacaaatactgcacctatctaaattgcatcttgctatgcaagtttcttttgtcttcaactaaaaaaaaaatctgcaactatatttatttactttataaaaaagtggtgggcactatattgcctcggaaaaaaatttcttatctacaacgaaaagtgcaagatggaccactgtgtactccatctgcatgcaccaacaccatggtccatgtgagagtctgtggtcagtacatttgcaagtggcgcatgatctttatattatagtagagagtagtcgacaaatggcagcacagcaaaagatctttattgtgtggctgcaagggcagccagggtggattgtggatagatatcatgcctacacgcagcgagttgtgccaaaaagttctcaaatgatatattttgcatgcatcgatcgagcagactaaggaacgaaagcccgcgtctactttgaacatctgagacaagcgtggccatgtcgcctgctccctactcctacactacatgggttgggttattagttgtagttggggctcccagtctcaggatcaccaagctggaaatgtgctgccttttcagccagagcttggagcttattgccgtccattcatcaggaccataatgtccaaggtttacgaacattttgccgcaacattcttgaacccttacacccgtcttggtgttgtttctctgcctgcatgcaccataccaaatacgcccatagtgactttgaggagcaaatatgtactgccaaataaatcagccacaagatcctgcatttttctcctatagtctaaggacctattcgactcaaattatttgcagtggcgccgactgagagtttgagacacaaaacactacctaacctacctcatccccccccacccccaaacaaaaaatgcaaccatctatgccacgaaaagtgattcatatttgattaagtatagatccaaaataatgatcatttcataattaatctaatgatatttatttggtatcatacatattaatacttttttgtctataattggtcagacttataaggtactaaaacgtactatactagaattgtattgtttctggatggacgatggaggtagatatatgcagttgcagtgctaccaagaaggacaacagaatatacccgaagttgatgtctattatattgtctaagattgaaaacactcggtgttcaaactaaacatgcttcggttagtaagatcattgcattttgggccgatgattctccggtgggcggtgcgttcaatgacgcagggccgattatgatggcttcaatttaaaaacttatgtagtacgtactccgccgtatgtacataatcaataacatcatctttttattgtgctattggacaaaaagaaacagtaacattgtgagcatttgcatgactttctaataggtctttgtttttatttgtttttcttagtacctaaggttagatgaaacgcgtaactaattccgaaaagatatgatccgcgagaaagaataataaagaaatactaaattctaaagagagagggagagaggatgagggcaagagtggcccatgtgtaggtccataaccaaaagcactaataaaagcggaaagctccttttgccggcctccattacttttctagcccaaacctgtccacctccacaggggcatcaatgcacctcctcctcaccgacatgtgggccacaagaacatcgggcccacctgacatcgacacgcgcttttctcgtggatgcgcacggctttatttatcgaaagggaaaatctctctagctggggtgtgctacgtgcacccggcgttcgtgcacctgggcccgcctgaaccaccgggtgatttggcgcgcgtgggccccgcgccgcgtgaatttcgtggcccaggattgcgctccgcgcgctgactaggacccgaccggccgggccggtcgcggggaaccggccgagcccggtaaagtaaaccactggcgcctcttttgttaaaaacaccccttgcctgttccataaccacagctctgtactccttaatttgcagtgtgtacaacggcacagaactttttttttttttgggatggtaatgcatcctttcatgaacgactctggaccaatttcttctatgtcaagtgccaggtatcatcaactcttggtaattctcctatcaaaaaataaactcttggtaattctagtggaaagttgagttttacggcaaaaggataaaatcttatacccttgtaaagcaaaatccagctatttatttctctcaatatgcaagctatttaactatgcaatccagtatcacacccactacctatttttctcaacatacaagctatctaactagacaatctactattacacacaattaaaatctactagctcatgcaactgtaatatccacatcagcaagtcatctactgtctgtccaaattatgtaatgcacattttaacttagttataatctttcttcatactcgcggcaacgcgcctagttaaagagtagcatgaattttaaatcatcaagaatgcaatagacatttatcatgttataacgtacacaatttctagtggaaatagttagaacaaataggaagataacactagcatatgatacgcccctatgttaatttaacacgtctttagatccatactacttgcgagacaagtttatttttttattatcaataattatagggacaaactaagcatcaggtccatcggtatcaatgtgtttgcgatagttttgttataatctcaagaagatgcttagaagtcgagtgtatatgtgttcatgtttatgagcattttgcatctgcactactattcgcaagaaatttgaaaaaaaaaactcgacattttggatcaccacattttaacccaaaaagaaaggaacatttggatcgcacccgttggtatcatattcactactgtagacaggaccagnnnnnnnnnnnnnnnnnnnnnnnnnnnnnnnnnnnnnnnnnnnnnnnnnnnnnnnnnnnnnnnnnnnnnnnnnnnnnnnnnnnnnnnnnnnnnnnnnnnnnnnnnnnnnnnnnnnnnnnnnnnnnnnnnnnnnnnnnnnnnnnnnnnnnnnnnnnnnnnnnnnnnnnnnnnnnnnnnnnnntgtagaaggagtgttctaaacagcctgaattagttagggctctattctatcccttgtcaagactactcttgtgatgcaaaattgcaaaaaaactgctataggctgatgtggatcctctataaagtttttaaccttgatgctactgcttctcagagccacaaaatttgtgatcatagagctaaagctactgtgaaatctgggtttgggtccacatgcagttatggtgccttggacacagttgttcctcagtgccgatctgattgagctcaaatttcccaagatactgaaacaaaatgggcctacccactatgcgattactagagttaatgatttttttcctcgtaaaacgagttaatgatcctatgccagagaaatagcaatcataagatgtactaacactgtcaaagtactaaacatcaaaagtacactgtaaccaagcagaagttttggcaatgataccataccagagagattagttaactgcaataagtacagtaacatcatcatcgcccagatcttgatggaatatgatacaccgctgaagatatctgctttcaccatcttagcaaactagtctgttctctgagaacatgccgattaaggtgttcctgttttacaaaataagatgtcaaggcttgcttagctgccaagaattttagcttgtgcaaggaaggaacaaaagaaaattactgactgtagtgaagaggatatataattatgtgtcttctaagcaaacactgagtaaatgtatatgtaagcattgagtacttgcttgactccttggatttctaaagttctgttatttgacctatttttcttgcataaacatatttagagcatcttacaaatcatatttgctgccatctcaaaacatttagtttacttggtcttaatgtatttgtcaggatgtatgtgaagatagagaggacatgagggtcaccggggagaagccatgcacacatcaggaattagatgttgaccagacaaatagttcttctagctttaacaattccagtgagtgtgagaatctggcacccagcaatgacgaaatatccggatcagagtccaatttggagatagccaagacggagggtgatgtaccgagtggagagaaggttctgaagaagccagacaaaatcctgccatgccctcgttgcaatagcatggatacaaagttctgttactataacaactacaacattaagcaaccaaggcatttttgcaagagttgtcagaggtactggactgcaggtggaagcatgagaaatatccctgtcggtgcaggaaggcgcaagagcaagagctccagtgcgaattgccgcagcatattgattccaggcagcagtgtagctactcctgggggagaggcttccctttttccattgtccataaatggaaatcaagcggcagttagcttcgggcctgattcccctctctgcaactctatggcctctgtgctgaagattggaggagagcagattaagagttcgaaccctgcctcagcagcacagcccagaaatggagaaaaccagatgtgcccaccttgtactacatcatcagatggtccaaggaatgaatcacaaaaggaaacagcgaatgcacatcaaaatggaatcattgggcaaagcaatggagtcacttctgtgcatcctataccattctttcctggtccgccttttgtgtacccatggagtccagcatggaatggcattcccaccatggcagcagctgtgtgcccagctccagccgaagcagcaaattcttcagaaaattgcaccacaagcagtaatgttcaatggaatgtgccaccaattgtccctgtactgccaccgggattctgcggtccgattccagttcctgtaatgccgccttcggtttggccattcattactccttggcctaacggagcatggaacgcaccatggcttggacctagctctactgtgccatcatcgtctccaacaagcagcagcacatgttccgaaagcggctctcctgtcctaggaaagcactctagggactccaaacctcaaggagatgagaaggcagaaagatgcttatggatccccaaaacgcttcggattgatgaccctgtcgaagctgcaaagagctcaatctggaccactcttgggatcgagcctggtgatcgaggcatgttcagaccattccagtcgaaacctgaaaggcaggaacagatatccggcgccgctcgagccctgcaagcaaatccagcagctctgtcacgctcgcgatcttttcaggagacaacatgatagagtattactgaacttgtgtgatattattcaaagacgatgctatattaagaaaaaagaaaagctctatattctgtacaatgattggcaacgtaggtgctgctgctgtccaaggcagcaggcacccttactgtaccattggaagagtacatcctcaaattttctgttgtttccttgtagagcatgcaccaacatattgggttcatgatcaggtttccagcgtgtgcttggttgtacaagaataattgttaatagcttcccttgagtcattgtattacgctgatcattcagctatggcatacccctgtttactacacgctgttcaccctccctgacgagaggattcagtctgaagaaatgattagcagttatgcacttgatgtgtaaaatgccaaaatcctatactgttcgtttttttttccttttgtttttgttattgggcctatgtgtactgaaggctgttagttctcagttctcatccataggccgtcttgagtgatgagcactgaagactgaagtacagtagtactgagtaggattaagatttaagaacatgcagccttgggcttcttttttttttcctagtagagcagaagccggcaggttacactgccggataatgtatggtatgaatagcaagtataaagccttgggttttctagaactatgaagagtgcttcggttgcctttttaaggagactctactctactatagtctgcgctgcgattagttgggatgcccctgtgccttttgctccattgtcgttgtgctgcctgcctttatagcatcagcatcccctactcaagtctcacaagtcgtaaagctagctttgttaccctctttgcagatgtgacagctgactgggtgcaccga

SEQ ID NO: 4220 - DNA, 7609 bp, Sorghum bicolor
tggagagagcggaacctatacactatgaacagaacctacttcacttagacgtggatcagcagtagaacaaaacagctcctctcggtaaaaaaaaatagaaaaacaacttgatgcctcaaaaatgagcatcgtgtaatttcagtagacgttgactgtcatggttaatccattgtgaacaacttttttatgtaagctgataatgagacacaatacattttattttctcgtaaaatttcaaaattcttacataattatctcgggcctacagccacttacaacaattgtgctcgtgcagagtacatgcattatgctgacggaatgagttgtagcagacgacgtcagacaaaggatgagattgaaccaaaattgcaacttcaaggactaagagcgcgtttggatgccagccatgcactgccacgggcagtgtggcggcaactcacttgtggcgatcaaaatggccgcctaagctgcggcaactttttgaactgcaaaagactgtggcggccacacttaaatgctaaagcaaacaacagccattcatctgtggcgcgccgcaaattggactggtaaagtgtggcggtcatccaaacaccccctaaagtgaacgttttggtagttaaaggatgaatttgagctttggatgaaagtttgaggatgaatatagctatttcgccttatacaattgctctttaaacctaggcacaatatgttttatggtatataattaaatgggtaatgtctattttttaacttcaaacttacaagatagttcaattttaaattctgaactattattaaactactaggcacaagacacccttcaaccgtcaaaacttccaccaggcttcgaaggtggttttctattttctaaacatatatttttcgttcttctttggtacacgatgttttgtagtatttaatgtttttctaaacactaaatgataaatagtcggtcacctatgtttagccattattcaggctaaacaatccattataagattaaacggacaattaaacggactaaatgggtgattaaacagaaacagagtaccactgtgtagcgtttacacggcgtttaaatggtctaaaaaggtgtttaggcaaacagtagtagtattaaactcatttttattatttctttagtaaaaataaaaaaaaatcacatttgaaactaactaaaggaccacttttcctggtttatataataattatataagaggtgtccggtatctaattttgtattttaaagtttaaaatggacaagttaaaggttttaatagatttttacctaatgaaattaatctacgttatataaatgttgattcacttttaaaaactagaagatagctgggtttcaactttaattaaagatatataagttttaaataaatataaaaaaagaaaagaatcccaaatagcattccgactaggaatggcaacgggtacgtacccgatgggtacttgccacctatacccgcacccgccaggtcaaaactattccatcgggttacccgcgaaagcagacgtgtaagaaattcattccgtacccgcacccgacgggtattccatacccgaaaatataccctagttcaataaaaatataataactttcagcaagttaaatatcacaacttataggaaattaaacataacaacttccagcaaattaatagtagcactagtagcacaccagccgctcaacacttcccacgttcagtcaatcagttcatgggctatatgggctaaattgcttaggttgcttactcattttgcgggtatttcttacccccagatacgcgggtatggatactactattccacacccgtacccaccatacccgatgggtaaaggatttcacccaacaacgtacccgcggctacaaaatccattccatacctacgtccttaacgggtaaaacccgtcgggtttcgggtacccccgtccgccgcggcgccgcatcccaatcccaccggagcaggaccgcgggagcccaggaaagcaaccattgatcaacaactatactacacgcggccgcgatccgcgagccgccgacatatttaaccgccgccccgctctggcgctctcgcctcgtcgtcgtcccctcctctccccggctcgcggcttcttggttcttgcccatcccatcccctctctcgccttgctgcccaaacccaacaatctccctaagaaacggccggaagtctcctccgtttctcctcgtccactgcgaccgtcgccggcgacgagcatggcgtacatggcagctgtcgcgcccgtgccctggtggccgcctccaccggagctggcgcctgtgggcttccccgacgcgtcctctcccgccggctatccaaagccccaaaccctacccttcttgctagcgccgacccctccgccaccgccgccgccgccgccgctgcctgcggggtaccctcttcttcctcccccagccccgatcatcatccagctccagcccgaccccagcttcgtcgcggaggtggatcagcgtcgcagcagttcccttgtgcaggtgagcctcgtcccggaggttcaatcttgatccggattcccccgcattccgagtttccaacttctttctgactaatccctgcgctctctgccatgacacagttcttgaaggatgagggggccgttccgtcgccggaggatgaaaagaagagggagaaggtgatccgagagctcaagaaggtaatgccgctcgcccgctcggggttttgtgtcaaagaaagcatcttgtgattgtgccgtacggcgtacgcccgtacctggattcctgatttttttgcgttctcgcgcttcttcccctcagatagtgatgcattgggccaacgcggtggcctatgagcagagtgtgccccaggggctggccactgctacggtcttgacatacggctcttacaccttaggggtaagcaagagccgcacaactttagagtcttgatttttctgaattctggcgcactttgttctttgtagttcatgttgttgacgtgcggttattacacattgtgtctaagtgagagataggtgaatttggacttttgatgtgtctgaattgttgcgctgtttatgttcctcgttcatgttgtttatagggatatccccaatttcatgttttgaattcttttatttatatcattacatttgagctatatatcctaggttcaatgcttaacatattttgtcttttattaagctatcctacattataacttaagtgcatcccttgggtagtgctgatataaaagggtagcagatgatctgaaatattttttttccaaacagctttactgcaccctcaattgttgatattgcattgtacatgttactgcccaacacagttctattttaccttctattttgacatagtttctgctaatgacacattaattccatgaatccaaataaaagaaaagcatcagcagctgcattccccccacactagccttttcctttgaatgaacgcattggcctttgctagacttgagttgtaatgtttatagaggagatgagttgtaaccactgctattcaagcttagggtctacggatagaaattaatgtctatgcttatataaagtagcatctaagatgacatatctccactggatttgaatgatccttctttctctttctcaaggctcatggacctgaatctgacatcgatgtactttgcgttggaccttgtattgcaacactgcaggtgggtatggttctttctgttccgtatctttactctgacgtgtcgacataataacttctctccattttgtagtaccatttctttgttgttttgagacaacttcttgagggcagacctgaagtatcagaactgcaaactattgagaaggctaaggttcccttgatgcgatttagatttactggaattgcagttgatttcacatatgcccagctccctgttattgatgcattaaaggcaagcagattacatttataccataacttgtccccccccccccccccccttttttttttccttttgtaatgcctcttatactatcatcccaagtgatctgtgttttctacttctcatgtgatctgttgttatgtggtattcaacatagaaatgttattatcttctaaagaatacgaaatgtgcttgactaatgactaacagcctcctcagctgcagctacagtgatctgcgagagggaaaaccctcacagatcactgtagctacagcgctgcaggctgcagtcgagcaggccttaaacttctgtttgtagcgctatggaatagattaaccctagtattatggtttcgctgtcactgcatcttttccttatctttgatatatatatacctctttgctaaacgtgcggcatatcagtcaactgccatctgaactatgtagtattcccatgtaatttttccagttaatagattgggtcataactgtttgcagtacttatgcatttcaactggatattctacattacaaaactatgttttttccaaacgatccatgttatgattgttattacttatacaaacttagaaccatatgtgaatatcttgactttggcgcccttcagctttgacatacactttacccaatacagtcttgacttcgctttgctcttgcaggccataaatacatttagcactcaactactacagaaaatagacacacggagctggaggagtttatctggagttcgtgtcaatgaacaaattgttcagctagtaccaaatgcggaggttaaaaactaatctaatgaattttttttttttgagaccattgcacgacaattttatcttcccattgaatttactctgatcagtttaggcatgttcttctgttttttctgatttttccccttgaactcgtatcattttgcttttaaggtccacttgcattgctttcttctcttgagttgatctgtgagcatctcaacttgctcattatgataatatctaccagacgctttaagttttgtttttttttctcaaattctgtttctttaataattttactttacttgaattacaatacagaagtttcaagctctgttgcgatgcatcaaactgtgggctaggaaaagaggacttcattgtcatgtatgtggtttaattttctctgctaactgttcagtagtccaactatatgaaattgaggtcatcattttggtctaacaatgtactttttgtgccgtgtcattcagtatcttggcttctttgctgggattcatttagcgatccttgcggcttatgtctgtcggaaatttccagatgccagtgtcaatggtttgttcgcagtgttctttcagacttttgctcactggccttggcaagttccagtaagtctacatgatgagccaactacctccttgcattcagaggggcttctcatgcccatagtgatgccttgtaccccgccagagttttgtgtgtccaatgtgacaagaggcagcttcaaaaaaataagagaggaacttacacgtggttatgctttgacaagggtgagtctaaaatcaatttaagttattttggtagtaaaggatggattcaattaaagtcaagaaattctctattttccaagttcattggagcctgatttccaaaccggagtgtcatttgatgaattattgatttccatacagatctaaattagaatatttgttttcatacggatgattatattattcaagagcactgggaactgttaactctcagtgctgaatacataactggaaatatctgtacagaattatgtaaggcaaagcactcttgcatatttgttgacattattcctgttcaaataattagtattcattcaccctagtgttagtctgtacttccttggcacgtgagactgaccatgatttccctcgtttcagtccattttgtatatggattctcttggaggtttaaacaatttttgtagtttattcaaatttcggtgtgcatgatcatttcgaagtgagattgcagttttattctgggaactttgttggtggcaagggaatccagcccctttttgcaagtatgctttgagcatgcaactaaaaattctctcttgttgcgccatgctgtatttctttttatgattattagcatacatgtgcatattattatgcacaactgtttatcacttaaatacttgggtgctaatatttgatcaagtaacaagtccatatatctttgtttcaggattcattgagacatgatttccagtggacctggctttttgaaccctttccatatgataaaaaatatcaacagtttcttcgcattgctttatgtgcgccaacatttgccgagctacgagactgggctggatgggtgaaatctcgattccgtctcctgattctaaaggtactgactgatgcgactgttttgttctttcatcgtgctcttgctgcacaatcgcatgattctttaattgctggaaatgttgaacaagaacatacaaactcaatcaagtttcctttggttctgcagctggaaagagctggcattgagtgtgatccatgcccctcggaggaagttgatcatacagacaatgaccctaacgtagtcttctactggggcctcatccctgaaagaatcattcaggttgacactagctccctgaaagaagatttcatggaaagcatcaccaatgatgtctatggcacggtgaagtgcacgcattcagatgtgacaatatctgtggttgggctgccacagttgccaaagagtatgcgcagccatgttcactggcagtacatgcagcgttgtatgatggcctacgagggcacagatgaaggccagagcgcaggttggctaggacttggttagatcgtaaccaggactgagagggacatgttcccattttccacggcaaccgtgtacagagttgatgaggtttttttttcttcccctagcacagggatccaagatcatgggctgggtattcttttgagctgaggggggatgcatgagtgcttgtgtgctcatgaacatcggatcactgaccagtaaaagatcaaagagtaggtgtatagcattggcatgtaaaaaaacttaggtctgtcggcgcaagtgtacatttcttctgtgttctaactgttgctggatcctgattcattgaaattttgcaatggctaagatgtgtatatataattctgggtagcgctgcatcgtctcctatccgtttcttcctctcaacgggagtttatcggaattctgttatcatcagaattgggtttggctggatgccatctgctgcaataaaagagatttgccattatgaaaccctaaaccctccgtgagactgaactgaacggtaatacgtctgcaaaaacggatcggcagaaacaaggtttgcagtagtcattcaaaagccgcgcggcgcgtacgtggaggccggccggccggccgggccggggatcatatgatatggcgggctagctcgcttttagccatgcttgtcgcgcgtgtgcatgcttttgaataaacatgcttgtcgtgttatgggcataagatttcactcaccagccggacacaataaagtagtgtcacaaaaatggtctttttgccaaagtgttcgatgcaaagccgtcagctcatcagcgtggatcgcatat

SEQ ID NO: 4221 - DNA, 8056 bp, Sorghum bicolor
tccttccattttagtatgttcttctgcgatgtctgatgcttgaattggagttatcttgcttataaaactccgttcgtgtgtggctaattccccactttaaacatttttttttatatttaataataataaagcaagaaaatatgatgcttaattttcaaataccatcacacgtacagttttttttcacacatctcagctgcacccaggtgagaaaagacggtccagtaatgagaaaactgcgacttctaatctcaaccgttcattggcaattacatttcgtagtatggtcagagtaccaagataagactgatagcaatcaaagtaataactacaaatcacacaaaatgacaaaactgtagaggttaatcaaaagccatacaattattatctcttatactcttcgaaacataaatgaccaaatgtgttatacacccttttattgccgattgtttatattgtgaggaatgagcattgtttatattgagaggaaaccacatctgagcttcagtcgatttggtcgttgcaaaaacaaagatgataggaattcaagaaatgggctaatagccaggggcggatctgcggcccaggcctctagggcccaggccctagtcgttgggccactagcactctatagcccatatagattttaggctaataaagccacaaatgaatcccattacgaagactagtagtctcattcatgactcatgagccaccacgaccgtgacttcatcagcgagaccgtcagcgccgccgcccgccagccctccaccttgccaccccacgtggctcgctaaccctccaccgtgccgccgctcgccaccatgctggtcaacacccgacctgcgactatccttctcctgcagcccctaccaaccgcctaggctcggggtgcgcaagaacccatggccggacggcccaccaggccatcaccgggcgctggctggcggctgcggacgctagacggccaggtcctagggcgtagccccgtcctccattcttccctccttggctcctccgctaatagcctctagcctagtactgctcccttccccagaatcaattactacttaattagattgaaaactgaaattagaaacaacaaaacatcagatcaatgagatattaggttattggttttcatctcatcaggtgtaccgtgaaatgttgttagcaattttagttcaatcaccagatcaattagaaattttatctttgtcttagttatttatgtttgtggctcaatgactgtgatattaataggcttataggctcctaccgagtacgatagatgtaggataatttttttcacctctagatagaggccctagtcgtcagtaaattctagatccgccactgtaatagctataaactaaagtcatgtcaatgctagaatgggatagatcaaaaccttgaaatatttaccatcatgcaaagtaaacagataagcatgacccataacccggtgatgacattcacatttgatttaggagcatgaaatctttggcacacaatactcttgataagagtgaacatatcccccttcaatatttcacttaaatagctattcaaaaatatcactttattacatcttgaggtaattttcccaaagcggaatgaaaaattacacacatgaaataaaatactaaaaaaggggaattctggcagactctaaaactctgcacatatatacagtaggcaggtggggagcaccagctgtggaaaaaaaatatatttgtcaaaaatagcaacaatagtgctgggccttggcctttcatgggcccattctgccattactggattagccgtgctcactgtgctccgactgccaagacaagcaatgttgtcagtccactactaaggtcaggccgaggccgaggcccacttgttggtgcaagcgcagccttgggcccaacagatcacggcccaaccctgcccaccaacaagcgccgtctcgacatctccagctagaagactagaagagctcctcctgatcccaacccgcactcgcccaaaaccctactgctcccgctccgctccgccccgccccgccccgccccgcccctgcttggcctggccctgtggttcctaacactaacaccaactcgccgccgccgccgccgccggcgagatctccgggtggagcaaacgaggcaaggcagcagccatgtcgctccgtgtgctgaaccctaacgcccaggtgctcaacaagtcggaggcgctgcacatgaccatcaacgccgccaagggcctccaggacgtgctcaagaccaacctcggccccaagggcaccatcaagatgtaaccttccggtccttcctcttccctctcctcccgccgccgccagctcgcacagccctttaatttgggcgtgatcgctagatcaccctctggtagattcgctgggccgtagggtttgatcctatgtttttcgtgcgggcggtaatggcctaatgggtcttggtttcgtggtgtagctgttcacttgtagatttgagatgcaaagtctccccgttgttttgtgcttctcgtttggttggctccgcctgatctatattgcgcgtggcgatctctgattggatctccatttggcagtgcatttgcttatttgtaacaaattggtcacatgctggttttagctgttcagatttagtagcggaaagataatctgattttggcaaaggttgcttacaatttgttgccgtttggtttgtgcttctcaggcttgtgggtggagctggtgacctgaagctgactaaggatgggaacaccctcttgaaggaaatggtatgacaccacctttcacagaaacattctattgacatcctgatgatattttacttggtggtgtttttcttttctttgatgtcttgtgtaatttattgcagcaaattcagaacccaactgcaatcatgattgcaaggacggctgtggcacaggatgacacaagtggtgatggcacaacctccactgtgctttttattggggagctaatgaagcagtctgagcggtgcatagatgaaggtattttgttaatttgttctaggaacatgtctaatcttctctgggtttggtgtattgatttaattttgtggtttctgaaacttcttttactatatttgagatattatgttggcatttagaaaattaatgtacaaccatatttatacctatatataaggtgattttgtatagttacacatcatttcattgaattgaggcaaagaatgggtgtgcagcgtaagtttttatctcatcagacataaaagaaatcttctttccgggtgaagctttgctaatggtttagggatgtcacatgattctcgtattgcatgtgatgattcatgacaccccattaataatattttgatcttggcagtcagtctctatgtttaaaggttgagagcaacacaaactgaacattctcttttcttgtaaacctgaaggtatgctgagatgttcttgtgcagctcatcttgtttagggaacatttgtaataccagtttaacatgggttattacataagttagcaaaaaaataatattctagaaagtcaaggttctactatcttgcggtaggagagctgtccttttggatgaagcctttttttttgtaataatctaatttctataattatattgtaaccaattattattcttgtaggtactcatccaagattcttggtcgatggttttgatgttgctaagagagcatgtcttgattttcttgaaaagttcaagacgccagtcgttattggtgaagaaccggacagagacaccttgaaaatgatagcaagaacaactcttaggacgaaggtattacagtctttcatcttccatgtcagaagaaatttacctgtttgccactcaagttttacatggacttactatattgcagttgtatgaaggattggctgatcagttgacggatattgttgtgaatgcagtatgtttgatgtctcttgtagttcttctgtgaaacgtttctatacctgtccattttgaagcatatttgaattttctgtataaaactgttataggttctgtgcatcagcaaaccagatgaaccaatcgatctttttatggtggaaataatgcacatgcgccacaaatttgatgttgacacccgcctggtacatattcatttcttctcattccaatatatggcattgtgctaaatttcagtctcttcaataaatggcttggattaacatagcaatgtaacttgataatggtatatgtggagggatgtcaaaactttacaaatgtgccatgatattcttgtaggttgaaggtctggtcctggaccacggttctcgtcaccctgacatgaagcgcagggcagagaactgttacatcttgacctgcaatgtctcattagaatatgagaaaaggtgcataccagtacagcagtgttatgctttttatgttttggttttagtattgcttaattaattatttgattttttgtgcgctgaatttgtttgaaaaggtatttggagcattttttatgtgattaatagagctatacatattaagtttcatgatcgctgccagccatgtttttgttggattggactgtagaactcaagtgtccatgctcccttttataattgtttatgtaaacctctattattgtacttcaatttcagctcttaatttcgcttctgctgtgaggcaaaactgtaatcagtaaatagggttcaagatgcttataattattttctgatttttcatgtatagtggaagccagctgtcttactgacatgtaaactttacagtgaaatcaatgcaggatttttttactcaaatgcagaacaaagggagaagatggttgctgcagagagacgccaagttgatgaacgtgtcaaacggattattgagttgaaaaataaggtaatttgttttgtgctttgtgcccagagtctatttttgccatatgctgcattattgtgggtaaattgtcctcatgtttccttgcatgcaggtttgtgctggaggtgataaaaactttgttgtgataaatcagaagggcattgaccctccatctctggatctccttgctagagctggggtaatttctactctgacttctgctggttccacgatcaaatttaatttgcaaccttgaatgaattgaggttttcattttagaacatggatctcatgaagttaacagttgaaataggcattgtctgattaaaccatgccctgaaacgatcatttatggtgaaaaataaacaaaaaagtccatgtatcaatgtgtctttagtggtccttcctgtaggagaactgctaaaagctgtgctaaccaaaccagctcggacttttattccaatctctatctatatattttgagttatggcaatatacatgtgttgactagattcatcttatcttattatagttttttgtactttttaaataaataacaagatattagtggtcaacattttggtggctggcaatgtctaaaaaatgtatttgctagtcgagagtaagctctttgcatggaagcttattaatagcatgatctgtgttgtcgaatacttacatccattttcctatttggggcatgtgaactgaaatgattttacagataattgctctccgaagagcaaagaggagaaatatggagaggcttgtgctagcatgcggtggtgaagctgtcaattccgttgatgacttgactgaagattgtctaggctgggctggtcttgtctatgagcatgttcttggagaagaaaagtacacttttgtggagaatgtgaaaaacccacgctcttgtaccatactgattaaaggttggtttatacttgagaaacaacatgtcttttctgatacgctaattgagctgtgaattgaatatagtttgacatattcaggacctaatgaccataccatcgcacaaatcaaggatgctgtccgtgatggtctaagatctgttaagaacacaattgaggatgaagcagttgtgctggtatgatttgtaaatttgtctgttgtgaaaggtagcaggagttaggaagaagattttgtggcttttgttttgtgttcatcattgttgactctgacaaaagtcactagttctggctggagttattgtgaacttagtcaagtgtgcacaataagattgattaaacttgcaacctgcttagtgtcaacttcataatatttctattgtactgaccttggtctgcatcatcctttttactatcacgtgcgaacttgcattttgcttgaggcacgttattattcggatcaaggtttttaatttcgttatcgcaaaaatttcggccaccaccgaaattaccgaatttcgcgaaattcggccgaaatttcgccgaaatttttttagagactaacacatgaagtatgcttttatttttaaaaaaattagatctaaacaagtatcaatatgatttatgattacattacacatctattgaatagaagaatatgcactataaagaatagaaaatatgagtctaaagttatatagcacatgtattagttataataaaatttcggatttttctttcggccaccaccgaaattaccgaaattcgcgaaatttcggcgaaattttgaaccctgattcggattggtttcagttgatcagacagccattgacttctgcgagaaaaatatgttcatcttatcatttccatcgcacttggcaaatgtagggtgctggtgcttttgaggttgcggcaaagaagcatcttattgacaacgtgaagaaaaccgtcaaaggagtaagtgcactaaaacactggtaatgctttattacatttaaagctgcaatatcaacatgctgctaatactgtaaccttggcaacagcgagcacaacttggggtggaggcgtttgcagaagctcttcttgttatacccaagactttagctgaaaactctggtttagatacccaagatgtgattgtttctctccaggtatgttaagatattcgccccttgtggatgtttcactttgtttgaagtttaagtcaggaagttcttgactatttttctttgttttcttaagaacgagcatgaccgtggattagttgtgggattgaaccatcactctggggaaccgattgatccccagatggaaggcatctttgataattactctgtgaaacgccagatcatcaactctgggtatgtgatgcagctgtcggcttttgtgtttctatgttgttgtagctatgctttctaaaacatccttgatgtgcaaactaacatttttttttttgtctttgctgtagacccatcattgcatctcaattgctgcttgtggatgaagtgatcagagcaggccgcaacatgaggaaaccgacttagatgtttgttggcaccgagcgtccgagccgatactaatttgttgtaccttttgtttttgttttgtgcttagtagtgatctggatgatacatttatggcttcagttaggcccatttcacgaagcaggttgcattctctgtcacttgtgccctgaaccgttgcctggaattttggattgctgcgtgcttatatttcaagatgagattttagttttatcgatggtctgcactttttgcggcatacattctcctaggaactcggtgtatgtgataatctaggctatggctccaattgtgacaatgacagaccatgtgcatgtaagcgcgctacctatgaaactgggtgtaagcgcgctaagattgctttagcaatttattcttatctagcgaaaattatcttcagtcatggacctattgtatgtctatgcatgtgtatgtactgctataatcattatctgcctacatttttccgtccaactgttagtctccagctgttgcatgtgtacgttttagtcgtgaatgtgaataattttttggttttccgtgtgttgtttctctattcagtgtttcacaagacaagacccaaccatttaactcaaacctgccagttttttttttgggtacaattacactgtacacgcgcacttagtttcaaatttgaaaatcaaagccacgcttacagccaccattaatcatacgcatatgactaaataaa

SEQ ID NO: 4222 - DNA, 5549 bp, Sorghum bicolor
cctacatgttgttcttttgttatcaactttaaagaggaaacaataatgctactaaatgatgtatgtttgagggtagtcatccgagggcgaccaattaaaagatcaattcatatgtggtctttgtgttattgctttcttcaggttcgtgcatacagacaagctctatatacagtagcaagaatgtttttcattaaattattacaaaacctcctaaaaatcagcaacatcattgtgaatagtctgaactctattttttatttaatctgcatgcttgtagtcccactaaaataagaaatttgtctaaagagggagggagagttcatgcaagtggagtttaagaaacctgcacgatagaagactcgcattcagtggtcctacaactatatgcaccctagtgaaaaatgtcaaagagccaataccttagtttgtgatttgcctgaagcctggaactctaacatcgatcaccgatcatatcaggctattcaaacagaacatacaccccatcttgacaacaacccatttaagatttaacatggtcggggatcatgaatcatggaaaaaaaataatagaaacaagacatggacatgtgtagaccattgaaaagaattcagcaagtcatcacttatatttatactgaatattttcttaatgtttaggtctaggactataatggtatttcacaagggaaaaatgtattggatgggaaacggtaatattccacttttcactgaggacattgtcttgcttatattatatgctcagttcgggagatgaagaagttcattacatgtgcacaggcaatagtaaaaaaaatactgcttacatagttggctatcgcaaaacagctatgtcaaaagctctcgcgcgctagaattcggccacagctctgaacaacagtaggacgcaatcatgttcaaacatttgaaatgcatggtaaatattaggatattatctttctaataaaggtgtgcagagaatgcaaatatttaaatattttctagtgctgagtaaaatatttagcagtagtactctttagcatttcaattttaaagaatcaactgtaagcaagcaaggaacccaattctaaatcccatacctcaagatgcagaaaggattgagcctaggcctttcctcagtggaataccacctacactgcatccagaagggcttgaatttgatgtccaaaaggaataccatcaaacacctacacctttcaaagcttgttgcacgggacggattctgaatcaaatgattctaggtgagtacataaatggtccaatacattaacatcatgtacgactcatttcagaaactcaagtagttggtgaagtaatgacataaatggtggcaaaactgatgcttaatagataaataaccatagagtgcaaacaatatatattaaaattcaacactaaaaaaaatgccaatactttaggaaacaaaagcaagtacgctgttgttggcctataaaagataatttggattttggaaaaaaaaaactaaaaagaaacttctgaatgaaacatgaactcagataacccattactgtagtatgggcagtataacattgcccacgtattaaatcaaacatttagctatatcaatggggatttgtcacattgcacatttcattcatacacagaattgaaattgtgtatggcacactgaagcataaaaaatagatgtaagatttctttattcctcaaaatgtctagcatgaaaagaaatgttatctagaaaaaatgccaagataataacctcaaagcctaatcaaataaaggatattagtgaggtaatctctcgtagcctctccttccagctaaaattctgccgaacttttgccaccaaatgtcttgattggtagcatgtagcccacatcggagagctagcttcaatagattgtgctctcaaagaaggcctgcatcaacgaattgtaggagaccgcaacattactgagcatcacattggggagaaacgccaggttggaggggagccgtccatgcccctaggccgcaccgccactgggtggaatgcaggggccgctgctgccgcctccatggaacacagtcctcatggggctcgccacgtgcgtggccttggggtgccctccatgcgggcgagcagctccgtcgtggggcgtcgtaggcgagagcagcgggtgatggcgatggtggcggtggcaggcgatggaggagcgagtgcgacacacgatgggatcgggatttgtagtggggagctgccgagctgtgacaaatcaatatcaataaaaacaaatcaatggccgcacctagaggaagacaaagaacttgaagaagctcgacggccgcgcgcccaacggcgaggacgacggcgcgggccgcgattgcgctccggggactcgcgtagggagctgtcgagctgtgcagcgttgggaagctgggcgacggtgacggctagggcgagggcgagggcgagggcacaggggcaggggcaggggcaggggctacgatttcttggagctctcagctgggcgcgtggccaactgagagggcgacggcgtgggcagcgattgcgccccgttgcctcgcgcggggagctgcggagctgggcggcggcggcaagggcgcaggggtcgtggtttcttcgaggcttggagctcaggtctcaggtggattggatctcaggcctcaggtagacgacgtgggcgcgttaaccatgaaaggggggtcgcaaccgaggggtgcgggggcgggagccaagatcgcgggaggggggcgataaccgcccggagacgatgaccttcggcttgtagagatttagatcctgcggccctcttccttacctttgacagctagcagattattttttttcttcttctttgcagcaggttccacaaccgtctctcttgccaagatcgactgatcgatcagctgcttgccatacatatatccgtgcgtgttccgcgcacgagagcgcacatgattggcgtggcttgagttgaccacatttgcgctgacctcaacttacggcaacagataatgcagtgatgacatgcaaacttgtttactgcattgttcagaactgcagattaacctaatctaatctcgtgtatacagctacgtactataatactaacctaatctcgtattacagccactacgctatcctctaccccgtattgtagtattggttcgaatatattgtgcttcgtgcacagtttaattaaccacatcgtcgccgtgtgcacacaggggtttaccgagcatactactgtagtacaaaattgcagctaacctgcagcctcgtgcagaatgagatgttcaaacatactgtactgcatgcatgcagctacagcaagcatggcatgggactcgatcagcagcgccgcaccagttcccggcactactccagtagctcgtcggcaaaagatgctccggctgctcgccgtcgctgcggtggccgtgtctccctgtcgagccagctggtgccgctgccctccgtgagcaggtggtggcggccgttctccgtgccaccgcagacagcgcgccgagcaccaccaccagctgctggcaaagggacaacatcaacatgcatcatgttcaacttcggggactccaactccgacaccggcaacctcgtcgccggcgcgggcttccggctgcaccgccccgtggggcgccgcttcttcggcaagcccagcggccgcttctccgacggccgcctctacatcgacttcatctgtacgtacgtagtacatcatgcatgctctgacgatgatatatctccgttgagtttgcaacatattgattgattgattggctacgtcacgtgtgcatgcatgccttgacttgacgcttgcattgacgttgtgcgcgcgtgcactgtgcaacacgtgcacgatcgaacgatggtgtcaggtgagaggctagggctggatcacctgagcccctacctggagtcatcgggcgtgagcttccggcacggcgccaacttcgccgtggcaggtgcgatgaccggcgccggggagtgcgccccagccagagccagttcagcctggcgacgcaggtgcggcagttccggcacttcaagtcccggacggcggatctcctcaagctaggactcgggcccggcatcaccgtggaggagttcgagtgtacaccttggacatcggccagaacgacatccaggacgcctagccttattccgcgccaacctctcgccggagcgcatcatggagatcgagcatcgtcccggccatcgtaacacgacggattagaaacgctctcacggtaccgtctcgccaccatgcatatggcaaggcaattggcaccaaacgcctgcctctctgcctcgtcgtacgttcttctttcgttcgtcgccatgcacaacgacgacacggccctggcttcctgtccaatgacttgcatgcagatggtgcacgaggccggcgggcgcaagttggtggtctacaacacggggccactggggtgcctgcccagcacgctggcgcggcggcgaggcgccggcaatggcaccggcgagcttgaccacgcgggctgcctcgccggccggccacaaccgcgtcgccagggccttcaacgcgcggctcggccgcctctgcagcgacctgcgcgccgagctcgccaacgccactgtggtgtgcgtcgacatgtacgccgtcaagtacggcctcttcgccaaccacacggagcacggtgaggccggccgccggccggatcatgtagcttcgtagtgtttccgttcaggctagatccggcgaccgagaaagatccgttcatctgtctccatctcgtggtggtttcgtcaggattcattgagccgctgacggcgtgctgcggcgcgccgtacaatacaattacgaggctgggaaggcgtgcgggagccccaaggtgaagaaagcgtgcgccgatggcgaccggcgcatcgtctgggacgggctgcactacacggaggcggccaacaggatcgtcgccgacaaggtgatgtcagcggagtacagcgaccctccgcttcagctgcaaacgctctgcgactctcacagattttgagcacaccaaacaattaatgtaacgaaaacatcgcgtgccgattcatcccgttattgctgcagacgctgcaactgacatgaccaacctcaactgctgattatccaaggagctgctatgttcgcttgagcttattcaacagtgtttttctctcacaacaaatcagcgaacaaagaccttcagccataccctagtagtatgaactagcaggttagaaacaacattcagagtacataaatggatagaataatcattctcctaacagcaaaagtgagcaactgagatgcaacaataccaacatacactagtaactagtactgtaaccaatagaagactcttattactctcttcccattctgcccccatgtcccaggagttacatttaggactaaatctctaaccagtacaaataacaaaagctctgaccctgatttctctaattattattgctaacacacccttaaatcaccataacttacaggattgacctacttgtacaccat

SEQ ID NO: 4223 - DNA, 6213 bp, Sorghum bicolor
tctacctttaatatgtgcaacctagctaacgtaatgaagcacctagaatcaaagcctactataatgtagtataggcaagtgggaaaaaggaatctgaatagtagcctatatatagggcctgtttggcatggctccaactccagacagagcagctccactctagaaatccagctggagccagctttgagtggagttagaactgtctgttagaggtgtttggctaaaacggtactcaaagctccaaaaggggatgaaacatcatagcatagagatggggatgttgcaataccttgtaggattgatggagcttgcggggacgacggaggggccttcacgtcgcccttcttctccttcaacggcgagagaggtggaggcactcttcttcttcccctttgtctcctttagggttagggttgggggattttggcaaggttctgctccttctcgtctagactacggtgggggatgggggcgggagggtcggcggtcaggaacggacgggggagaagaggcggcgccgctcggcgagctccctaggccgcgcatggcggcgcgtcgccctctcgggcgtgggagctgcgcgcgaactgggaagcccggagggagtcggggtcggcgctgggcgctggtggactgcgtgaaagcctggtggagaacataacaaaaaaaatgattcgagggctggagtgtgtaatcagtggcaattgtgggtaatttcatcccaactccatgtctacttctatttttggtatgttctagagtaggagaagaggtactccgaaaatttgtactagagctccaaaaactgcatggagttgggatgctccaaaatttttctggagttggggtgtttggctagctccatctgactctggcatggagttcagctctagagccatgccaaacaagcccatagtagcgaacccagaggaatggaggagcctagacgatgcaagtaccaacctctagtacaccaccctctgcccctgataaccatactcaacaatgggtcatgtatggacatgagagaagcctgagcaagggcctaacgtcgttggacactaggtccacccttgcctttactacctagcccacccttgcctttactacctagcaaatcggtcaaattgcgacctcccttgctactctttaacatattttttgtttgtttcatataacaatttgaagatacggaagataagcaaacatagtcaaattcgataaatccagtttgatgaaatatgttaagaaaaccctttatgtttagaagaatgcaatagcaaacaaagtttagaatggagtgggataccgttatgggaataatgcgatagtaaccgtacccacggctatagctatattgattcttcctcaatcctatgtgcttaattatagaattttctcgaccttgtcggcctaaatcctaccacacgggataggttctacattcaggcttcagtagtactgttacatgggtcgtccactagtacagcttcaggagattggcatcaaggggttttgttctcaattaattgattgttgtgtatcctcgatcggtgaaaattccgttaccattcaacctttgaaatctaaaaatcttatcttgatggagttggcaaagagaacctgaccccatgaaatattaggcgaataaaaaaaaaagagatgccgaaaaaaatcacagacgcacaagcatccatcgtcttgtcttttatttatatattatattattaaattaaagaaaaaaaaaaccctgttcgatttccggccaagagggaggggatgggaggacgataagcgaagcgaagcgaacggcagccagtggttttggtgtttttggcacggcccatccgattctctcctcaggctcccgggtccgcgggtccgggacccacaaccagcaaaaaaccgtcgacggcgacgttcccggctgccggctccaccgtccccgcgtccgccgtgctctatccgccccgcgcgcttctccgccaaccaaaatccccggcgccaccctccaccaccaccacccacgcacccttcttatctccatatcatcccgcccagcccgcgcctgcctctccctccccacagactccacagcgcccgcgccagaagccaaaaccctcccccgccccctgcaggctgcaaccgcaatgtcggcggccgggacgctctccggcggcgccgccggtctatccggcctcctccgcctccgccgccgggccgcccccgcccccgcgatcgccgcgccgtcgctccaccccgctgggaccatcaagtgcaccgccgtgcccgatgccgccccgattgtctggggccgccagctccgaccggcgctcctcctccccgcggcactgctcccgtcgtcgcagcccgccaagaagcacaatctgcgcccggccgccgcagccgccgagtccgcagggtcacttactatactacttactacttaccaccactggatggaatatacaatatctccttcttctcattaattaatgatgcgaattactcttaattaattgcttctactacctactactgctgcacttgcactaccagtgtctagtagagtatacatgtatgacaaaggggtatgctccttcccaatcccacccacaaaggcgactgaaaaacagctaccgctatctgcagttgcttactgtggcatttcactttcagtttacaattttgcaccgcaaatcatcactagtagttgtagactagtagttcccttccaaatcataggacgctggtcccactcaccaatcactcgtccctgtagtgtgaatgtgatgtgatgtcatgtgctgcttgcttgcttgcttgcagctaatcagaattagctacttacatgcttttgatgactatattactgacttcctaatccgctcgcgacagggaggccaagggtttcctggagaaatacccggccctggtcaccggttttttcttcttcatgtggtacgttgcactctcgcactcgcaccgcatctgcatctcacgttttcagctgcttggctactttttcgtcacctgtctaaagatcgctacttgggcatgtccttctgcaggtacttcctcaacgtcatattcaacatcctcaacaagaagatctacaactacttcccctatccatagtaagtaggcagcccctgattcacaagtcaggaccaacgacattcagttctcttgttgctttcccctttaccatcaagttgtagtttatgatggaataccataccacttgttgcagctttgtgtccttgatccatctagtagtgggtgtcgcatactgcctcgtcggctggagtgtcggtctccccaagcgagcggtaatttgtactgcaaacctgcacatcccctccctctttaattaaggactagtacttcctgcaacttgacctctttgcctagtgaacaaaagggtttcttttattatgtaataaaaatatgtagtgccatccagttatttccttatgggaacagatgaatgtatttgtgccattacttgagcacagccccttcacggtttcacctaagggaatacatctttttgtgccatcttgttttgtagcctatcaatgccaatctcctgaagctgctctttccagtggcattgtgccatggtattggtcacgtcactagcaatgtgtccttcgctgctgttgcagtctcatttgcccacactatcaaaggtacttcttttcctcccatttatatttcaatgtggattcttcttgcccctgtcctgttcactcatgtttctatgctacatacttgcaatgcagctctggagcccttcttcagcgcagctgctactcagtttatccttgggcagcaagttcccctctctctgtggatgtctcttgcccctgttgtcattggtaattctcaattcgatcctctcatcctaatgctctagctaagttgcaagttacagtatcggtggcaaggtaaatacaatatatgacaacaagaaattaagagtgccttcatctgatgggtgcattttcctttcctaattacccattacttctatcttgttcactgggctaaacaacacatactatctgaattgtacattcctttctattttaatcattggctacaagttaattagacgtatccttcttgctcatcctctctgatcacatgaaattaccaggtgtttcaatggcatcccttactgagctttcgttcaactggactggcttcatcaatgccatgatatcaaacatctcattcacttacaggagcatttattccaagaaagctatggtttgtgcttcttctgttttaatctcttagctagttatgatttgctttactatgctatggactcttgccttaactattgtgctaatcgtttctggcattgcagactgacatggatagcaccaacgtgtatgcttacatctcaataattgctctcattgtttgcattccacctgcaataattgtaagtgtgatggaattaccacaagtagtaaaaaataggatccatgtgtcatacttaattgtattcttgatatacttccataattgtgcagtttgaagggccccagctaatgtcgcatggatttagtgatgccattgcaaaagtaggtttgacaaagtttgttagtgacctagtcttggttggactgttctaccatctgtataaccaggtaaccagttcgtcatatcatgcgaatcatgaaaacacttttatatgaatcacctgtttagaattttagctggcttgccacataaagtcatggtattatagtagaacatggctgcacaatattttcttccccatgcagtatttactgatctaccatttagttgatcatgaggtcgaaaaaaaggcttgcagttttatcgtgaaccgtccttcatctgttataacatgaccaatggtatcatgggctcatggtattgcagattgctacaaacaccttggagcgagtggctcctctgacacatgctgtcggcaatgtgttgaaacgtgtttttgtcattggtttctcaatcgttgtttttggtgagtgaacggtttcgccttctccaggaaatgaacaattatttattttcctgttatcatgttctagctaacactcgctaaacctcacgctgagcaggcaacaaaatttccacacaaactggaattggcacgtccattgccatagcgggtgttgctttgtactcttacattaaggctaagattgaagaggagaaaagggtaagttttcactacattttttgtcactaggtcctcaatacatgagcacatgtatgtatcagtggaaacatggatgcacatttcattgctgactgatagtgccatcttactattttcttaaatccagaaaaagagcgcatgatgaggtgactgctgtgaatattatcgggtggctgagttatacctcctcggacacaacatcgtcgacaatctcgacctacttctatgccttgttttgttttcatcttgagtcagttggtccattgtttgttcccaatctggtgattaactctgcaaattctgtttgtggaattggcagtgatacaaatttcggttcttaagtaaaactggttgctggtactggtagacagtggtattcgcctgtaacttaatggatgcttggaataccgggtgtaccgtaatacaaagggcacaggactctgcctgactaaataaaacggtgaactttcaccctgcttcgccgtaaccaataggtctcatcgactgagctcgcgtgaactgcatccgtcaaatactcaaatacatgcctaccccacatactcccttccagaaagaacaaataagaggaatctcccttcccgaaaaatcaaataaaaccaagtttgactagttttaaatagaaaataatattgatatttgtatcttcaaataggtttgttataaaagtatactatatgattgatcattgatctagtgatacttattaggtatcacaaatataccttttgtataaatatttagccaaactcgaaattgattgactcttcatatcaatttttgtatatagtcaaatttgtaactgtttgctcttcgataagcaagatttctattcattttttggaagagagtaataaaattggcaaggagcgttaaaggtttcaaattttagagaatataaccctgcaaggatcagtaactatttgtgatggtgcgccgagcataacttgttgttagttgatgactcgttg

SEQ ID NO: 4224 - DNA, 6933 bp, Sorghum bicolor
tattgattttaaaaaaaattatatagtttcatgtcataagatttatatttttagatttattatgagaaatactagcacaatatataattcatacattatcaaattataaggatttttaaaaatggttggtcaaagattgcaatgagacaaattaaatatgacatttacacggaggaagtaagtatatctttatttagttcccaaatttttttgcaaaatctttcagattcttcgtcacaacgaatctttggacgtatgcatgaagtattaaatataaacaaaaataaaaactaattacacagttcacctgtaatttacgagacgaatcttttaagcctagttagtctataattggataatatttatcaaatgcaaataaaaatgctacaatgtctattttgtaattttttttgaactaaacaagaccgtcgatatcttgtattacaagtaatcaccatatcccgttcagttggacctcttctttatcaggcttagcgcagggcgagggtacccggggtctaataaaccaacacgtcacgagagctgagctaatgggtgcggcgtccggctgcgagtatggctttttattggagcgaagcaaggaagaggtaagactatcagtttaatattttggtgaagtcactcaactggattgacaataaccaaacacctataagtcggctacactaggctagccaaagaaaattacatcaaaccaaacacttcaacatacaaaccagaccagcgagtctaacaaccaaacaaccccgtcttagctatgtggggacaagtttggcctgacctagctacattgggctagccaggctacttgaggctacaaaccacccacactcatagagtcttgcctttactaaacctttttaaaatcttttatttatacggttatcagtgtcttgatgatgtagagattaaaagtgttttaaagtctttgaatcgtcttaacgtgacgatcttgaaactaataagatttatttagaaaaaacattttttttataattaagaccttgtttagtctattacaaaacctttttggtcgactgtagcacttttcgtttgtgtgtgacaattattgtctaattatggactaactaggttcaaaagatttgtttcacaaattacagacaaactgtgtaattagttattccctccatctcaaattataagtcattccaagaatctcggagagtcaaagcatctcaagtttgactaaatttatttgatagaataataacatttatgtttgaccaaatttatatgatagaataataacttttgtgatatcaactaagtatcattaggttattcattaattatatttttcataatatatttgatgccacaaaactttgtatttttttctataattttagtcaaacttgagatgctttgactctgcaagattcttagaatgacttacaatttggaatgaagagagtattttttattatttatatttaatgctccatacatgtacaacaagattcgtcgtaatggaaaattttgaaaagttttttgcttttaggaggaactaaacaaagcctaacctaaaataaaataaatctgggaatgtatatgtgactgtgactcctcgattggaaagcgatattcaattccacatacatctgactgatttcgacgcggggtaattcaatttgatttcaccattacccctagtattttcaggtagggaaggacaggataggaggatcccgggaaaatgagtgtcatcaccatgaacccaacggaaggaagggaggagattgggatgtgagagtgcccgtgcgtgccactcctccctccctccctccctccctccccctggtttccgcacccagcgcgtcctgcctttacgctttgccgtcctggcacgcaaggtgtcctccctcctcgtccgctccaaacaaacacgagtcgctgcctgcccggacttcgcttcccttcccacaaacctcccttcttccccttctcgtggcctgctaaaataaaaccaaaaccctcctcctgcttcctcggcacaacagccttcctcctcccaaaggtgcgccgcttcttcatcttctccttcttcttgattgatcgctggtttcctgagcttcttttctttttcccttttcctccgccgccggggattgtgggttgtggcttccgtatcctgatcctcatggtgtgatggaagaaggttgcttcgtttctttgattggccatggacgtacgcctttcgttttctcggtggcggaagcggaagcggagggggttgttgatcgtgatgcgctgctgctccagtctccagtgctcctgctgctcgatgctgacggctcgagtttatccctccggcctggcctccggggtctcgctctctggattattcctactttttttttcccctctttcttcctttttgtctcttgttgaattgaaaaacttggccttgcggtgtctcgcctcgcctccactggtcactggaccgagagcgaggcgagagagaccgacggacctggcgtcacgcacgcgccgcactgattgggctccatccaagctcggtcgctgccaactggggccctcaccgccaccagttcttggaaaacaatatgctacttactggaaagtaaagggagatacttgccgcgttgggattctccaactccaatcccaaccaagacgatcgatttcatcccaccacgctttttcttttcttttctttttttttaaaatttttggttcggttcttggtcacctgttcttcctacttggccagcaggaaattggatgatcaggtgcttctgtttgtttgtgcatcttctcttctcttgtttgcgcctgcgatcttggcccttgtggtttcatcagcaaacggaaagaggagcctttcttgctggtagttacaaccggtggcgtctctttctatgcaggtgcgctttgtgtgaggatccagaggcaggaggatggctctcaagaagttgctgcagctcttttgtgtcggcaagaaggattccaagaagaaaggtgctccagctcaccctggttttcagaattcagaactactagtctcattcgccttcttgattttccagtttttctctctgccctgtttcctctatcagcactggtttcctcaaatatgggcacatttttttttttactcttcatggctccatgacacagcaatctaattgtcggtccacaagttattgtgggttggaattgttagatagttttggctgttttgtttatgttgctctaccatctacacggttatagtttgaggactcaagtgtactgtgttccccacacacctatgaaccatacagatagaattttaggaacccaacaagtaggaaataagcttaaataaaggtgctatttttatggactagaagaactgtacaaatgatatttgatgccctccttttcttattggacgcttagatgcttataacaaacccagaatgtgctttagattttatacattcaccgggaaagtaaaaggtgatatcttgatataatcagggatctaatctgtcgatagcgttgaatgtgatgattggtatatatgcaagatgaacatatgtgaatcttatgttttcttcacttatactgaatgtttttctaatgaaagcataacctgcttatgcaggcaaatccattgacccactctggcgaggtactcatgatgtccagtatgaagcctagcatatgttcttgcccctgatatatattttacctcttaattgcatgatatgtggcctggaatcttttattgtaatttgtgttggtaccggtgcagtccaggtgccacaaagccctaagactggtaaaaaaaaaatagcttactgaataggatctaggacttgtgattacaaagttacttgttcactgagaaataaaagaatgcatatagatggtggaaaccttttggagctacctcctttgtagttacctatgagttggttgtgtagattcagctcaactgtgttcaccattgcagggcttgataatttttaaaactattatcgtattacttatatttaacaaataactccttaacttcagtttaagtaagcaaccaaaattcaaaactttgaatgggtcaggtaacttcttttcatttggaagagcggcacttcagatttgcaatttcacatggacagtagtacggtaggcctgactgagctgatgggttaaaacttcattatatataaatgctgtcacatatctctactctaagcctgaaatatatatttggtgatatcataatgcagttactcttttgtttaataatttgccttacatcctggatcccagcctctgcttccctctcctctgtgagtgtcactgcaaacaagactcatttggatccctgttcaagtgggactggcactgtatgcgtgcaaaaccatgaacctgaatgctcaagtatggtttcctcatgggcaaggacagagcatggaactgagagtactgatcatatgtcttttaaacaatttgatgttgtccaagatttctcggatcaccactatgcaaagacttcagcaggaaaggtatgctgtcatattgtgaacctcttttcagatatattagatccaaccacaattttcccacctcataatgtgtgaccaggtcaccaaagattgggtgaaggcaatccaaagtgaatggagtcttctacagaaaaacctacctggtcagtttatgctgattacattttgtttcctgttttcgccaaactgtcacaaactctagttacagataattcaaaggagacactatggtgccacacaatcataacctagcattttgttgacaattcttttccatagtaatcttgtcatgcaagcaacacgttcagaactaactattttacattagggaacatagagatgtaaacaatctggatttgtgaaatcatgtgcacttatgccactaatcacacatgccatgtctgtatgattgccattgaagcaaataatccttattcttaattggagaatttacacctgaaatgaactgatcttttgttgctgttaacatgtcatgtttgtacgattgacattgaagcaaataatccttattcttgattggagaatttacacctgaaatcagctgatctttgttgctgttaatttggatcaattcggtctctgttacgcagaatctatatatgttagagtttatgaggacaggactgatctgctcagggctgcaatagttgggccggctggaactccatatcatgatggcctgttcttcttcgatgtccgttttccttctgaatacccgaagtgcccaccagtatgtgaccacttgacaccatcctgcctcttgtattcatatttgtatagccatccgctttcttatgtaaaatctctacttgatgcgtgcagaaagtttactaccattcgggtggacttcggctaaacccaaacctgtatgagagtgggaaagtctgcctgagccttctgaacacctggtggggcaatggatgcgagaagtggggcaagtcgaattccaccatgctgcaagttttggtctccatccagggccttgtgctgaatgataagccatacttcaatgagccaggaaacaaaaattcagctcaaacaacagctggtgaaaggtattccttggcttacaatcagacgaccttcgtcagatcatgcaagacaatgctgtattcactccggaagcctccaaaggtgagcaaatacttcatctcttgatatagtagctgtccaggatatcggaaactgaatggatccatatacactctgcattccacttttcttacatgcctctctttccctgcagcattttgagacccttgtaatgtgccacttcctcaagcatgagcgtgccatcctcgacgcctgcagcgcttacatgtctgggacaatcgtggggtcatctgttgggagcgaccttaaatatgcccgtgacaagtgctttgcagatttccacaagtcactgacgctctacactgaacatctcaggactgagtttgctgcaaacagaagacgcatgcttgagctggagagagaggtgtcacctgcgcaggagatcgtgcctagcagctagagttcctttgtcaaaacaaacattgctaactgggaagtgaaatggtggttaggttgttgaaagcaagcaccccagtgttgaaaaaaggcttttgtatcttgcacaagagttgctctcgtcgtcagatattagctagctagctatttatggtgatgacacatacaattcattactagtagatgttagcctcattctgtatcggatctacttcattcatgtgacttgaataacctaattcatggcaattgtacctatccctatatcgagatggcctaattcttgaccatgtggctggtgtccgatacattaatgcagatgatgacatcttcagtctaatttcagataaattcggccaagaatcttctgaaatgcaggtgaattgggcaaaaaaaatatcataaggcatgtggattgggtggccataaccggaaaatctcattctccacgccacccacctgtccccattcctcatctccctcccatccgttgcttgaagaacattttgttttcttgcatctcgttgcttggagaacatttcgcattagatttacatgaatatgctccaattcacttgttctattttcaggacatataagctaagaaacaggggtggtgcaattttggagtatgaacaagttgcagcaagagataggttttggatcaaatgactattgtcagtgtaatatgacatgtagcctcctcagctaatctactgctgtattcttggtaacagtacaaacgaccagttttctcatagcttggtacagtttggtaatgctgtattaatggtaacagtacaaatgaccagtacaagtgactatcatcgtcaatatgtatcaa

SEQ ID NO: 4225 - DNA, 5989 bp, Sorghum bicolor
catactcctaatacagatttttgcctaaagcctacatactacatcggactttaacttgtacgagtatgactcctatttggtcatgataacctaaatacatcatgggggagctaaatactgtactctccaagacttgataaccattgggtaaggccttgtttagtttaccctcaaattcaaaaaaatttcaagatttttcatcacatcgagtcttgcagcacatgcatggagcattaaatatggataaaaataaataactaattgtatagtttacttgtaatttgtgagacgaatcttttaaacttagttagttcatgattagacaataattaccacataaaaacaaaagttctactgtagcctaaaattttttcgcaaaggaactaaaaaggcctaagggcactcacaatgcaagactctattacagaatctaagataattaattacatattatttatggtattttactgatgtgacagcatattttattgaagaaagaggtagaaaaaaaataagactccaagtcttatttagactctaaatccacattgttcgaggtaataaataactttagactctatgatatagtctgcattgtgagtgccctaagcaccaatcgtgaaaacaatttggaccacatgtagagtactatatgaattttgcaggaacgaatacaattcatacaaatatcttttaaattttctgtagtaggacaaagtcttggcaccttgcaaaagttgaagttcgcgttgggccttgtttagttccaaaaaattttgggaaatagacactgtagcactttcgtttgtatttgacaaatattgtccaatcatggactaactaggctcaaaagattcatctcgtcaattccgaccaaactgtacaattagtttttattttcgtctatatttaatactccatgtatgcgtctaaagattcgatgtgacggaaaatatgaaaaattttgtaaaattttctgggaagtaaacaaggccttggtttgcccgggctgcccctgacgacgctacagtgtgctgtggtgtgcaagaggaggataatgctcgggcccacctagtgtagctttacaacattcacatatgcaaatgcagcctagcccagatggattgcgtttgtttcaaatcgcttccgtttctgtccatccctccctgtgttcatgtccgctatgcagcccagctgcaggacgagccggccgctgctaacggaagcaaaggcagccgttacgctctatgccagcgtgtttagttggaagcttcaaaaacttgtctggccagacataaaccctaggcctctgattttatttagaaagcttattaagactagttccttatctaagatctaatttcattttgttgccttatctaagatcttcttccagatagaactaacttgattttgttgccttatctaagattttctcccagtgagacaagaaaagaactaacttgttcgctgatttttaataaattcagcagataagctcaaacgaacagacttagctacttcgtattaaggaacgttgaggccgattaacgatagaagaggactgaagtgaaaaaaaaaattttaataagatgggcaacggcactagacagtgctgacgttaaccgcaagacagcgggttgtttgaatttcaaaagcaagcaaccgctaagacggagaaggtgtggtgtagggttgtttgaatttcaaaagcaatcaactgcccctctcaacggcctaatcaccctgcctggcggcggcacagccccatcggtaaacgattcgaaagttgaggggtcttttcctaaaaaatcccctccccttcttcttcttcttccgtctcctacgctacgcctgccgtctttttcttctgctctgctcctgctcgtccggtcggaagtcgtcggaacccaagccctccgctccgctcccccatagccctcgtccgaggactagcgggatccgtccggttcggccaaggggaaggacctcgtccgccgatgtcgacccgcgccgcctcccgccgctcctcctcgtcgtccgcggccgccaagcgccccgcgatggcggagggcgccaaggcggcgggaaccgccgccgcgcaggccaagaagcgcgccgcgctcggcaacatcaccaacgtcgtcgccgctccggcgggaagggccgccgcccttgggaaggtcgcgccaccggtcaccggcgcggtacatgcggctctctctctctgtgtgtccgtcagggatcgtttgttgtgcggttgggggccctttcttttcatgcggaacgcaagtcattgcgcctttcttttctttctcggacccaggtgttcttgccctgggctgggcgggctcaaggtttcaatttactgctagcggttgttttccccccggttttcaactcaatcaactgtttcgaatccgcgtggcgtggcgtggctcttcttggtccttgagttttactaactgtaacttgagggatgaatcgagggcatttcccggtttctccttctgcaggttccggggatcttttgtttcttttgccattcgccactgctcattgcatgattgcatccccttctttcttgatacacagtttagcttaggagaataggagcgacaccacctcgtcctcttccacactccttgaaatcttgaatcctacatattttgtgatctcgtactgttactctcaatcatctttacaactttaacagaactcttcttataaaaacaaaaacgaaacctgcagcatttcttcctcttggtgctttaaaggctactgcacccccatggacttgtcactactttttataatcttggattctgctcatcatggtcaagaaaacggacctccatacaaaagaaagacccttggtttttggaaggtggcaatcttttgtctttgtttgctttcgaatcttctctgggcaatatgatattatgtgtctgtatgtagtactgttgccattatttctttgtacctgattagtggagccctcaaaacagaggtttgaaataacttgtcccttttgttcaaatctcatgcagaagttgaattcagctacctcagctgtacccttaaagaagccatctttggcaaatgctcgcaatgcgagctccattcggggttctgctgtgaagtcggcttccatcaagccagctccaccagtaccacgcctcgacagcagcacaaggccgaagcataatgttcctgtgcctgccactgtccatgtgccaagtcgtgctcctgccttggtaccctgcagcagtttcgtgtcgcctgcacgttcaggagattcagtttctatcgatgagacgatgtcgacttgcgactccatgaaaagcccggactttgagtacatagacaatggggattcctcgatgctggcctcgttgcagcgacgggcagatgaacatctgcgtatatcagaggatacagatgttgaaggtctgctgagattcatattaagatcgccatttttaagtgtattttgtcaaaaaaaaaattgttgattcagtcgcgtgtggcctactttctttttcagaaaataaatggaagaaaaatgcccctgccccaatggaaatcgaccgcgtctgtgatgttgacaacgacttggaggatccacagttgtgcgctactctggcttctgacatctacatgcatctgcgagaagctgaggtgacacattctttcctgaaccctggtgccaaaatggtttgccctcaagcactgaacataaggaattttgggttgattgcaaaatctctacattgatgccactaaataagctaggccgtagtatacttactttgagtgtgtctgatcattttataattgcagtttactagtgtgggaacactttctgatttttttttttctactgtgaaatttcattgttggtgcgttaatgaagctctattggattcaaatagtgcctaattttgttctgaggaaaactggaatgtacacttgatctgtgtacatacttaaagagtcctcgaaaatcctgcttctaccttgactgctactaataatagtgccttactttctggcagacaaagaaacgaccatcaactgatttcatggaaacgattcaaaaagatgtcaacccaagcatgagggcaattttgatagactggctcgtagaagtaagctttttcttgctaaacataagaaaagcctaaagaacaatattgtcaactttcggttgtattcatgatttttcctcgtgcaggttgctgaagagtatcgtcttgttcctgatactttgtacctgacagttaactacattgaccgttatctttctggcaacgaaatcaaccgccaaaggctgcaattacttggtgttgcttgcatgcttatagctgcgtaagattctgttactcattgcatttacttctttcagttatcctcagttatcattaggctgttggcatactgactttgacgtgttggaaacttcaaattcagaaaatacgaggagatatgtgcaccccaagtagaagaattctgctacataacggacaatacatacttcagagatgaggtttgtgctatgtttctttctgatatgtttgtttccaatagtcccttgtttgtcacggtgactaaataacttgtacgttaaaaggtcctagaaatggaagcttctgtgctgaattatttgaagtttgaaatgacagcacctacagcaaagtgttttttgaggtagttttctgttctatttcattttagtaaaatttatgatgattatactaatctaacttgccactaactcttctcttcttttcttacaataggagatttgctcgttctgcacaagcgtgtgatgaggtactgccatatatatagtcagcttctggttactggaaggaatttctcaagttatatatatatatatatatatatatttcaggaattcgctgataatttctctttgtacaggatcctgctttgcatctcgagttcctcgccagttacatcgctgagctatcccttctggagtacaatctactatcctaccctccatcactaatagctgcttcggctattttcttggcgaggtttatactccagccaacaaagtatccttgggtaggtggcataatcatgttgctgttccatacatatctttctagcatttgcctaatgaaatgtcttaggagctaacttacacatcccattatcaacttgaaacagaactccacactttctcattacacacagtacaagccgtccgaattgagcgactgtgtaaaggcattgcaccgccttttcagcgttggtcctgggagcaaccttccagcaatcagagaaaagtacagtcaacataaggtaactggatgtggtcctgaatttcttcagttaaacaactctgttcttagtgctaatgccatcctctacttttccttgctcagtacaaatttgttgcgaagaagcagtgtccaccacaaatccctaccgaattcttcagggatacgacatgatagactagaagggcccagcagtagttccagttgcttactgaattcttcctgatgtggctcaaatgcctcccagtgtagcacccgcacatgcaggacgtgctgatgacccctgtttgtggtcatgttagagaatcggtgtgtgtgttttccccctctcctgcttcttgctgtaattttcctgtatctagaccaatgtctgcaggcgcatgtaaatcggagttgtgtagtagagcataacatctcgtttgtattgccataaaactgactgggagtcggtcacttgaagcactacgtcaggttcattgatatgtcccttgtaaagcaccagattttttgtagtgctcattctgaataatccattgctctgctccttgtccttgaagaattctacacacagacgcagagttgaagttgcatcttccactcctacgtgttggtttggaggtgaagaaatgaacgagattgcaggagcttgttgacaccacagaaacaagtgacag

SEQ ID NO: 4226 - DNA, 5681 bp, Sorghum bicolor
gtgtgtgcgatctgaggctgaaaacagtttatcttttctcaaaaagtctagaaactcaaatttcgtatcacaaattatatatcaatagaatagttagatcaaaagtttgttctagagaaagggctaccacttatatttttataatgggagaataatttagatagtgttacgcttgagcttatctgccgaatctaccagccattcaatactatttttttcttataacaaatcagcgaacagtactttcaaccatagattatcagccaaaggaacatagacattatggtgtacgtatttggtacaacatctctcctagcttcacaaagctgtttttatcttctaccaaaatggtccgaataaaacagcttccccataaaagctatttttagcttctctcacatgcacagttttttttagtgaagctgaaaatactagcttctcttattaactttctctctgctgtcttcttttagaagatgtttgccaaaggttataaaaacagttttacctcaagttttacctgatgcgataggtgctacgtgttgcggatagtacttggatggctgtgctttttttgccatcaacatgtcttttctcctgtaaaatttatacataatactctgggcgctaaaatttggtagctccttaaatttggatggtcctttaatttggcctttcgttgttttgtcactaaatgaataatcctaaaccagctgagtagaggaacaaccatagatttttttttttgaagatttagtggcaacataggccacgtatatatgggaattttgttaatcttataagatttgtatacgtcggtccacacaactaaataaaatccgtttcaccatcactttcgggcacgtgtggccttatctggcgtgctatgcaattggcagtgtccgtcgttcggctggtggccggccggtcgcgttcgcgcgcggcgggtcgagccggcttgatcgatcacgtcacgtcgcgccacacacttggacgtgacacgtacctttggtgcatgtcatgtgtgttgataaaacgtgcgagatatgtgcacgatccgccgcgcgtcgcctagctagatacactatatactcaattaatatggacctctcattagcaatacgtttttgtttttgcatagtacacgcagcacaggtgatagatttcctgtagtacctatatatgtttcacgaaaagattatacaccaacatgtatcgtacgtctattaacagattttatatgattaataaatacctgattcagtatacagttgtagcataaattctaaaacacaattaaacatacttctatatgacagattcattactaaaaaatctttttaacggataaacaatagcaaatttcataaaaaaaatctttcattctcctaacaacttgcacgtgtgggtactagcgagtgcatgccagcagtacaaaaagcatataacaatgatgcatgcaaaccaccacgcgcatggagagagacaaaggtgcaaaaaccaaacaattattagttttcagcactagatttttcccatttagttttcaaattttgatggttgcttgggagatcttctttttccttcctaggctatagttatatatgttccaagaacaaaggggcttcttttatatgtagaagaggcgagccattgatgttatcgatggaccctgatgaaaaatgatcttcattttagagaagactcagtaacattaaccgcccctagaaattgtgttttgtgtgtgtgtgtgtgtggcagtggggacggggtggatggtataacatctcaattggccatgtaatctgattttggtaacgtcattgtccatgtaatctgatttttaagaatattactggcttgttggggcctctgatggtgcttctaaaatgtttctatagtatgagagaatgtatatacacacaggaccactcagaggtagtctaatcacctgcacagtgcccgtcctaggatataaaggtagcccagccctacccactcatcggcacacagtctcggctctcgttccattgggcgaacgacactgtacacaaacctagctatactagcttagacaacgacccaaaccaaccagcaaccatggctggtggtgctcatcaacaggtggtggttgtgctcgctatggtggcgctcatggtgacggcggccgagggtttcatctccaagaagacatggagcgccatccggcgagcggaccgcgacggcccctttgtggggctggtggtgcccaacacctacgagatggaccccgtcctaagctctcctgacttcaagcctagcaacaacatccccattctagatgtccaaggtaacctagctaagcagcagcagcagacgattatgaggctatccacttgtctgaaaaaccatgactgaaagtattatttgttgatttattatgagtgaaaaacactatcgaatggctagcagattcgatcgataagttcaagcaaggtatgtagctccatgcctccatgcatggagacactgacacaacagaggtggagacagccgcgtccggccattttccctttagcttccaccaaggttttcaaaacgattatgtttatttttttagaagggatggtaagagcttggccggtagattatattagacgagaagaaaaggtaaacaaaaacccggtcctgccaaatcccactacccaaactaataaggaggcaaaaagaaactagtatatgcaactagacgggagtcggcccgcggggaaccaggacaactaacgttacagccaaagggcaagaaacaactagaactggtaaaaaaacacataactgaaacaacctcaaaggaatatggaaacaagctaagaggtattgacaatcttgtctccacaccaactagaatttttgtatatatgttatctttgcaaagcattgtggcttgtcttggttttgaattctagcttgtttgctaaaaagtttatctatttcgctctttccaaatgttccaccaaattatgtttattattatggtcgagttctaaatatatatgagttgttaatagtaactaaaatcctgaaaatatgctatctaaaatatagccacatcgcaataggaggaacaccctttttagcaatgtatatattcgttgctagaggcccaaataaatgttggtaatacctacataattaagaagctgaagcttgcaagctgcaattatatatagtatacagtacaaaagcatgatatctagaattcagtatgttccttggacatatcctagttttaagttcaatgataaggaaacattgagagatatatgtatatattactgaatatataactcaactaaagtgctaaacaaaactagacatatagacaaatatgtccagtaaaatatatttttgtgaactcaaaccaatttaagtggtgatataaaagccagaaggtgagcacaagaaatgtaatagcatatgttttcaatattgcgaatagtaagtagattttcagtccatgacatttacaaggcatggtttgaattaacccattttttatgatatatataattaacagatgcagtgtgtatataaatctatatatatctcttataaaaataaacctcactagctatttctcttgccatacaaagtattcacatcagcatccagtagaacatcccactagcgcatagcacattcaaatatctcgtcatacaaagtgtccacatcagcatccactaacacatgtcattatgtcttcattcaaactattcatattaacaaactatattatttattgacatatatattactgtattaccaacaatatatacagggaatcctcctatttataatataatgctcttacaatcactgttggcatgcatttttctttgaagggcgacgattccgcttcggaactattggaagccaaaacgttgtcatggtcatgactgggctgagcatggtaaaaattcttctttttcccaaatactatatacatgtgaaattttattcgaccattttttctaaaacgaatctagcagcagaactgtcgattttatttgaccacatagcataaatatgttgtcagacaaaataaagtgatatagatatcataatcctcaaaattaatttggaaagagtggctaatgatcaatgcttttgtggtggatgctactgcagctgaatgcagggctcaccacccagctgctgctgagcctgttcagggtgaaaggcatcgtccactggggcatcgccggcaacgccaacgaggaccttcagatcggcgacgtgaccatccccgagtcctgggcgcacctgtccctgtggaactggcagaggcacggcgatggtgcggagaacgagctgccgctggagagcgccggcgactacacgagggagtacggcttcctcaacttctccgactacactgtcggccaggccaacccggagctgtcggcgaacactctgaacagcgtgtggtaccagccggaggagatcttcccgatctccggcacgccggaggagcggcagcacgcgttctgggtgcccgtcagcaagcgctactacaggctcgccgcgaagctggaggggatggagctgccggcgtgcgtgaacgagacgacgtgcctgccccgtgcgccccgggtgacgcgtgtgcccaggggttgcagcgccaacatctacaccgacaacgccagctaccggcagttcatccgcgctcacttcgggtgcacccccgtggagatggagagcgccgccgtggcgctcgtggcgcaccagcacggcgtccccttcattaccatccgctccctctccgacctcgccggcggcggctcgtctctcagcaacgaggccgccacgttccttgacatcgcggccaagaacgccgtcgacgtcatgctcaagttcgtgcccctccttggccgcggtggcgagcaggagcaggccgacggtctggcccaagacatgtaatgtaaggcgggccaggagacagatagacgacgctgagcagtcacgtcgtggtacaatacaatttcgtcttgtaaggtttttatttaaaataatttcccacccacgaattaacttgtatcgctattgcaaacctatcttcgggaataaataagattggttgtcgtgccgatgtgttttttatattattaaaaaaaatacttacccttaagcaatgttacctctattgaagttcttctaactcaaatatgtttgttcatttgtttttgaaaaaggtaagtatagcgtcattgtggggtgcaagcaactaataatgtgcggttgacatggaagagagtaatatgatccaaaaaccccttaggttgaaacatagtaaagactagaggtatgtttggatctctaaaaagtaaaaacgaggtggtaaaatgataatgagatccaactcttgattctataatctagaatccaactatctacttcaaaccaattatttggagattttactatgtaaatacaataatcagtttaaaaataagatctagtttggcagagatgttgtcaaagcgctctatcggctctgcacacaccatggacgacgatgctcaactggagccgcacactaatacaaattttattaactgtgacctttcaaaatggcattcggaggcgggcaggattcccaaccgcctcggttaatagtaggcattaaccgtggtggtcatttt

SEQ ID NO: 4227 - DNA, 7264 bp, Sorghum bicolor
ctgggtattataaaaagatatagatagatagataaatataaaaagatatagatagatagataaatataaatatggatattatagatatagatataagtatagatacagatataaagactagatataaaagataatagatagatttatttacaatttagcgcaccatagacatggtttttaatcctatttccaaaatccaaaaagaaccggtaacgccagttaaatatgagtgccacgcgggcagcccacccgccccagccggtatcccacccgttggcattcaaatattgcccaagcggcaggcgagtcagcggtacggacggccccgatgcgtccactcctcccggtggccatctcccgccgtcgatcctgactccccgtcccctcccactcaccaacacgtccaagcaagcaagcggcacgagggctccgcaactggaagcatccattccactccatcctctcaatcgcctccgcctcccccaaatttgaaacctccgaggcggacgcgacgcgaaggcgtgcgtcggtggtcgagattcgagacggccgtctgggcgaccgcgccgccgccttccactccgtcgtctctcgccgcgccccgcgggggttgcacgcacttgggcgcgcgttcgggcgcggggttggatgcggctccggcttcggccgacggaggtgctccctggtcgcgacggccacgccgggaccgtgggcgaggtgaggtgagatcccatcccgcagcctttccgtttatttctctcttggtaggatgaaggatgatctgggattggttcctcttgctcggaagaggggagggagggaggcggtcgtgaattcgtcggacggcttgctcatcggcgctgccgctgggcgttgggtgggttgacgggatcgcggatttgagggatctcaagggagatcctgtaaatatgatgatagccttaagttttaagagagggatctcgaggtagcctgcatatgtcaggagccaggaaggaaggggaggggtgggtcggtagcgtgctgttgaaatgcgggattaggttcatgatgctgcctgaggcgatccggctttggattttcttgtctatctagggattattttgattctgctgttgtgtctgtgataatccataatatgatggtaacctatttcgtgtgcaaatgcaacgttcttgtagtaatcatgccgagtggtaaagcaaaagctccaaagggtggggaggatcctggaattccgccagttccttgtgaaggggaaattagccatgagccacagagacaacggtcgctcaacgggtaaagccctcatagctttttttccctttatatatatatatatatataagcattcacagtatgtagtactatattttcttatggatacctgccctttaccttcaggaggactactggtccgacccgccgttcgaccaaaggaaattggacacccgaagaggtatgccaaacaaactttaatgctgcttttacagattctttttgcttggtttatttactgaatgtctagtatggtgcgtgtttgctattcaaatgtaggatgctatattgtcccgcgcggttcagacgtaccaagggaaaaactggaaaaagataggtacattttatggattgatgctatatgtagaagatgaagcagtttactcactttcatgtcaagctgcgtattcttgtatttcatcatttatacttctattgagcttctgtccctgtttggaattctgtatgcacaaacagaaatgactatataaatctatgctcggtactatctttaggttgcaatgacgcaacatctaccaagctgcgtattcttcaaatttcacttctctatgttcatggaaaaaagagagcatttcttcattgcatatgccttcttttttccacttctgtcaataagaatctctctctgcctcttgccttaagtccaagctttgacaaaatgccttctactttttcagcggaatgttttccagacagaaccgatgtacaatgtttgcacaggtggcaaaaggttctaaaccctgaattggtcaaagggccatggtccaaagaagtaagcatcctattggcttttctattttggttttatttcttattaatattgagcctaccccaacttgcttgggataaaatggctttgtctttgttgattcggcatcttatgatcacttattcaacacaacatattaatatcaacctgttctctttctgtttataggaagatgaaatcatagttcagatggtaaacaaatatgggccaaagaagtggtcggccattgctcaagctttgcctggacgcataggaaagcaatgtcgagaacggtatgccacagcaaatttcttgtctgctttaagtttcatcaagcttgcatgtaagaaaaaacattttccccctttgcaatcgtagtccatactttgtgttcaataaagaaatggcaaatgttagctcatgagtgctgctttgacctctgatatcttttcacaggattgttggcactagctgttttgcaagccaataacagcgacgccatagtagaagcattactaaacactaaccttttaaactgtgtataaaaatacaatcttatttaaccatctcagcttttgatattacaaatatgtcttgttaacacactgtgctctaggcatcataaagtatgcctttgtaaattcactcaattatgggtactataaatatgttaactgtagctgctctaaccatggactaacttatctgattcaggtggcacaatcatcttaacccagccataaacaaggaggcatggacgcaagaagaggagattactcttattcatgctcatcggatgtatggaaataaatgggctgaactgacgaaatttttacctggaaggtaactatatgttttccttaatatccaccggtaaatctttacatatgattataaaactatacctattttttccaggaactattttatctctggtaaatgtcataccgtgcagtgacaatttggaaaccaatatgtgttagttaaaactgaaaatcgacatgtatttttctgtatcaagtaataatggtgaacttttacagtaagcatagagggcacactgcttatgctttattgccaattgataacacaaagctgttctcacttctcagtttacaaccaaataatagttgagctacatgttactattgcataaatcactctttttttaggggaaaaccactcttgttgttagtcaacggactctttagattaccaaaatcattgaatttgtaatttctatttcccctacaggacggataatgcaattaaaaatcactggaacagttcagtaaagaaaaaggttgattcatacatatcttctggcttactttcacaagtcccatgcctccctctgattgaatatcctgcacaatgcgattctttatcatctatggaccaagaaaacaacggagatagtgtttgcaatgctcagaacactagcatggccttgagctctgatttacaagtaaatgtggatgccaacaagagagaagcacaagactctcactcgtccttgtgtcaaggggcatgctatccttccacagaggctgtaggatctgttttgcctgatgagaaccaccatgttccttcatctttttctcaaagaatggacctgcagatggatatggatgaaggatcaggaaattctatgtttgcagatgatcaaactctttgtagcacatcaaatcaagaaaagtctatggtgccatttgttgttgcacaggaaatgcctgtctctgtgctatcaggtgtttctagcgctgagcagaaactgcacttaatctctgatgctgaaagtttgaaatctgaactttggaaagatgtttctttgcaaactcttatttcaggagttacagttgacgctgatgcttcaagattaaatcatccagattcttccaaaatggacaccaattttttgacacaggcctacccattacacacatcaaatccatccggtgtgatggaaactgtgtatgaaccgatgccgtcggagacaatctctccctcttttatatgttcagatggtttgtctgttgcacccgaaaatagatctgagccaagagaaatgccagactgtgaagcacagatggccacatcctcaaacattttttgtgatggcgatcaatctgctatacctggcagcagtgatgacaggccagaggctttcacgatgactgagagcattacaaactgtgggggtcaacagtcaacagatgccgaagaacctatggccactacagcaaaagaacagttatcgaaagacattgagactgtgccagatgaaaagaagggtgagggagctctattctatgaacctcctcgattccctggtttggatgtcccatttatcagttgcgatcttgtaacttctgctgatctgcaagaatttagtccccttgggattaggcagtggatgcggtcgaccatgaatgtccccactcctttaagattatggggctctccaacacatgatgaaagcccagatttgctaaagagtgctgctgaaagcttcccatgcacaccatcaataatgaagaaaagacagagaggtctattgtcccctactccagataaaagaattgagaagaaatctgggattgcaaagggggtgacagatatctcctatatgatcacgaccacatgttccatgaatgcaaccaacgatggagacattgttactgaatcagttgtgtgtgctgagcaaccttcttttaaacatctagacaagaaacttgagttctctaatatcaacatggaaaactctgatggagcatctaaacaggccaaagatccacaaaatgcagggaacaaacgactcgtggaggagtcctcgccaaacgttgcaaatcctaacactgatctgcaagacaatatagtaagtacattttctgagtcttacatagattggtagtagccatattttctgagtcgtacatagattggggcctccagaaatgcatcttgatgacatgccaactggctaagtactttttccacttgatttcttcttaccggtaattttttaatgcagcaacctgtacggattcttgttgagcacagcagcaataaccttattgctgctgatcatggtgcaaagccatcttgtaaggaagtaattagttcaaaatcaaagcctacagaactacttgttgaaaaatcatcaccatgtatcaatgcggattacgaatatgtgaacttgtaagatactggtctcactagtgttcctttgtttgaattatctttttcttttgttagttaatcagttcaggcttcatcagtgtatatatatgaaactaagggctttgtcaaattttcttctgaactgctgcttttgctagattggctgataccccaggtgtcaaaagaggtttggaatctccttctgcatggaagtctccttggtatattgatatgcacatgcactttcaggtaaattcatttctttcctttacattcttttttagccattgtctcataaatatataaacattctgcagtcagcttataatctggtggaaattattattaactctaatggcttgattggatatgggaatttgatccatatctctaggtttagttcaaacttgaagtaaatcctaaaagttcctatgtttcttagttttgaactgtgcaagagaagcatcttctgtgattagcgactagcaactgctgtttttgttatgtttgttttggttaacatctttaattgtgttcctatgctccttccagggttttgtcagcccagcagacagaacttatgacgcattaggattagtgaagcatttaagtaagcacagtgctgctgctgcagtggaggcctgtgaggtgctagcaagtggcaacaggacttctgataaggaaaacaaggataatactgatggcaaggagccagtggcaagaaaatcacaggtcaaaatcatggtgcgtaacatcaactggttatagtttagtactccttccatcgcaaattataagacagtccaagaattttggagagtcaaaacatcttaaatttaaccaaaattatagaaaaaattataaaaacttatgacatcaactaaatatattatgaaaatataattaataaagaacctaatgatacttagttaatatcaaaaatgctattatcttatcacataaatttggtcaaacttaaaacaagattcttggaatgccttataatttaggatggagggagtaattttactagcacggaacaatatctcttggaaaccatagtttactgtttatcatttccagcaatttcccttataatgtgcatagcctatctgtctgaattatcacaaatgtggatatagcaatttcaggccaaagtgtgaggagtagcagtgattgcaactcagcatggtatttttttttgtctttaaagatcaagcattctaattccaggtaaatatgcaggccgaggcgcgagtcctggatttcgacgaatcttccacacctgcaaggacagcagataagaaatttggcagctgtctcgggagatctgttagctcacccattcttccctcccccaacctgagaagtttccgataggtagaattctgagagatacaccagatatggtataattatacattagccatatgtacatgtatatgttcctagagcgcattgttctttcattactctatgttaccatgatgtcagcgtacagtcagcccagaaactagcatccaaaaggcagcagtatcagtgaagtgttgaaacttccctatcattcaattaaaattattattgattagttgcttacactggagatgtctcctggcacttaatttgtacatgaaacatggtgatggtgaattggtcactccggagtccagcgcgcagatcagtctgataatgccctcgcgattttcgagttcatgcattttgcactcagccatttcactttgttttgtatacttgattgatacagtttgttttgtatacttgattgatgcatgtagcttcttgtgacaataactagcaaattagagacaattaggcctgtccgtggtcacccgaccctttgtttgatcaggtattagagacaatcgagtcttgcctttcacaaggaaaaaaaatcgcattttatcacgagaaaaaatttggcaggagttctaatagggtgtttagttccccatagaacgcaaaatgtaaatgccaactactttagaacggtgaaatacaaaataccaaaagttt

SEQ ID NO: 4228 - DNA, 3276 bp, Sorghum bicolor
gtgccgtattgaaaacattgtttttgtacgagccagcaacagtgccggagtggccaaaaacactgtttggtgggtagaccggttgacactataacagtcggacacggaggcacccatagataggaggtcaaaaacagctcgattcaaaaaacaaaaaacaaaatcatattcctacatgtactagcttctgttacggcacccttctggtcggcaggcagcgatggcgttgcagcagtggatatcggaagggatgcgatttctgcactcgccccagcatgatggtccgctccgctatcctctgggggctcggcgacgtcggcgcccaggccgtcacccactactccgcccaggtacttcgatctgccgccgccgccgccccaaacgcttcttttcccccgcggtagttcaatgttactgctgtaaaggttgcgcgtcgccactcagttcatgttacatttgcatgcagtgacagatttcattattaagaggaagtagagttgttaaagtacaaagcttagtggtattactgggattaccacaccaaacacaacaacccaaattaacaatcaaagactatgaaaacacgctaaatggcgaccaaaggaagcaactaactggcgcaggtgcctgaaacacgccatgtcccaaagcttacactgctcaacgatggcgacctgtaagaaagtttgtgttgttctagactcatttctgaacgttctcttgttctcttccttccaaagcagccatcgaaccagcataaccagtgagtcgaatcccttcctagaaactttgggatcctatattattgggatccatgcatgagagaatatgctagcaattcttgtgtcatctaaccttgcctcgttatttagctgtgagttgagtgcataaggggcaaccttggagtttagggcttatcagttgaagtagcttgggctgcacttttgcagtagtgacatcctttttccgttcatctgtgttttacccagtaggccgattttaggactggacgggtgatttctagatgcagtgatctgctgttgaaattagagggaggtgtacttagcttgtgggtgtataaacatctgtcgtaggaagtgcatgtatggtgaaactttagaactaatcactgtttttataatttttgggggttgcatttgcaccccttagttaatacgtagcttcgccaggccaaggaagacacgaagaggggtttcgcccctgctctgtgctgccagccgtggtgttgacaaactggcgcttcgtccccgcgccataccagcttcactgtgccagcttgttcgccttggtaggcagctgttccctctcatggattgaggcctggttcagtttgcaaaaaattttgggttcggatactgtagcactttcgtttgtttgtggcaaatattgtccaatcatagactaactaggatcaaaagattcttctcgcgttttacaggtaaactgtataattagtttttatttttattcatatttaatgcttcatgcatgtgtcgtaagattcgatgtgacggggaatcttgaaaatttttggtagtttttgggaactaaacaaggcctgagcttgagcagcacaaggatgatgcagcgggtccggaagatggaaggaggtttgttctgacgactgcttaattttgagttagttgtagtcatgtagtatgttcgtacatctgtaagatctggttcatccaggaagaataaaacgggtgaaaaaaagacagtcttatctgcagcaactgtttaggaatttggattggtagcaaaactaactaagcatcgatcagatcgttgtaaagaatcgacctttgatgaattgctgaaatgctgatgtgtgtgtccgtcttgctttgctgcagtccaggaataacaagctgggctgggcacgcatgcatgcaatgcaatgcaatgcgtgaatggggatcatgcatatggacggcgcacaggcggcgacggagctcacgaacgacgatcctctccgtcccgtccccaagcaaaaagctagacgtagaacacgaatagataaagaatgacgcagcagtcgatggtggcgctggtcgccgccggcgtcctcctcctcgccggcgtggcgtcggcggagaaggcgggcgggttcgtggtgacgggtcgcgtgtactgcgacccctgccgcgccgggttcgagacgaacgtgtccaagagcgtggcgggcgcgacggtggaggtggtgtgccggcacttcgaggcgagcaaggagacgctcaaggcggaggcgacgacggacgacttcgggtggtacaagctggagatcgaccaggaccaccaggaggagatctgcgaggtggtgctcaagaagagccccgacccggcgtgcgccgagatcgaggagcagcgcgcccgcgcccgcgtcccgctcacctccaacaacggcatcaagcagaagggcacccggtacgccaaccccatcgccttcttccgcaaggacccgctcaaggagtgcggcgcaatcctccagaagtacgacctcaaggacgcatccgacacgccatgatcatgtgtatcatatcgatcgttaagcgtccatcgacgacgacgacgacgtcgtccggccatccgttacgtacctcgatcgatcgagcaactaactgaactgtcatatatacatatatatgcatatatggtagtagtagtagtagtaggtcccgcgcccggccggccgttgttcgccggcgccggagaagatggtagtagctagccaccaagtgtcttcctcgttttttgtattgcttgtgttgtgtgtatgtatatgtactcctgcatgcattccaaggcaactatacaacgatcagtttctcttgttgggcctaaatctgcatgcatgcacagataaaatgcaagctctgcaatgtttgtttctggcttctatagatggtgttattaacaaccaaaagtgtcaagagaggttgaaccttaaatttccatcggaaaataggctctagcaggttttctataccggcgaaggcagttttggtactgtatcaaaatgtattatagactttaccaatgtgttcctctcgtcgagacaatgaagaacatacatggattttccagcagtttagggcccgaacaaagaaaacacaatttcaaaagggttgatgcatgaaaacaggcctagctagctggtttccaaaacccgatagacgagttctttttttttttccctgaattgcaaagccatccacacatgtgacacatatatgtattgcaaaacttacacag

SEQ ID NO: 4229 - DNA, 4680 bp, Sorghum bicolor
cgaatcttttaagcctagttactctatgattagccttaagtgctacagtaacccacatgtgctcatgacagattaattatacttaatagatttgtcttgcagtttcccgacgagctatgtaatttgtttttttattagtttgtaaaaacctctcccgacatccttccggacgtgacatcaaaaaattttcatctccaatctaaacagaccctaaaactaaaatacatctacgccccaacaatagtgaaagtaaatctacttgtgtaagaagttttggaaccgagaagagtggttgatagcttgcatcggaatttccaaacaaaaagtttatgcgtagatgtaaacatagtgaccacaatcaagcagccaaataacaattccaaattaccaataaacaagtgcactcacaaaatgaattcacagcaaacatagtgaccacaatcaagcagccaaataacaattccaaatttaccaataaacaagtgcatcacaaatgaattaacagcaaattggcatcggtttgttcatatatatttcccgcctttcccgcgattgctcgatccaaacaagcaagcgtgctatttatgcggtaaaaaagaagaaaaaagaaaaaaggacgatggctgaaatcatcgagtacccaaagatacggatttttaccccgcggggcccaccgggaatcgtctcggcgttcgctgattcaaaacggcgaagagattccgagtagtattactgtatttgcgggccccagtccagcaggaaaggttagtggcgcaggtgtgattgggggtgccccctccacgttgatcccgcccacctttccacggttaacgccacctccgtgtttctgctgcacgtaccattgcttgtgcaccccagcgcttgctgttttactctttttttaaagacaaatataagatttgatgcaatgcaatgatgctcatgatttctcctaagctctaaagcaacacggcagggataattctcagctaaaaaaataagaaagtcttcatagttttaatatggcaatcaaatgcatgttggtacaattcataaaagaaggtagtacttgtgtgctttgacatgggaatttaacattttttgaactagattagtagggatttttttttgcttcaacttgtaggatgtatagtgtttgttgtggtatgcattattatgagatgaagtcacttgccagttgttcattgttccgcacgaagctagctaataccaaaaagcactacaaaacctacagaaagcaagaataaatatgatttacctagtacaatgagaaaagcaatatttctaaggcccttgccgccattgcgtctgttcctttgtccaattggaaaatggttttacatctttctcttaacttacatggaatcattttgttgtggttccaagatacagtgactaaactggtcatatttttataccttgcaatatttctaaggcccatttgggacgtaggaattttataggaatcacacaggaattcacagaaaccagatcattttcacatgaaaaatgcaggaaacaagaacatttcgcacgttccaaaaaaatgccaacaatggtgtgcttgcaatatcgcagtacattcctccgaacagtagtggtacctagaccaaaagaaattagctactaccccttcgttctaaattccaagtcaatttgaaatttctaaacacatacaaaaaatacattagatctatttctaactcccgacacatggttcatgaaaatgagacacatggggcctgatatgtttttcccctccatcaaaatcgaacaaatccgtgtacaccaagcgttactctctccgattggagcaccgaaagcattccgccgtccagtcgtccagaccgaaccaaaccccactcgctccatttccaccgtccaatccaaatctgacgcccctgatttcgccaccagccctaaaccccttgcgcgcttataaaatcccagcgcacgaaggaagaccagatctcccccatttctcctccacgcctcctccgcctttcccgtgtcccccgcagcaatcaccgcgagcgcgagggtttccagcatggcggagcagtcgcagccgcacgaggaaggcggcgcgagccccaagcacgagtcgctgatggagaagctcgccgacaagctccacgtcggcggcggcggcaagggcgactcctcgtcgtcctcggactcggacaacgacgagcggccccgcccctcggcgccgcccgccgacgaggtcaagcagacctccttctccgactccgccgccacggcggccgccgaggccaaggcgaaggtgttccgcctcttcggccgcgagcagcccatccacaaggccctcggtggtggcaagcgtatggctctgtttctcacccgctctgaacgctgcttgcttttttggcttgaaatcgttagatcggatctgggctcgtgggggatctgtgtgggctgcgctgaggtgcttgggttgcggattggtagatctgattgcttacgttttatggaatggggctagctaaggttttaggaattggtcgtttagatcggccagcgcagtcccacagattgggatcttacttgtccttgacaagtggaggcgactagtatgcttggttactctatgcttgctacaaatttgatcaatgcaagtcgttgcacgtccgtacttgatctgtatcactttaccttatgtttattatctcaacaaatggcatttcattggagctgcttgatactaccttgtctactctgaaacggaaggacttcctttggagtgattgtgatgcttgtactgtgttgttgtgcctaattatacatctttattctaaacaaatgacaacaagcgcactatttgctcattggtctgtgtctacagctgatattctcctgtcttaacttgattggtgtaatgggaattgtgagacctaaatacctgatgatcttctgtcattgttgtacctaccgaactcattactgttctctattttgcagctgctgatgtgttcctgtggaggaacaggaacatctctgctggagtacttggtggtgccacagcaatctggatcctatttgaattgcttggctaccatcttcttacttttgtttgccacggtctcatattctctctgggtgttctctttctctggtctaacgcttcatcgtttatccacaagtaagatgtcacctcagtatcataaattgctcaaacttatacaagatgcaagtttgttctttgccagttatgtgtgcatagactaacttcatgatgtgaaattctgcccattaattcagggctccccctaagatcccagaggtgatcattcctgaagatttagttgtcaacattgcgctatccactcgttatgagatcaacagggcctttgccaatctccgccagattgctcttggccgggacataaagaagttcctaatggtatgtctagttgtctactaactactatgttattgcctatgatgaacaattgatcgtacagcaacctacacttgtctcattttgtttctctattggacaaattaggttattgctgggttttggttcctttctgttcttggaagttgctgcaacttcttgaccttggtttacattggtaagtgatccaagcaacttagagaaaaccttgtttttaacccctcttccatgtatctgattggctgacactggatcgtcttcctcttgtgcaaaacagtctttgtggtgctgcacacagtacctgtgctgtatgagaagtatgaggatcacattgactcgtatggcgagaaggggtggattgagattaagaagcagtacgctgtgtttgatgagaaggttctgagcaaagtaccaaggggtcctgcgaaagacaagaagcactagaagcaagtgatgcaaggttgctcctagtagggaatgctagcaatcggttcgagtttctcaggaggcagcacttgtgggtgtgagcaccactatggcctatgcattatgttgtgtatggctgctttgttgtttggttttgatgggtgtagccgaattgctagctttgcccttcatgggtgtagccgaatttccggtagtgctgtttgattttgatctgtgttgtagacgtcgagcgcagactgtacctgtgacactgtttttgctacttatcaatgcagtttggaatttgatgatatttatggtcttttgctgagcttaggtaacaaatgcttggtttggttgttttgatgggtaaaaagactggttagctaggcagtttgggcaattgtaacttccagtcaagcagcagaaacatgtttcgtgagaagctctttccgttacactctgtttctgctgttctggggaacagtatggcaacatgaaagtctcttgaactctttgataaatgtatgctttgaagaatcaattgtgtccatttgcttatagtcgcatatatgcttgctgttgcctttgccagcaaagcaagccatatatagagagtaaagttcagaaaatgagagagagcaaagagacctcacgcatctgtactgcacctgtgttaaaacaaacagaaaaggactcatgtgctctaggttttgtttgacctcacgcatccacatgcacaagaagttgcttacattatatagatataagctgctacgtaaacctttcgctgctagccacaacctaccagt

SEQ ID NO: 4230 - DNA, 2629 bp, Sorghum bicolor
ctatctacgttccaaatttttatttaacaatcgtgccatctattccaatatatcttagagcatcttcaatagtctttctaaaactcactctttaaattatcatttaaagagttatttgcataaaaattatttatattttctcactctctaacaatttttttatattgtgtacactctagcgagccattttttgaaaaatccataatagaaaatggctataattagatagccagataaagaagctgttgaagcgtattttttcatcaaaatctctactcctaacaattagagacaatatagtctcttcgtgagctactggacagggcctagacgtaaatcccgctatccggaaaatttattctcaacctaatctcagcccgaaacatttattttaagctattttacactattaactgcaggggcagaccgcctagccttgggcggttgggcccgattcaagctcggcccgaaaaaataaccttggtttatccagttggatgatcatggacgggatatttcgatctaaaatagttgagctttttttttttttgctcagttcaagcttaacccagcttaaaattgcttagatccacctattgatatacggtttcaagaaatagaaaattaaaaattaaaaaaaaaaggaaagaaaagacacgagaaaaaatgaaataaaaaggaaatgatgaacgaaaaaccactggaatgtaaattgaaaaaagaaaaacaaaaatgcatataggaaaattttaaacaaaaagggaaaaaacagaaaaacagtacttcttcggaatgaattcctcggacaggagttagtttgtggtcagtagacggaatcgaagaaaacacaagaaaactttaaaaagaataggataggataaacattatttattttttaaaaacaataaaccataggagtggacaagagaggtttggcaaaacaaaagttgatctaatcggaacaggaattttttagaagccagtggagaaaaaaaaacgataacctctcggataggtacgaaagagctaaaaaagaattagactctctttaatattttatattagaacctggactctctttaatattttaatattaaaatctaacttgtacgaacatgactcgtaagttttgataaggaagacatgattcaatacgttttggaatttgaactctgtgtcgaccatccatcgtccgacgtaaactgtttttaactatgttgagcatggatttatatataaatctagacagaaaaactctctactatccggtaattagaggaagatagataaaaaaaaaaggatggataaaaaattggactgaattttttcctctttattattaggtatagatatagatatcgctgaaattaatgttgcttggccttgcattgcacatccacatttcggcctcaaacaagaaaacctgctgtaatcagttaaccatccaaagcaacataattaataaaccggtagcaatcatggcactagacttgacaccgaagaaccggcctaccacactatcagtgcattattttgagccgtagtgtcatcccctgttagggtttggcctttgggcccctttgtctggccctgtgtctcctctcctcttgcttacgagcaaagggagcgctaggaaacgacacaaggttgcccacttctcatactgtagtgctaccagtacactacaagcattatttaactacaaatacgcatcttataatgcttgctgtgtgttgtgatgtcacaacttggctctatttaatggccttgtccagtgccttgccgtctacatacctttctcgctcgctccttgcaaccatcgaaaatccatttgccatcttcttcgcaagatccaggggagaaaccaaacacgccatgagggcgcccatcagatcatgcaccactagctagcgcagccgtgcatcatgtgcatgtttgttctccctctctcttttgatttaatttgctgttagtctgccttctgccgccatggttgtgatatggccggatggaagagagcgtccttcagtccactcaggggcggtgctagggtcgaattagctgccgactcattcacccacatgccaagcaaacggccatggaaacgagctagctttgcagatgagtgaatgaagcgggaggtaaaagcttcgatctcgcaccatctttgcttggactgaagggtgctccctcctcccctccttaattgtttactttacccatggcgcagcttcgtcgatcatatctcagggttttacttcatgatctgtatttattttccgacctgctgtcttgaactcttgatctgtctttttgcttgagctgcttaattgttgtcttatatatttatttggcatcttatgcatacatatgcagcagctgccaaactatacggcctattttaattttatcatgtgcgtgcttactgttcttctctggttgttatgtagcagttatatataatggagatccaaagctttttgtactttccttgcccttttgatatagatatatatactagctataaatccttgatctgctcgctgaatctatatattgttctcttccaaaaagagatccctgtttctgaagaaaagacttcaatttgctgtgtgtagatcttactcct

SEQ ID NO: 4231 - DNA, 3189 bp, Sorghum bicolor
gttgctagcgctactaccttttggcgaggtgcgtgttatatggacgatggaccagctgatcgagatcttttactagtatagtatatgcacttttttttccttttagaaaaagtgtttgtttcggccagtgcatgcatatgcatgcatttcagagcaagttgttgttttcttttctttttgctgatataatattcagttatcatatttattgttagacgatgtacagcaacattacacacgtagtgagtggttctttgctagcactagtagtgcttattggcatcactactgtgtctgcaatgttacctgctccacgtaaatatgtagtggcgatttggttgagatgttagcgtacgtccactgatcgaccactagcgcgccggccattttacaacacccgcattattatttgtctcttttagctcaatccactactacatcagcttgaagcatgtctcggtctcgcgtgttgttgcggactttcttaaaaataaaatggtcgcctatataagttagagtgttagacttacatatccttgcattgattcttatcaaaatttagcatggcaaatggaagaatttaaaaaagactaaaataaatagattgaattattataaggtgatggaacaatataataaagcaaataacaatatgtgtatgccttgtatatttattatacagtataacaatagtaattgcacttagcggaggtaatgtcgacgtgtattaatatgttgaaagttagtgggctggcatggtagtagttggtgatgatacatacagatatatagttcgtaaaaagaatgtgaacagcttccatattgaaatagaagctgtagtggaattataaaaaaaaattctccttaactggtagttgtgtgtcgtcgcgcgccggccctctggcaagtggtaaccacggccacggcacctgagcgtggtccacccgaagtacaagtaccccaccccaggccacgccggcaccgtagctgcactgttggttgggttgggccacgacgcctttcactttcagggcgaccgcgtgcacgctacgctggcccagcgccgcaggtagcaggcaggggaaggctggaccggggcggtggggacgcctcgccgtcgcgtcacgtggacgacgtgacgtgaccctcgcaacgcctcgatcgaccgagctgcggccaccacggccacgggtcgggtcgggtctggtctggtcccccaaccaccacagcgtcacccctcacgcccccgtcaccagccaaaacttttgatcctagttagtttatgattaaataatatttataattaaataatatttatcacaaataaacgaaagtaacgaggcccagccgaaaaagcgcaccgcttttttcccttcccttcccttcccgcgcacgcggtccgcggtcaaccgggcgggcgatgcatgcacgcgttgacatgcatgcacgccgcaacgcaacgctagcgggtgccgaatcgccaactaaccgccgtcggcgcccggtgcacgggcgcgcgcccctccgccgtccacctggtggccacctctgccactgcgttaaagaggcaggcaagcagctagctagcagagccacaagtcagttgctttaataccacccgtcaccaaactgttgcatggactgcaagtctggattctggaacgcaatgcaccgtgccgagttgcccgcccccatgtacagtacacgcgcgcgctctccgagtctagactcacatttattaactttctcctgcgtgcggctcaagtcgaccgccggctgcatttctttctcgtgaaggcaggcgtgagagctacctagcctgctctgctcgaccctcgaccgtaccctgggatatttccagtccagcgagccgcgaggaggcacggcaacggcacggcactataaaagcccaccaccgcctgctccgtttcccctggccagtcagccagccagccacggcgctgatcgcagagcagagaccaccccaacacatacagacgatggcggcgaacggcggcgtccgggaggcggcgaggtacggcgccggcagcgggaagaggcgggacctgcagcagcatcaggcggccggcggcgggtgcgggcactacttccagatgccgctgcactacccgaggtacagtcgggaggactacgaggccatgcccgagtggcagctcgaccgcctcctctccgagtacggcctgcccgtcgccggcaccgtccaccacaagcgcaccttcgctatgggagccttcctctgggccgccgccgccggcaacaaccactcatgagcaacaaccacacacacacacaccgccggcaacaacgacctctcctcttatagctagctgaccaccagtttgccttctacctagagatcgatcgagaccactagtttccttaagctcctgctagttttgcactactagctcatcactgcctactacggagtattatctactagtactagtctagtacttgtatctactagtatatagttttgaattccaggtcttgtttgctgtgtgacatgatcatcgacatatgtgcatgtatcatctttggtgaggatacgagcttgtatattaatgctatatacgcagtacgtgtacgctctttgccttgtgtgtaataatgtgtcccggccggtttatatatatatatatatatatatgtatgtacttttaatttctatgtgtgtatctctatattatacacaacttaagatatttgcattggttatgcatgtgtgtactactctactcatatgtgcttttcatgctcagctcatgcttcatatgttaggtacttaggtgatcagcaagaaaggcatgcaggcgtaagatgtttggctgtaaggtttcttatagctttctcccagccaacccatacaattcactattaatacatgacccacttatctctctcataaagttttttggttcctgtgcctaagctgtaagcttattacagttgcttctctctccttccttctctcctccacctcagtatttagccagcttacaacctactataatatttgctcttataggcatccaatacaatgtcaatagtgtgatatccttgtacttttgacaagagcttgaaccaacttctagtcctttttttccttcattgttcttcaagttctttcttgtctcaatcttttttttaaaaaaaaggtggttc

SEQ ID NO: 4232 - DNA, 10100 bp, Sorghum bicolor
caaagtgttacgaatttctaaataaactatttgaaccttttcataatcatgcctcgacatgtgtttcatcaagaagaaatacaagagttacaatacaaagaagagtaacccattgctccagacaactagtggcgatcctaggtaattaggtgaacacctttgcaaactccaaacaatatgcttaccgctgacacccgatggctacatgacactaacccaaagaaacaaccataaaagcatcatcaaccacttagcaaagacaacagtgaagctagatgtctgtttcctataccgaattctagtagttgtggctaatagctttgactcaccatggaaaaccttgcgttgtttcctataccgaattctagtagttgtggctaatagctttgactcaccatggaaaaccttgcgttgtttcccagtgaaccatgataccaataggacaaaagagtcgaagcctttgcatcgatcattacacaatgcgcttctgccatgcatccaccataataacattatccaccagcactagagtcatttgatcaattggtagaaggatcctgtaccagacttccctatcctaaacacatatcactacacttatcacaaaagcacactgagccctgagtccagtgccatttacctacagtctagagtcacccatgtaaagctaaccaacagaagaagtatttgacatgtgatgatgccatcacaatgctatagttctatagtgtaagctaaaaagaaatcctttgaaagaaagccatgcctgcagaggcggaataagataaggttcgttgacggaccatttaaacattttgaaatttttactaacatttatgggacattggcttcgttttctaataaaataaaagtacataccattaaacgagagtttgagaagaatagagtttatttaaagctccaaacctagcgagcaaaacaaacggatcctaatacttctcacttaaagatgattcatcattgaataggtagctattctgtttcaaaacatgtgtcacaaaaccacctcctctcacacatgttgccaatctcattgccatttttttacatgcttgcgtcactattgcctagcctcctcacatgtgcccaaggactaacccaaacaaccaaccacactaaatcatttgaagaaaattaaactgagatgagaccccaaaaacaaaacaatgtctggtgttcaaatagtgtggttactacagcaaagacaaaccatgtgccatatgcgaccggctttggtttgaagagaaatatagttacacgtgtaaaaaggtagagaaatattataaagataaaaaaaaatctaaacatgtcattccaatattgtattaagctttttaaaaaaggtagacacgtaaaacaattgaaaggagagtattagctagcaggttagcacggggcctagtacgtaagtacgtatggaccaatcttgatcacgaaccaagtaactaaaagtggcaatcacactaagtgcccaaagtccaacacaatcaaaaaggttgccacgttgacgctttcatgttatcccaaacagtgaaagcaactcgcactatgcaatcattttttctggttttatatactatacttacctatagtcattttcttaatcaatttcgtcagcacttgcaaacttgtgtgacaacgttccccaaatttatatacatccgaccttttaacatttctgaattcaaactggcaagttaatccaattgaacaaatgacaataattcccaaaaaagcgtaagcaccacagttctggctggtccacaaacccactcgtcaccccgtgacagcaggaaaatagaaagcgcataatcttccaagaaaatttaataaaaaaaaaccctgaagaagccaagacggaaggaaaaaaaaaagtaggaaaaaaaaaactgacacataagaaaagagcagcgagcaagctgaagcctgaaggtgaaagcctgagcagctcgtcgtccccttccccccacttcttcctcagataaggagaggccccaggccagagggaaaaaaaaagcatcgattttccccccttaattggcccaagacctcagccgccgaccagcatcagcaagaggtatgattctcgcattgcttggcccctgcgattgcacgcgatttttgctgttttttcgagctcctcctgcgagtttttctttgccgtgttggaaccgcagctacgcagccgagctcgggtactagcgtgatttggatttggtcagtggatcccgttgggctgcttctccctcgcggccgattcgcgagagctagcaggtccccgggaagcgatctcatttttcgttatttttttagttccctacaccaaagatcagaatcagatccgaggctacccgtttgctagcgagcagaaacctagctttcaccggcaatcttggccgcctcggcaaggattttccccggccggagctctgcaacatggggggatcgatggctgcaacactcacgagctccggtgcccacgaatcgaagtcagcagcgcctcctggactgaggtaggtgcttgtttcgacgtccagttcgacgcttctcatctcgagaacccgtgggggccaaatcgagcttcctaagaccagggcacccaatcgagctgccacagtcgagatccccatcacctgaatcgaggtcctttcgaccagaacctaagctcccgccgccaccgtcgagatagctgtctcccaaatcaagctttccgtcgctgccggacgttggaatcggagcttggggccgcatagcttgagcttgagcttgctactgtatcaagcaagcaaaccaaacgctgggggtcttgctttgctgcgctagcttagcctatctatccttgctatgaatcacccgcctttttggtgatattttgacttgcgagtgcctgctgtcactggggctgcttttctcttctccttttggagttctgaatgaaacctatgatggcgttggaaggaatagaaagatatgaaacttacgcttgggtcggggaacccttacgaagaaagttttggcttaaaggtggaagttttttgagttttttccttgcgaaataaatgcattttttgatgttattgatggatttggttggtactcggtcaaaaggtgttcttggtttgccctttttatgctctggttgctgttgcaattgcaatttccgtttccctttgaatttggcgctctaaaagttggttctctttgcctgaaggatctcggttcttgttgctgactgggttgcttggatctatctgcaggcagacaagctaggttttactgctttccttgggcacaaagatccgctgacctcttggtaaaaatccaacctttttgtactgttttccccctgggaaaacctccttgtggtgcataaactgcttagtacacactgccatctctggagaaggaaactgagaaccactatccatatctggcacgacccttgtcaagaaccatggctgttcacttgccatgaagctgcttgaactggaggcacctaaatgctgtggattgttcctatgcagatgattggatcagtggtgtcaggcttcggcggttttgatcagatgttgtatgaataataagagcaggattgtttgagagactatagtttgggtactgtttgcttctctatttactggtacggtttcctactgatctgcggctgcgcagggaggcattctcttttttgccgtaccatggatgccacggatgttcaacagagcatgggatttatggagtccaggggtggtatgcctaagtttttccatgcccttggaccggcactcctgatttcaatggggtacattgatctcgggaagtgggtggcagcagttgaagctggttctcgttttggattcgacctggtgttactggctctccttttcaactttactgccattgtatgtcagtaccttgctgcttgcattggcactgtcacagggaagaatcttgcagaggtatcggcttaccgatgttgttccttggctttgctggccttctcttgagatttagttcagtaaatatttatttccatttcacaacactatatgatggtttcatattgagttggacatgaaggaactgtgaagactagggagtagggaaagtacatgtgaagtattccatttatgcatattgttgataaacaaaatgtatcaatttacttgccttgttaaatgattcttttccatctatagttcaattataatactactggatgtagacgggcttctttttgtaggaaaataaatctttatctcatattacttgttcataatattcctttgaagttgctaactttttcatgttttcacatgaaacaaagatatgccaccaagagtacaaccagccaacatgtattttcctgggtgttcaagctggattgtccttgttgacatcagagctgactatggtatttgcacacttccttggatgtctctcatgtcttttgatgtttaatctgtgaattctcatcctgtaaggcaatgttacatgaagtagttctgacatgctagattctgatggctatatctggaattttcagatttttggcatagcactcggattcaacctcctgtttgaatatgatgatctcatcacagggatatgctttgcaacagtggtgcctaatctgctaccatatgctatatcccacctggtaagattactacttcaagaagcatacttgcacagacactgatacactaatgagactggaactttgttcccttatctaaagaaaaactaatgtactttatatttgctagttacttacccattatgtctgctctagggaaagaagatggaagggacagtaaatgcctgcatagcaggatttgcacttcttagttatgtgcttggcttattggttagccagccacaaattcctctcacaatgaatgtaatattccccaagatcagtggtgagagtgcttactctctgatggcacttcttggtgcaaacataatggcacacaacttctacattcattcatcagttgtccaggtaaattgtttgattactgcacttggacttaatatttaggggacaatggcttgccagaaatacttcaaagttcaaaccatacatttacatgtatttcaattttggctggttttctggggtttagaaactcctaagattcagcagcaagatcattatattgaacttctgctcatgccagttgaatattggatgaaataaaacaagatgtaattaatcattgtggatacactgcatcgaaataaaacaagatgtaattaatcatgtttcaattgtttgcaagacttcatacacgttttcactataggatccacactttgttcatctgtagtgtgctcagcttttggaaaaaattgatagttcatgaaaatttgcatcttatgtttgggtttgtagcatattacaaaacatcaaaattgtaccatttctaactttttacatcatgctcagtggataatattggcatgcgcaaaaagaatgaaagtagtgacagtttgtgcacttgcagtagtttgtttttgctgaactgtcttcagtttctgtgcttgcttatacttaatcaagaaacattgtatttgcagggtcagaaaaagtcgtctgcagttggtcttggcgccttatttcacgaccatcttttttcaatattgttcatttttactggaatctttatggtgaactatgttctaatgaactctgcagcagcggaatctactaatactcttctcattaccttccaagatgttgtagagctaatgaatcaggtaagcacctaaatttcatacctgttcacgctctgtgctaagtttctgctgaaaattttatttaggaagcaatcctactccgctatagaaaacttaacttttgagtactctgcagatatttgtaaatcctctggcaccaactatatttttagtggttcttctcttctccagccacatcatctcgctgacatctgctatcggtagccaagtgatttcacagcatttatttggtataaaccttcctctttctggacatcgtctcctgctgaaggtttttgccatagttcctactctgtactgggcgaaagttgcaggagctgaagggatataccaattattaattatatgtcagattatccaggccatgctccttccatcttcagtcatcccactttttcgtgttgcttcatccagatcaataatgggagcccatagagtgtctttgcatctggagatactggtttttcttgcatttctccttatgctattttcaaatatcatatttgtggcagaaatgctatttggtgacagtggctggatgaacaatctgaaaggatatactggaagccctgtggtgctcccatatactgttttcattttagttgcatgtgtatctgtggctttttcactgtacctggctgttacaccattgagatctggaagtcatgaagctgaatcccatgaatggtctgtgcattctcagagagaactcttgaatactcctcaagaaagggaagatgttaaggtggacaatgttacctatgaggaagatcagagatcagatgttggcccttctcccagggatgcgcctgacagccatccggagctggccatggactatattgatacttctgacactgctgtagaatctgatcacgactctcaacaatctactgcatatgcatccactgctcctgaaacctgcccctccccgtcatttactcgtgaggagtcaaaatcagttgttgcagtcaactggccggagcctttggagaaggttcctacttctactgtgatagaggaaagcacagtagaaagtgtggtctctaggatcacgactgaaagagatgttttagtagaaacagatgttttctcaggcaaggataaggaagatacacatgttttggagtctgagaagtcaattgttgatagcaccccttgtgtgtctgatgatggtccaccatctcttaccttcagcaggggaaaaggctcagatgcaggaaatggcaatggtagtctctcgaggctatccggtttgggccgtgcggcaaggaggcagctagctgctactcttgatgagttctgggggcatctgtttgattaccatggtaagctcactcaagaagccagcacaaaaaagtttggtatcttgcttgggatagaccttagaacacctaccacagctgtaagaacggataagcaagctgttgaaatacccaagagcccactggtgagagactcaatgcggggggcagcttttttgtcaagttcagtggacctgatgtcccctaagaatgagacatcgaatttggaacttgcatatgggcttcagaggggaccggccatgggattgtcaagctggtctcagggtatgcagctaccaaacacacagctgcagagctcaagcaacagcctacttgagcaaagtgcaagattaaactcaaattttagtgcgccatcttattcagacaacaatcaattctaccaacctgcaacaattcatgggtaccagctcacatcttacttgaaacagatgaatgccagcagaaacccttactctagcatgccactggacccacagcggcttccaaaatcatctgtgtctgctgtgccaacctatgttgattccatgatgaatgctcgtaatcataatctgcttgcttcactgggtgctactccttcacagattcctgcaacatcccgtgtaggctcaatgatgcctgaaagatcgtattacgatccttccactgttgatgggaatgaaaattctggttcgcctgcttactcaaaaaagtaccacagctcacctgatatgtctggaataatcgctgcaagtagagctgcactgttgaatgaagcaaagttgggtggtgccattggaccccagtcataccttagcaggctggcgtcagaaagatctcaatatgcaaactcagcagccaggcctgcggctccattagcatttgatgagctttcacctcctaagctccagagtgatatcttctcggcgcagtcgagcatgagcccaagtgctagatccctttgggctaagcaaccatttgagcaactgtttggcatgtcaagtgcagagctcagtaaaggtgacttcaatctttcaggcagatcaggtggcatggccaaggatgatttctcttataaggaatctgagacaaagcttcttcagtccctcagattctgcattatgaagctccttaagctagagggatcagggtggctgttcaagcaaaatggtggttgcgatgaagaactaattgaccgagttgctgcatctgagaagctattgatgcaagggactactgagaatcaactgcttcatggtgatcttcagcaacatacttctgatcaggtgggcatccaatacatgcgcacacttcccaactgtggggaggactgtgtttggcgcgcatcactcgttgttagttttggtgtctggtgcatccgccgagtgctggacatgtctctagtggaaagcagaccagaactttgggggaagtatacctatgtccttaaccgtcttcaggtgagttgttatggtcctgaactaatttaactttgtgctcatttttggtgtgttagatttttttttgcttgcaatctataatattctgtttttaatacttgcttacaattaggggtgaaattcattgaaatggtattgcaatataaaaaaatgaccggtttgggatttttccttatttatgaacttaacgaatatacaaatggttgaaaatagttgtgaaaccagttgaaaatgacatcttttatgtttgaataaattcggaaacaatcgaaaacgcttacaattattcatcttgtgattcttttgctacttattttatgcagggaatcttggacccagcattctccaagcctcggagtgctctgaccatatgtgcttgtcttcagaaagacatcagagtgctcaatagtccacccggcagtgggctaacagccatgggtcccatccccataccaatccgtggcaccttcacaactgcaggtgtggttctggagacgatcaaggatgtggagaccgcagtctcaggccgcaagggcaggagtggcacagcagcgggcgacgtcgccttccccaaggggaaggagaacctggcctctgtgctgaagcggtacaagcggaggctcgccagcaagggacagtagcagcgtcggacagcgattgcaatgttaggagtctgactattgttctccagggactgccatcggcctccctgagtcctggattttttcgttacatgacgttcgtagggaccggttgcccgatgatcgttttggtcccttccagcaagtttttcttcttttttttttttgtttttttggcagtgtcatgttttgtaagggcaactacgtgtgtgctcaaaagaacccaagatgtacacgcaaaggagatgtagtctgctgatgcagcattgtaaagtccacactctgcaggttaacccttttttggggccgtcaagtgttagcgccctatgtatgttatcaaccctgcagagaggttgcaaatactgaaccactctcacaaacttgcacctgtcgagatcattttgtaatctactacatctttgttcagaattgttttttttttcacccgttgtgtagtttaccctgaagggactttcgtttctcttgaagtacgtgcttcggcacgatcgtgaataaaactgttagcatcagtcagctgcctgttgagcagtaagagaaaatacaaagaggtatgcaagcctaggcttacatgagcgcaacaccattttacattcaatgtgcttcgtcttcaacagatggttggtctgaaaatccttgcatttcgctctttcatggtatccaactgatgctaactgtcggtctgaatcgggcctctgctctgattctcaactggggcagctcaggtcagggaaactggagatggcgtcaggtgctcaaaagcgaaatgtgtcacgcgcgtctatgaagaagcacattggatcaaagagctatttatttatgccaagcaagcgagatgattcagatgtatccaaatggccggtccgaaatgcagaagatgatgagtaaatatg

SEQ ID NO: 4233 - DNA, 3025 bp, Sorghum bicolor
tgccgtcgtgaacgcgaagcagttcgcttctccatccactgcaagtacgtacgtccggcaaccatctcatcattccaagtgctgttctctgcccagtcactgtattgttgaatcgtgaatgacatggttggcgttggtgttgccttgttcttcagctgttctcaacagggcctgggccgggaagcgcgatgacccgatgaccaggcactgtgcttccgcaaccgccgccgccatccacaccaacctccagagcaacggaggtatgttttgtacgctcatggaacatgagcaatgagctgcagcagctagtaaccattcctggtcccagcacagtgccagttctgaactctgacgtgatgtgtgttgtgcttccggctgacaggcctgctatcgacgttcgaggcgatgcgggacacgggcagggacggacagatcgtgtccgtcaggatctcccaggtgctcttctgattgtaccctccaccctgaatgtattaaagctgccttggctgctgtgatttatgctagagtaggccaggcgctctgttattggcttattattgctgcattcctgtctatactgtagagagaaagttgagcagatttccggcttaatgtaatgccgtacgattttgtgaacttcgcgtgcactgcggtccttattagtattgtataagtactggaatctgctttttttgcttaaaggttatactccctccgtccctttaaaagagtcgttcaaggattcaaatgttgttccagaaaaaacgtcgctgagctgtgttacaggtcctagattgcttgtactactagtaatactttttaccagctataataggctttttaccagctataataggggtatgcaggtactttatcaccttccttggtacaagtgctttgctcccaaacgacaatatttatgggacagagggagtatgttatacgagcacgattctgcacgaatgggtttgtcattggacccatatgcgatttctggagatgccgtcgtctctgttaataaaattgttttctaaaattgtttgttttctgtagtgtaagtctgtggagactcaccagatatgaagaaatgtatgtaaatggccagttactaatcacgtggtttactatatgtacttctaaatacatgagttgggccaagtagcaatagtacctgccacacacacacgtggtcttttatattaattggcaggctaagcagagcagttgttatcaacttgtattgctctttgcaagcagcctaatccaaggtacccaactccaacacaaaaggctccttgcctttggagtacatacatggcttataaccatgcaaaatgcaatggatggcctactccttgtactgataatattggagtagtacttctctgaaatgaaccgaaacaaaagatcaaggtacgactgagtaggaaaatatattctactccgggctccggccacaaactagtggtacgattgagttgcctttgcagctcatgcatgctgcaacctgcttttctcccacttttcctgtcggaatgtagcgtagtcatccatgatccacgccacgcgtacgtgcgtgttcctgctcagaaatctccagccgaccccagcagccagcactactgatgcagcagtgccggcatatgcagccacacagtggcaaaaatatcacaccattggccgacttgttttctcatcgtgcctctgccttggcatgcatggacaatcgctaactgtccaggcacatttgaccttaaactcttgcgatgtaatcactccattgggcagtgccggcaacctaatcctctcatagtttaaggctttattaagccttgcaactggggttatataagcaccattcctgccatcgccgggggcattagccatcgtccaggcgtccagtcctctccctttctttccccaagccaccagctagctcagccatactctcggcgagcctgaagcagccataggagcacaagccgagcacaaagctaaaaatgggcaacatgctgccatgcctggtccaacaagcaggcacaacaggtgctctgccggccagcatgaaccccaagcggaggctcatctcactcaagctcctcatgaaggccatccacaagatgaagaagaggcccgccggtcccggcaaggcggcggccaagatagatagcagcaaatcgtcgtcgtcagcggcggcggaggacgggaaaggaggagaagtgcttgatgaggcgagaagcaaggccgccagccgcaccaacaatcccaagggtgccgtgctgaggtccaggctccacggccggagaggtgacctgcaggtcaagaaagggaataagggcgtcgtgcgagtgaaggtggtcctgaccaaggaggaggccgcgcggctgctgtccctgaccgtcggcggccagaagcacaccgccgcgcagatcgtggccgagatgaggaagatggaggcccgccgcgccgccgccaatgccgcatggcgcccggcgctggccagcatcccggaggagtcgtcgtagggaagaccggccgatcgatgagctcgtttgttaacatatacgtagctctatgcatgctttcctaggcagtcgtgctctgctccatgcgttcatgaaagctcagaagcggccttgatctccggtgctgatagcaggagactggagagcaagagaaggagctagaagagacttgggttgagaggcgaggcgacgacggcgtatcgtacgctccccctcccatgcacgcggccggcgccgccggcgtagatcctcgatcgccgtgccggtgtacagctagcttcctttttttaaaaaagcttttgtgtgtgttctctctgttacagtaatcgtctcgatcagaggcgcctttgtagtgtcacaccacaactagcaatgaaagaaatggaatgcaaaagttcagctctttctcatgaaatgtttgctatgtacgaatgtagcaaatccaactgcatcaaacgtaagtactgaattggctgttttcatacgtatagtactttcag

SEQ ID NO: 4234 - DNA, 5945 bp, Sorghum bicolor
tgatcagcagccgctgccagccagcaggcgacagacaggtgactggccattcctcgtgcatgtttctcgccagatctcggtcggtactgcagcaccctcagaatctatcgagattctcttgcccagctgtcagatgctttctttcctttttttttttcccttttctttctgctcaggagatgcagatgctgctccattgttttccctggatccgatccagagctgaccttgcattttgcatgcatgtagggccttgtttacttctaaatttttttgcaaaatataaatagtagcactttcgtttgtatttgacaaatattatctaattatagactaactaagctcaaaagattcgtctcgtcaattccgaccaaactgtgtaattagtttttatttttatctatgtttattactccatgcatacgtctaaagattcgatgtgacggggaatctgaaaaattttgcaaaacttttgggaactaaacaaggcctaggaaaacgtgaaaagagcatgagcagtgtgtgaaagggcagaaagccaatctctctctttccttcccaatgataaggccttgtttttgaattttttttatcacctatcacattaaatatttagacacatgtatagagtattaaatataaactatttatgaaactaaaaataaagttagagaataatttacgagacgaatcttttcaagcatataattaatctattattgaacactaattaacaaataaaacaaaaatactaatacctgttacattttaacacatctaaccaaacaccacatgtcctttcctccttcgtggccctcgatcaaaaaaaagaaagaaagtgagggagaaagaaatatgcctccctttggccgccggtcagaaaaggcaagggatgaagtagctagtgccttctgccgaataacttgtccgagggttatctgccattccgtttccacagatttgtttcccctttctgccttgacacgtcgaggaggcaaaggatctcacaaggattggttgccgccggctaaggactggtttagccaatccttgtgagatccttaagagtcgttcttgccttcctgctgcctgccctgatacaagatagaggaggaaactacacgagcgatctagagctgctagcagattgatagcatagccatagcagcactgcatgatcgtttgagcgcacgtccctgtcccggagtccaaatcagccttaccgccggcctcggtgtcgcccgcaggctgaccgcagcaaaagcgcggcgaaaaccagtccaatccgttcagggattggagctgtagtagtactaggagtactcgtcgtcatgaaaaaccagtccacgccaacgccactgccagatacgccgacgccgacgacctcaggagacgcggggacaccaggaggaggaggaggaggaggacatgagcaggccacggcatcgccccgccggctcgccgcgctcctgccaaggttcgtcttgtttccgtccgtccatccatgtccgttcgttcacctcacccgtgcacggacgcgccgaaagcaatcaatcatcagccatcagtaccgagtagtacgcgaagctgccaatcatcagtgaatcccctgctattactgctagctgccatgccaaagcttggaccttttcgcgagcgggcgcatcccctccaggtccagccaagcccatgcagacgcatgctgatgcggcccatccgtccatggcagtaggcagtagccgcccaccattaaaagaagcaggtgcaggtgcagccagcagcaggcacagagaaatcgcatgacacggccacgggcagggcagggcagggctacatatacagacacccaccacgcgcttcctttgctccctcgccctcacacctcctcgctctcgccgggcccgtgcccgtgcccgtcacaccaaaccgtcccgtccctccacccccggcgggcctcgcacgcacctaccgtccctcacatcggcttcttctctctctctgtgctgtgtgtcggtgttccagcaggggcagcagcagcagggggacgatggcgaagcggccgggcgttctgtgggcagccgcgttggcggtggtggtgcttgcggcgtgcacggccgccgccgccgccgtgaccatctcgcggaagcagcaccatcgcggcgggtcgtcggcgtcgtcggcggcgcggtcctgcgcccccttcgcggcgtcgggcgcgtgggtggtggacgagtcgtacccgctctacgactcggcgcggtgccccttcatccgcgacgagttcgcgtgcgcgcgcttcggccgccccgacaccatgtacctcaagtaccggtggcacctcgacgcgccgtgcgctcagcccaggtaaaaattttctgccgtccggactcgtctggactgactgtgtgatcgcaacgtcgctcactgggtggcaatgaaggttcgacggcgcggcgctgctgaagatgtggagtggcaagacggtgatgttcgtgggcgactcgctggcgctgaaccagtacgagtcgctgctgtgcatgctccacgccgcggcggggcccggcgtgcggaccagcctgtcgccggcgtccgggaagatcgacccctcctccaccgtccgcttcgaggtacatcctttcctttcctttacatgcatgcttgctccgtgcctcgttcgttcgtgtcgtgccgactcgattcgattcgattccatctgtcgcccgatcgatcgactcggtgcgtggtttgttcggtactggccctgctggtccggtaaaaagctggctcgatggttgccggttgggttgggcatcatgacatgggtgggacgtgaactgggcgcaaccaaccgcgcccggtggctgcctctgtcggtcgacggggccccggtggccgcgtcggcaagtctgggcacatcccggcgcgtgcgtgtgccgtgtgcgcctgcgcctgcgcctggctggtggcacacgggaacgtacgggacccggctcggcgcaccatcaaccaattgctgcaattcccttggtgcgcgggcgccgggcgggcggggacggggccgggggttcgctggcacgggcggcggggcgatctcgcctggtccggacgggaatccgcggtggggtgggggcgtgggggacggtggtggccgcgccacagcagcagcagcacaagtcaaccggaaggaaaagcgagggggtccccctgacgcgaggtcctcgccacacgactctggtctcgtgcctgcctggcactggcactggcagccatagccgcccgcgcctgctgaaaccctgcacgtcttgaggattggtcgctgtgtgtccgtatctgaattgttttgtttgtttattgtttggccttgtttagtcgaggagctaaaaagtttttaaggtattctaatatttttggtttttatttgttaattattatttaattataaactaaataggtttaaaatattcatctcgcaaataacagacaaattatacaattaattattttttatttatatttaatactttatgcgtatatcgaaatatttgatgtgatagaaaatcttgaaaagttttggatttttgggtgtatctaaataaggccttagtgtacgtagtcttttgatttttctacttttggtctcgtttagtacgggagatggatcctacaagctggaaactgcatgctaatattgtacgagtactatagtactacaatgtacagtacaatgtagtactcctaccactttggtaccggtactggtacagtagaaattgggaagggagcatggatcaggcagaggcagagcagtcgggcagagcaaatggccaaattgatctaccacccaactccgggatccagcgcgcgtgacatgctggaggttggtggttggtgacgacgatactagagtactggtcagagccctgcctgtccgcttccgtttcgtttcgatgtgtgcccgtgtcagatgatggtctgagcgccacaagagttgctctgacagtgtactaatacgcccttggccgtttcctaatttcctggcactggctgccagcttggctttgttttgtacgctgcctttttcgttttgagctctcgtacgcacgcgcggtgggtgcatctccccggcctgccgccgtgccgtgccgcggcgccattgagcgccgacacgccgcacgcaagtgcacgggcacgggcacgttccaggcttgcttgtactagttggttggggatctgccgtactagcgtgctgtgttccatttccatggcatgacatgactgctcgggtgagtgacattgacggccagtcttgtttgtttgtgcccggtgcaggactacaacgtgaccgtcgtgtactacctgacgcactacctggtggacctcgtgacggaggcgtccggccggcgcgtcctcaagctcgacaccatcgaccaggcccgcgactggctcgccgccgacgtgctcgtcttcgactcctggcactggtggccgcgcaccggccccacgcaaccgtgagtagtactgcttcacattccttgcatcatctatctgactgtgcttgtgcatgcagctgggactacatccaggtgggcaacacggtggtgaaggacatggaccgcacgcaggccttcaccaaggcgctgcgcacctgggccagctgggtcgacgccaaccttgtccacaccgacaccaaggtcttcttccagggcatctcgccctctcactacaggtaaacaccacgccacgccatgcattcactaactctgaagaacggccacggcggcaccatgtccgcccttggctcctcctgaccgctgcaacaagcacaactgaaccacgcatgcattgcaactgcatctcactcatcagcccgtgtggcgtgcgtgcaggggccaggactggggcgcgtcgccgaagaagacgtgcatgggggagacgcggccgctcaacggcactacgacgggagcgtacccgggcgggccgatcccgcagcaggcgatcctgcgcggcgtgctggccgggatggccaagccagtctacctgctcgacttcacctacctgtcgcagctccgcaaggacgcgcaccccaccaagtacgacggcggcatcttcggcggcgactgcacgcactggtgcgtcgccgggctcccggacacctggaacgtcctcttctacgccgcgctcaccgggcaggactgattgatgactcattactagtagtacattttttacagacagacagacagacagtgttactttattactggtataagctagcttagggtggagtagctcaataagtaaaggaaaagatagcagattggtttcttatagttatagcgggggtcaaaagattttcaacccaaatgagttgatagaagaatgtcaaaagaaaaagattgtaattccttcctgaattcaatggcaattttttttggggggtggtttatacaaaggagcaaactcatttcttgtgagttatgactctgcaaatttatcgaggtcattgatttcttttccgtttttcttcaaatggagtctttttatatgctttgtccaggtactggacgcgccaaatttcgatattatattattatattaggatatatacatattgactgggccgcgatttgaagtgaagctgggctgctagcacgctctccatatgtggcaaacggcctttttcgtaattgcgtccatggcattccatgaaacgggccaaatggtccactaaaaaatgggccagaagggagcggacatgaaatttgggccgcgtgcttgatacagcagacgcagaccaagaaaatatctgtctcatttaaccctacggtccaacccacagcaatggagcacgcaaacggcccgccatgttcgcgagtgactcttctcaggataggctgatggttatgggccaccatacaaggaaatgttgaagagaaggaaaagtt

SEQ ID NO: 4235 - DNA, 5479 bp, Sorghum bicolor
tcgggaccaccgttgacgggtgagagacccgctacgacctgtatcggatggacccgatcgcgtgaacggtcgatccaacggctggagagtaagcgggtgacgtggcgctatcgggtgcccgcttttggtgcaggattcgtttatagagaagattggacggatgaaaaattggacggatgaaaaagtggcagactgaaattttcatgattaaatattaggtatagattacgtgtggagcgaggggtttcggttgtttttcttaatttgttggattcctaccaacgacgtagctaagatctaaagtaagattggtctattttaaatataaaactaaattatagagtaatacatatataatttttatgattttagagaggtcatctactataatttaacatttacggtactaaactttagtgtgcttcatggaccgtatgtctacttagatagctctgcctatgattcctacctagtgaaccccaaggtagtcccttctcccttgtgcttgtgcagttcacgtagtttttctggttttttttcctgttatttttcaggaaactatggttgttgtagcatgtcacgggtcatgtactgaccatggattcctcagcaagttcctcactcatgctgattaaaacgagcctatagtaatactaggatttttaggtattggaacaaattctgccttcatcgtttctctaggaggaagaatagaccaattattacaaaatcacactaaaaaaaccaggaagccagtcctaatgtccaagatgataagagaaactccaccgaagtgaagcaatcaaaaacctaacaccacactctaaaagcctacatgcatccacaatgaaagttgatcttgtgctcatccaggtaccataggtagctactcactctattctaaattataagacgttttcatatttctagatttataacttttgttatatatttagatatacatcatgtttagatacttagaaaaacttgtttttataatttagagtaggcgaagtctgtgatgagcagtcagttgtgtactagcactatgtatatctaagtttttgttaggccttgtttatttctaagataaaattttttttggatgtcacatcaaatatgttagcatatatgtgaagtactaaacatagactaataaaaaaacaaattacatagctcacctggaaactatgagacaaacttattaagcctaatgaattcgtcattagcacatgtggttactgtagcagttatgactaatcatgggctaattaggcttaaaagattcatctcgcgatttacaaccaaactgtgcaattagtttttgttttagtgtacatttagtgatccatgcatatgtctaaagattcggtgtgatggatgaaaagtttttgagtgaggaactaaagaaggccttagtagacacagtagataatttagaaaaacttgtttttatactaagtttttcttagtagacacagtagcctagaaagaggaacatgatccacgttttctatttctgtttccatgttccacgttgtgtaaacgtataagaatcacatgttataaaatataatatcctaggtcctcgtaaaacacggctgctaagataggcacgcatccatcgtgtgttagtatgttactgactggtggtgcatgtccaccatgcagactgctgacagtttccacgggcaactcgagtccagccatctcgcatgccggcactgcacggtggctcctcccgaccgtatgtgacgcgagagaaccggccgggagcgcagagtgcatgcagcgaggatcacggcggcgggattgccggccggggtgacggagggagtcaaaagattcgaagatcctccccagcttcgcttctagaagatctctccccgacgctccggcccctagtctcccgggcctgcccctgccactgccggaaaaccgctcgatcggccgcgcccccggcccgcctcatcactgactgatcatcacagaccaccaccactcgtccactcgcgcgcgcactccgaccactactcctataaataccactgctcgtgcgctcccctgatccagccacaggccggtcctcgatcgatttggtggcctgcaacaaccgtgctccgcgcctgcggccatgtgctcatccttcctccgcgtcttcttcttcttcttcctcctcctctctctcgcagctcgatcgtggcaccagcagggaatcgaccgaaatcggtggctgctgccttctctgggtttgttgctcgctcgccccatacgtctttgagttgagctgtcgctggcctccgtttctgtacttgttgatgcatttcccgttcttgatctcaactcatacaggtgtctgatcgctctgtccacaccaagcacagaacactgttcctccttctgcctgttgttcattgatcgatttctgtgcgtggtcactgatccgctctcttgagtccatggagcggggagctccacgcacaccatcctgcatttgttcgtcgcatccttttctcgtttcgtgacggccgggcaagccggcggatcatccaagacccacacgcaccaacgaaccctcgcctccaccggttgtcgatcgcccggtggttagacgcaacgagagatggtgcatgagcagagcagcggcaaccaccaccaccaccaccagcagcagctgccgaggttcggcgcccgcgccggcgcgggcgcggccaccggcgtgtcgcggccgtcgaagaagagcaaggtcaacaaggccccgcagcgcggcctcggcgtggcgcagctcgagaagctccggatggaggagcagaagaagatggagggagccgccaccgccatgtcggtgtcgggggccgcgcacctcggcggcgcatgcggtgggctcggccacctcctcccgatgcaccctcctcctccaccgccgccgctgtcgctcagcgccctgccgaggcccggcgcggacggcggcggcgtgcactgcggctacccgccggtgctctgggacccgtcgtccgcggaccccatgaagaatctgtacaagaggagcctgtgctcgcagccttcacttccatcggtacgagtgcctctccttctcttcttcagagttcagacggccatggccatgcgtgctgtctacctttcagagttgattgacgaggcatcagtggcatgggcaggtgagcacgggcttgtcgctgacggcgtcgtcgagccacccaacggagcccccttcaaaccaaatgtacagcagcagcagcagcagcgtttgcaggagcagcgcggcggcgccggcgccggccgacgacgagagggtacacgctttccttgaggcttcagaattagtaatactgtgtgcagtgaaaatgttcttgcgttgctgctaagtgtggattggccagagtgtaggaggcggccggcgtggatcgatcctggcccttcatgttcgagggcctcaacacgactgccttccggacgacgatgggcaaagcgcctttcgcccccaggacgacgagagaggccgccgccggcttgcctgatgtctgtcctgacctgagcagatacgagttcagagcctcaaactatctcaggttaaatttctaggcctaattcacatgtttcaatgttctgaacattataatcaacctaactttagttaaaaaaaaatctctgttctgcagctcgaatgcgagttattcagactggccatcggagtttgggcactgcaagagcagcaaggacagcgaggctgcctaccttaccttgaacgcacagcccacgccacgcatgaagtcgcagcagcctcctgcgctccccccgatccacctcccggagttcggcgacttcggcgtcatgcagtctcaggcaaggccttgtttagttccgaaaagatttcggatttcggtactgtagcactttcgtttgtttgtgataaatattatccaattatggactaactaggatcaaaagattcgtctcgcgatttccagctaaactgtgtaattagtttttgctttcgtctatatttaatgcttcatgcatgtgccgcaagattcgatgtgacggggaatcttgaaaactttttgctttttaggtgaactaaacaaggcccaagtggagtttgtcttgccatcttctgcccaaatctgtggctccctgtgcgtgtgtgacgttctcacggtcacggactaacctaaccttttctaacagcatgggagcgcttcagcgtcgtcgtcgtcgtcgtcatcgcggccgttctacagcttcatgccggttggcccagttcgctgcgagagaccgctgagcgagatcaaggccgacgcctctgacggcgtcgacctggagctgaagctgtgaaggagctgagctcatcactggaatcctccgtcccctctgttccttcctgataaaacatgacacccaaatctgcagtcggaaacacggaacagcgttcgtcgtcgctgagaaaagattgtggtgccgtcttcggtttgtaacctgaaacacgatgtgtatcagaatttgcgttcttttcaagatttttcagttccaataaacatctggtgagggctactggctacctagcagccaccccctgcaagattgccgctggtggactctgtgcatgatcgaagcacgaagcgtttgcacatggctccgataagatcgtgtgtagaaaacagtggcggtgcagtgttgttgaacaggctttcagtaatgaaagaagagcacgtgcacgatcggcattacaggcttgcagctgcatcctgcagctagctagcctgtggggtctttttctgtatagatctagcaaggcatcatggtactcccagatatatatgcacagatagtcagatagatgtacgccaagatatgcaaagatggttgtaggtgttctgttttttttttcttatttggaacatttgtgttgtggatgttaatgctacgtgcaatggaatcacagtatttcccattttatttgacgttttggcgcttcatactaactctttatcacttattatatctcagtattaaggccatacaatggaacctctatgttaatcctcgtgaacatgtccaccactaaacacgtccacgtcgatattaactttcattcaaaaaaaaaacgtcgatattaactcataggttgattctttaaggcctgagactcccctgttgattccgattgaagtctttgaggcatcagccgtaccgaacctaagctccaaaacaattactattagattctccaaatatatacaaccaagaccaaaagcttacaacagctggttataaagcaaaaagtattttttttttgggaaggtcaacggggggaggtgctctccacctgaattttattccttatcttggccccaaaatggcccatcagagcgacagtttgcaggatttacatggtttacaaggaactcataacataacccagttggatgcaagtgatttcctgagagaagaaaccaga

SEQ ID NO: 4236 - DNA, 7170 bp, Sorghum bicolor
acttgaaattgttcattttcgtgaaaaaaaataagaattgtaattttcttttgaatggagggagtatccatcatattgttgtttaatcagtatatccttaccaagttacaaataaagaagcgtgaacctaagagcatctccaagagcttttctaaattttattttctaaattattatttggagagtcatttgcataaaatcgctttctatatctttttattttcaacagtttttctatatctcatacgtactctagagagtcattctcgtcttatatatttgactagcgaaaaattcgaaatagaaaatagttatatttagataatcatttagataaggtgttggagggtagttttttttttaccaaaatctctcatgaagatgctcgaaagaaaattcaatcgggaaagaagggggacagctcgtgcaaggggcaaatatgatatggtcgaactcgcgcaattcaatgtggggggagagagatagatgtctttagattagaagatcgagaattcacgccctggggctagggggaatgtctggagtagagcgctggtaagtattaaaaataaaaatattaaaaggagcgagagctaaaagaaaaaggaaaagagattcctttaagcactgcactgctcgcctgccaaatttttattttgcggtaccctcttctctctctctctctctctctctctctcggcgtgacgggaaaaaggaaaagatgcaggttgtattctagcgatagaaaaaactagcaagggaaaaagaaaagctcggaatctcgcctaaagcatgtgcagaaagccctcaattatttgtggtataaaccagcagcgaacctcgctgcttcacttcatgtaccctaaccaatgcaaatatagaccctttggaatacaggattctttttttcatgtgaaaaatgaactgattcctctgagattcaatttctatatatacaattgctgtgaaattcaattctagataattaaatattctagaactgaaatatcttctctctctatttactgaataaataaataaataaataaaaccaagcacgcaaaaaaaaaaaggccagcccgggggggattgaattggaatgtaggtacgggagtgctgctttcggcgaatattaataatattattaccagagaagagatggcatggcaggactaaattacaaggttgcaggaggcagcacggaaccatcgttttccgaggaattattacgccggcgaggcgagcagagaagaaggggcagcgaggctccactccacggccgattcgatcgtttttaaagtaccaccagctagtagctagggtgaagcacatcgatcagctgccgctggtggtactggcagtggtggtagctagtagctgatctcctctccgatcctctccggccccctccttccatgtgtccggcccggctccaaatcctcctcgtgcttgccgatgtccgggcgttagaggaaagcggcggcaccggtgctccggccatggccactcgccccctccgcccatgaccgaccccaccaccccattcttctactccctactattacacggctactacaccggggcacgcacatgcctcccacccccaccctccatcgcttgcattgagcaacacgcacgtcgtcgctccgccgccaatgcttgcatgccacgacccaccagtcaccacagctactggcctctaccttcgccctctcgctagcctagctaggatagatcgagctgactatctgaccacaagtggtggtagccacctgctataggaggagtataggctatagcaactgccgccagctgccagagctcaagctcagctagctagctacgagtctgctgtacacggtacggtgttggccgcgcctgctgctagctgatcgagtacttagttcttggttgctgtgccattgcagcggacgccggcggcggaccggggccggggagggagagttgggagacaagttactttgcttgtgtacagatcgatggtgacggcgaaggaggccgcggcggcggccatggacgccagcaagtacgtgcggtacacgccggagcaggtggaggcgctggagcggctctactacgagtgccccaagccgagctcgctgcgccgccagcagctcgtccgcgactgccccgtcctcgccagcgtcgaccccaagcagatcaaagtctggttccagaaccgcaggtaattaattgtttgcaagcttagtcgtactcgtacgtacgtgtcttcctatatatatatatatacctgtcctgccgccgttcatggcgccgcgccggccgtccatgacccgagaatctccatcgccgtacgcatcgatcatgcacgcacgcacgcaggtgccgggagaagcagcggaaggagtcgtctcggttgcaggcgctgaaccggaagctgacggccatgaacaagctgctcatggaggagaacgaccgcctgcagaagcaggtctcgcagctcgtctacgagaacggctactaccgccagcagacgcagcagagcgtacgcatcgactctctcatgcatgcctcctgctcctctcctccctgttcatcaccaccttcatctctcctttctactgctgtgctgtcttcatcatccctctgccgacgacgttgttgcaggcggggctggcgaccacggacacgagctgcgagtcggtcgtcaccagtggccaccagaacgtggccgcggcggcgccacaagcgcagccgcgcgacgcaggccctgctgggtacgtaactacgtacgcgatccttctccttccttgccagccagcccgtgctgcttttgcctttatttcgatcgccatgctactttggcatggctggccaggcctactaccgtacctgcagtatctgtaagcgacatggacgtttccttgtctctgcaggctcatgtccatagcggaggagacactgacggagtttctgtccaaggccacggggaccgccgtcgagtgggtccagatgcccgggatgaaggttagaactatattgctttttccctgttccttcttcctttgatgaattgagtgagtgatgagattatattcctctcgtggcttaattgctcaatctttcttgtctcgccatgcatgggcacctgcagcctggtccggattccattggaatcatagccatctcgcatggttgcgcgggtgtggctgcgcgagcttgcggcctcgtgggcatggagcctgccaaagtgagctctcttgatttgatttgcttcacttccctgcatgcgtgtacccttgtggcccctgactgccctgagtatacataatacataactgagtgctgagtggtgcctgttcaggttgctgaagtcctcaaggatcggctgctgtggctacgcgattgccgatctatggaggtggtgaatgttcttcctgccggtaacaatggcacaattgagcttctctacttgcaggttattcgaactgctttttattctataaaactgattgattaactcaaagggaatagcttacttagataccatgtttttttttgtgtcgtctttagctctatgcccccacaacgctggcgccagctcgggacttctggttgctgcggtacacctccattcttgatgatggaagtttagtggtgagagtctgaggagcgtcgaacatacatatgcgattatatatgtgcatgtatccatctgccagctacttgactttgcttgctctaaaggtatgtgagagatcactcagtaccaagcagggtggcccaagcatgcctcttgtccagccttttatcaggggtgagatgcttcctagtgggttcttgattcggcctagcgacggtggaggcagtgttatacacatcgttgatcatattgacttggaggtaacagaatccagatgataataacaactgctgatatttaatttaagttcatccacaacagaactttgagctacttatatgtgttctcagccttggagcgtgcctgaagttgtgcggccactgtatgaatcatctgcaatggttgctcagaagatgtcaatggcggtacaacaccatgaacttcaatctccgatgttgctcgtacatcaattttgtggactgatttttttgttgcaaaatccaggctttgcgctatcttaggcaggttgctcatgaagatacccattctgtaataaccggatggggacggcagcctgctgctttacgggctctgagccaaaagctcaccaggttgggttcttgaacagtaccgacagaatgctgatggttcttgtcatgaatcttctttagtaacagccgtacatcttctttcatttttacagaggtttcaatgaagctcttaatgggcttgctgatgatggatggtctgtggttgaaagtgatggagtggatgatgtttgtatctctgtcaactcatccccgagtaaagtgatcaactgcaatgcaactttcaataatggattgcctgtagtcagtagcagtgtactctgtgcaaaggcatcgatgctgctgcaggttaatttcaccttacagttagaatttctttttatatttacactgtcagaacattccgctttttttttacacgaattctactgctatttgttaggatgtttctccgccagcactcctgcgctttatgcgggaacagcggtcgcagtgggctgacagcaatttagatgcattctttgcttctgcaatgaaaccaaatttctgcaatttgcctatgtctcgccttggaggatttagtggtcaggtcatacttcctttagcccacacgtttgaccctgaagaagtaagctcctattctactgtgaactgcaactaatctctccaaataaaaataaatctcttttgcttaatgtattcattgcttaatttcttatgccagttccttgaggttataaaattagggaatgccagtaattatcaagacgcactcctgcaccgtgatctgtttctgttacaggtaacttttagtttcacttatacatctgtccttgaatctaatttcaccattaacaagatatcttgagttgtaaagtttgatctctgtgtaagttaagttctccactgaattggcagatgtacaatggggtagacgagaatatggtaggaacttgttcagagctcatctttgcccctatagacgcatcattcagcgatgactctccactgctcccatctggtttccgcatcattccgatcgacgctcctctcgtaagtctacaccactcaaagagcctgtaacatttcagcttcaactaccaatgaacattaattacttgattctcctaccctgcaaatacatgtcaggacacatctagccccaagtgcacattggacctagcctccacccttgaagttggaactcccagaagcaggataaatggcagcggtcctggaaatgctgcttctgctggctcaaaggctgtgatgacgatcgtgtttcagtttgccttcgagagccatctgcaggacagtgttgcagccatggcaaggcagtacatgcgaagcatcattgcatcagttcagaggatcgcgctggcgctctcctcctcacgcctcgttcctcatggcagcagcatcagtcacactcctgctagtccggaggcaaccacgcttgccagatggatctgccagagttacaggtctgtatgtacactgattagctagtttgtgttccaaatacttggatttatgctgatgctgcttgcttgtgcagatttcattttggggctgagcttatcaaatccggagatggtagcggctgtgaaggagtgctaaaaaccctttggcatcatgccagtgctatactctgctgctctttgaaggtttgcccccattgcatctgaaaattactttgatattgcaatttgagaattacactctgtcctatctgcagacagcatcggatttcagaacttaccttgaaactattccacagaaactagtctctgaattccagataataacatgctaaaacgttgcttgtggtgtgaaactttcagtctttcaccaatctgggatacttatgtctgaaagtgatgggcacggtgacaactcaacatttccatgcgtgcaggccttgccggtgttcacgttcgcgaaccagtctggcctggacatgctggagacaaccctggtggcgctccaggacatcaccctggagaaagtgttcgatgaccaagggaggaagaacctgtgcgcggagctccccggcatcatggagcaggggttcacgtgcatccccagcgggctgtgcgtctccggcctgggccggccggtgtcgtacgagaaggcgctggcgtggaaggtgctcgacgacgacagcggcgcgcactgcatctgcttcatgttcgtcaactggtcgtttgtgtaatgcatctgccaggtccgtcgcgctcatgggaaatcggctgatcggtggcatgttttaggttcgaatcgccctttaattattgggatgtagtaaaatggtttcggttttgaagaaaaatgtgaaatggtagaaggacctgaatagcagtattgtacacggatggatcatgtgatgtcaaacaagaatgaccttttgtttgataatgaagttaacatggcccctcctttatggttttgattaacatgtgtgttaaatatgtgttagacaaatatatattgttagaataaaaaagatttattccagcttatgcaagagtgtactcagccaatcattattgtattcaacattttgctggattcaaagagctcacaaaaagcataagaaaagaaaaaggagacaaacaaacttttagttctcctttcaccccaaaaaattatgtgttttgttctatcattttgtataatgaaactatactatgcaaaaattttgataaaaaggtggctattttctattttggattttttttcttcaagaggagaaaaaagcccaaaagagtctcaagagaccataataaaggcaataaattctgtattttggatgaaactaaacataaccttgtaaattgacattttatatttcatcattttaaagtaattggtattttatattttgttccacggataactgagataaaaagggaactaaacacactaaggccttgtttagttccgaaatttttttggttttcggaactgtagcactttcgtttttatttgacaaac

SEQ ID NO: 4237 - DNA, 4709 bp, Sorghum bicolor
tataaattttagcttagcgtgacacatcaagttcattggcataacaacaactgtactccgtgagtacttttatgcaattttagtttcgcgtttgtttttatatatatataaaaaaaatctgtgggtcagaaaaaaaaggccaacacacttttttcccatttgacaacatctgtacgtatcgagctcatgatatcgggatagattcggtggtgtggaagtgtcacaactcacacacgcatgtccgaaatgaggccacggcttcaatcaagcgagcaagcacgaatgtcaaccaactagggttcgattttgaattccaccgtggcctgcaaagctgccctgccctcactttgattattctcccttttttctgcaaacgtaacgagtgaattattgcaaatttaaaagattactagccgtgtttagttcccaacaaattttacaaaaattttcagatttttcgtaaaatcgaatcttgtggcatatacataaagcattaaatataggtaataattggataatatttgtcaaatataaataaaaataatacaatatacatttttgccaaattttttcaaactaaacaggaccctagtcctcctactggcgcattctttctgtttaatccaccaatcattgtaaaaatggcatccatgcaccgtggagtctggtctggtgtggcacgggcactgggcagagacagtcacgcagcgcacagaggcagaggcagaggcagagctgagcacatcacacggcatgtgggaacaaaccggaaaggcgaaagaaaacatttgacccatcccttcaacctcccgctctcatccacgagcacagcgctgtggctctggctctgctgccgactgtccgtgtccgtcctgcagtgcgcattgcatttgcaattgcaacgcaacagcagggaaaggtcccggtttcagcaccacagtccacagagcgcgcgcgggagagcacagccatctggccgccgtgactcctccactccatggtggaccgccatgaatcccaaacaacacacacacccgagctgccgaggctttcccaggaccccaagaaaaaagagcagcaccaaaaggtgcaactcttctcctcgctggtcgctgctgggtcctgggtgcaccgccgcccggttctcgatgcggcggaaacgcgaggaggttttttatttttattttactggcagtcaaaaaaatactaacaactcgagctcctatgaatgtgtgtctgtcccggcccggccatccataacaactatgggacacgacggcagcaaaacaaacaaaaggccacagtaggagagaatccaatgcgatgtgaaatgaaatgccttgctagttgctacgatgccgccgggttgaaactgaaactgaaacagatttttttctttttttttttcacataggatccttcttccttctcgcgtcgcgtttccaagttccagccgcatcgatcgatgctgcctgcctcctttacgaaatcgcaaaatttaagctgttctgaatctctttttttgattttcttaattaagcgagtgattgattatcagtgagtagtaaccgatggcagtaatggacgccgcggcggcagctgtctctgtcagctcagcgcagcgcagccctggctttttgcacgcagcgctccactgtcagcagtcagcacagcggcacttgaccgcctccctccatttcgaatttcaaaaccccagcgcctcccgtcctgcccatccgcccgccccgccggccgctcccactcccactccatctcccactgcaaagccaaagcaggcgcacgcgcacgcggcccgcgcccctttgtctcgcccgccccgccccgcctcgcgctgcgctgctctccactcttccctcctcttgttcttgccaaaggctgccgccgcgtggattgcttgttggccgctgctcttcctgcttctgtgtctgtcgcccaccgtttctcgccgtcgttctgggcgagaggaggagcggagcaggatgggagggtccgggaagtgggtcaagtcgctcatagggctcaagaagcccgacaaggaagactgctgcaaggtgaggggggaaagggaaatcggtgttcttggtttctttgccggaaatagttccccgtttttaccagccgtttttttttgtttctgttttgctttaatctggatgactcctgtctgtctcgctgccgcagactcaaccttttctttttttttttccttctgagaagtgaaaaacgggacccgtgaaaaacaatgattcattaccgtcttgttcctagttcgtgtggtacaacccctatttccctttccacagtagatacagaacattggatttgatactttttttttactcccagaatggcaaccccctgtatctgatgataccgtcaatggtcaccaaaagcgtccgtcccttttcaatccttcgtccttgtctgtcaatactcgctttcttgcttcagacaaaaatcattgagtaccgtatttgttcattcgtatcgaagttcaagtcattccgcgaatcgtagctcaaaatctgagttcctccaaatctccctttgtacagtgcactctgaatttatattctgaagttttcatcgaatctacaatttttcctgctcctgtccaggaaaagctgcaattcccatcagtgcatggaggactgcgaggcaagggccgcaagtggaagctgtggcggacctcctccggcgaccagggctccatctggcgcggctccagaggcggcagccagcgctcggcggcgtcggaggcctcggacgacgcgtcctcggtggccgcccccgccgacccgttcacggccgccgtcgccaccgtcacccgcgccccggcgcgggacttcatggccgtccgccaggagtgggccgccatccgcatccagaccgcgttccgcgggttcttggtaccccacatttctccgtgacacttgtttcttctttggattcgtactgggatggtggttgcgaaattcttgatgggtttgcgcgtgtgttcgtcgttggtgaaggctcgccgtgcgctgagggcgctcaaggggctggtgcggctgcaggcgatcgtgcgcgggcggcaggtgcggaagcaggcggcggtgacgctgcgctgcatgcaggcgctggtgcgggtgcaggcgcgcatccgggcgcgccgcgtgcgcatgtccaccgagggccaggccgtgcagaagctgctcgaggcgcgccgtacccagatggacatcctcagggaagcagaggtcgtcactgctgcatctcaatctccttactccttactatgattcaggttctgatgaaacgcattgagcagaaaagcctaggcgaacagactctcattgctgctgtaatcttttttcaggaaggatggtgtgacagtcaggggacacttgaacaagtgagggtgaagctgcagaagcggcaggagggcgcaatcaagcgcgagcgagctattgcgtacgcatattcacagcaggctgatggtgctgccaaatgcaatgtagggatcattgacactctgattgtgatgattctgtagaagtatctgtgaatattgatctgacctttgttctgtctgttttgcagccaccgaagcttacttccaatggccgggtgaacccctccggtatgctgctcaagcaccagaattttgacaagagcaatgtcaactggagctggctggagaggtggatggcagcacgcccatgggagaatagattgatggaggagcacaaccagaccaactccagctcccctgacttccggtcctccaagaactgcgaggattcttttggtgtgctcggcgatttctctgaaccaaattcagtgaaggtgcgcaagaacaatgtcagcaaacgggtctgtgcaaaaccacctgggccaacacacgcccatggacatcatcagcgcctcaaagcccagtcgatctcgtctctgagcactgaactgcacaacgatgagagctctgcatcatcgtcgtcttgtttcgcatcgacccctatatcattctccacatttgtgacttcagagaagaccgaggacaatgtcaggacgagacccaactacatgagcatgacagagtcgatcaaggcgaagcagaaggcatgcaacgcccagagaacggtggcgctgaagcagtcagatgataggaaagtcatgagcgctgagttgatggccgctcaggtgtgatagttccatggacctccgttcagagatgaagccgacttccacatcctctctatgctaaggatgtttgtttggtgtcttgccacattcttgagtggctcggtgctgcattgttgagttgtccttgtgttgctggtctgattgttcaacttcttgttgtcagattgcatctttgttcagtcattgtggctgtatctttgttcagtcattgtggctttgtcagtggtagagtctctgtaagatagttctttgagtagacaacattgtggatttcttgcctgggtgtttatttcaggtgaaaaaagaggataaattacaatgtccttcttccaaagatagctctgagtgaaaacattgttggtaacttggtactatgttgatgctgtggtcttaactggaagctgaaatcagtgtgctaaactattgcaatgattaatttccatctgacctcataatgtgaggcactgataatatataatgcgctctaatgtgagactgaaact

SEQ ID NO: 4238 - DNA, 3005 bp, Sorghum bicolor
tggcctctcttggcggctaccctaggatgggttcagtcccaacaatcgccctccctcggcacgacggttgtagcctagtagcacgtggtgtgcgtagctcaaggaagagggaagaaaagaaaatgatgagtggtcttatatgccagtgtttattaaatggatttgagagcactgatttaaaggatatgttgaaatacatagaaaaaaagacttttaaaattagagaaactcttaaaccaaaagtacaaacccgatttaagagttcctcctaaagttattatacacaataaaaacgtaaagcatgaatagtcaacggccggcatggaccaggaccgccaacggctgccattttggcagccacatacatttcgatgcccaataatcgagcagttgtcaatttgccatccttggggccttcctccccccccccccccccccccccccccccccgggtctactctattccaataatacgagtatgttagctgattaggggctttgttgatagctaggattagtaattacctgagagcctgagactaaataatataaactgaaattagtcttttactcatctgttgtggacatttgatcaaagagaggcactaagccatggtgtgcttgtgaccaaaaataaagaaaaggcaacggaaaaccttacggtgtatcaattctagcccacataatgaagtccaggcggcccaactagcagcttggtctcggcccaactgtgcttgtgcacagtcgtcacgcacaggcattgggccaaaatccctcgagtcttcttccaatcagcccagccgcccaggcagagcgcatccctgaccctgaggcccgatccctgaccccaagtccccgccaccacgccgtcgaggtcggagccgggtggtactacaggtacaggggaggacgacgaggagcaacggctgcgggcggcgctgcgtcacctgcaggcagaggcgggggtgctggagcgcctggtgtacaagcaccagaaccagcaccgcggcgctgtctacttccagcacctcctcaaggtgaggtcctcccggcacctgctgttgatacctcccgtcccactgagccactggtagcgagtttctgtgtgcgcaggtacggatggacctgaagctgctgctcggcgccggcttcatggaggtcctgaacgcagtgttcccggttctcgcatgccgcaagccggccaacacgaccctcatccccaccaagtcagtctgttgttgtattgacttcctacaaaattcacctgtttctattatctgattacttggcatgttgggatttttacttaaaactttacatttctgaattctgatgtaggcagacgaagaaacctggtgcaaaccacagccatcatgagaggcttttgggtgttgcccgcttgttatcgcaggtgtgttttgtgtttgttgagctttgttgcgattggaatcttgacaagtaggctcaaagtgagactttggccgcttaaatatcgtataaaatctcagtcaaaagtttctgtgccgtataaaatctcaaagtgagatttcagactttggccgcttaaatatcgtataaaatatgtgtcaaaattttatctatcccgtgcagatgtctgaacctgttataaaggcagcaatgtatcctttttgtttttcttgttataccatgtttctgtttagtttcttaggtcacaattaagactagttgtgcttgtgtacttttacttggctcacaaataagactatacatgtttcgcattggccattacattattatcatcataagaaactgaaaacacatgtaaatttttctttcaattgaaagatgtcaaagttccttaacttaaattacagcgagataacatttttacttgctagatcattcttcattgatctttgtatggcggtgttttctttgcttgcacgagtaagggtcctgatctaacaggtgagtgttataatctatataaagtcggcttggaatcacatgctagctaatatcgttattatttctgttttacctacatagcctttgacatagacgctgaccctctggtatttgtttcacagatgctacttgatgttgtgtcaatatacaataaggtcaccgatcttactgataggaagcaggctgctaagattggcatcagtggagtgcaggtgtactttacttccacactagcaatgatgtcattttgtatatcatgtagaaaccgtactgcctgagaccatgttttcacttttcacacaaactaatcttgctagcaaatgtaatgaatttgctaaataactttgcttccttttctttctcttattcccacaggctttcagagagtactacccctctatgaatgatgcgtgtactgttctggagtgtgtatgggtaaaagataaattcgttttgcatgaaaaggttaacgatatatgtcaggaaatccaagttgaggatcagaagtgctgtgatcctcagcatgaaacacgtgcattcatgagtgaaggttgaaatgctttatcttctattctttatgataaatgcacgttgatccattgatcttgaattctttgtcgcctttgtcataattagttgacatgctcatgaatcatgagaatgcctggtgctttgttgctgattttgattgaaaagcaagcaccttagtagcatcattgcattgttaaatgttaagaacatagctcaaattaaagctttgaagatattttgcattagattcccatgattcccaagctagataccaactacaaaggcgtgagtatggcttttgaggttagttcatcaatctttggaagtatgtcacattagagtgtatattaaacatttatggttcacagatggtggcatgatttatggtgaggaaaaagtttacttaaccttacgtagcctacttgaatgataagctaacacggtgatggttctgcctgaaatgctctatgttttgcctattacagctatttatggagttatttatataattgtagcttataagt

SEQ ID NO: 4239 - DNA, 6640 bp, Sorghum bicolor
tggctagtagcaatttctgcggaggagcataccaaacactttagaaggggagccatttcatggtgaatagtagatgagctcgagcaattttttagtctggaggagttgcagttttgtgactcctcctcaaatgctcttaacctctcttgcgtataatttgtattccatttgttctaaattataagctccaacttttttatattattttctatacacatagatataggctatgttagatacataataaaatgtatctgaaaaaactaaaataacttactctctctttgttaaattatatgtcgttttgaccttttgggtacaccgattttctatgtatttaaatacatagcattaaaacgatttataatttggaacaaagaaagtatgatttagaatgaagggacctgtcctcctagtcctaggtctgcacgcataattgagtctacaaacgcagaggcagaggctgcacttcgttaatgtgtctgcacatattagtttctgggtcgtgccggatgaatccagtgtacctagtttatactccgatgacatgttcttgtccgcccacttgtttttatcttgtgtattatgaccttgtttagttgcgatttttcttttgcgaaatagctattgtaacacttttgtttgtatttgataattattatctaatcattgattaactagacttaaaagattcattgcgtaaattacagtcaaacgtgcaattaattattttttacatatatttagtacttcatgtatatgccgcaagattcaatacgatgaaaatttttgatcattttacaaaatacttcgggaactaaacaaggcatatacttcttgccaaggatgacttgaggtactcaggtactaatgattgagctgtgttccaaacaagtctagtaacggtgagaggtcaaaagggaaatacttcaccgtgcaagtgagcgaataccggtggtttgagccatcggccttgtttacttccaaatttttttgcaaaataggagtagcactttcgtttgtatttgacaaatattattcaattatggactaattaggctcaaaagatttgtctcgccaattccgaccaaactgtgcaattagtttttatttttatctatatttaatactccatgcatatgtctaaagattcgatgtgacggggaatctgaaaaattttgcaaaatttttggggaactaaacaatatagcagaaatggtcaactggagaggtaaatacaaacggaatgctcattaaatttcagagtaaactagtttcagttcattttggtagtccaaaacgtatctactcttcgctgatttatttatgagaaaaaaatattgctggctaaccgaaaaagtatggcttataagacaagcgaacggactcgagtcccctcccttcgaggtcagaaatgtgcaccaataagtactcgatttgctctaagtcaaacttatgttaagtttagctgaatttgtcagaaaaaaataaagatatctagggcaccaaatcaacatcattagatcaatgaaataaaattcacactgtacttatttggtattatagatactatcacagttacaacaatttgacttgtgacctggaatattattagctatattaagagaaagagtaagagttccctttttcagacaatgacacaatttaaggagaggtgttagcccagcagtgttattttaaggaaacggcccaccaagcaccactgcccccaattcttcagtcgcagcagcagcccatcatccaattcggcgtgatactatctaacaacctcagccccaacccgatccaacgccggcgcggccgctgactccaaacgtctcgcggccctgcacgtgagcggcacgggcatccagtacagcaatccagcggggcgacgactgggcgcggcgagccaggcaggcaggattcgaccgttgcgttctccgcccaaatcttaagcccccacccactccagatcgccccccaattccaattccaattccaagcctctcctcgcctcgcctcgccgctccccgccccctcgcttcctccccctccgcgccgctcctccaggctccagccatggcgatcgccagcgaggacagggtatactactgctccctctcccctctcccctctcactggtcggatccgcccgcggatgattttgggtggcatccgtgcgtagcggtggattcgtggggttcggcgagcgattggcttgccggtagccttggcatgcttgattatagtcgtgtgcgtcgtcaaattgttgcgggtttactcccccttctgtcgaatttgggggattttcctccgtctcttttgccccctttttgtgcggacgcgacagggtcaaacagacgtttcttatttttcgtgcgtgtgacattaataatatatcgttgcttgattagctgtgcgcagtctgttttctcaatatcctttgcttgcttggttacacgttgcgacagtgaagtgtagtatggggtttacgagatcctttgcttaggattttaactctccatttgttcctggtctggttattcctgaacttcgctccatttgagtgttttttcctgcgtttagaggcttagtaaacgagggttcatggctgattaagcttctaatgatgatttgtggcttcagggtactgtgtggcagtgcttgcgagtttggtacgttggctgcagtccattttctctatatccttttgcggagtgttgactagggtttgacctctatgtctggttacacattatgcccgtgtaccttgccccatgaactcgtattgggtttacgagatcattcccttgggattttaactcagcattctgttcctggtctgaactttgcttcatttgattgttcttccttggtttagagggttagtaaacgaggattcatggctgattagtttgtggcttcagggtactgtggtagtgtttgcgagcttcgtagcttggctgcagtgtgatagaaacataacaatgcattttgttttcactttgcaggcttcagcacatgcgaatgaggagaagcggtgggtactgtctgattttgagattgggaagcctcttgggaggggcaagtttgggcatgtttatcttgccagagaaaggagggtaaataacatgttcaagcttactattaagtgaactttttatattatgactcagcaaatatactactgttactaatgttaattatcaggaaatattgcactgattatttttagtctctagcttagctgagtggttactgtaccgagattgctgggatttgactattcagtatttgcaccctgtttcgtatctactaactgaacctttttatattattgtaccatcagcaactatactactataacgaacagtaaacatgttgaatgagaacgctggaaacgtcttatagtgtttttccatctatgctttagttaaccatcctagtgagcagtgcaagtttggcgttgtttatctggccagagaaaagagggtaaataacatgtttaagctttcttttggttagttgaactgcttatttttagtctacatcttcactgaatgatttactgtactgtgattgctgggaatactggaatatgactacttcagtgaactttttatattatggtatactcagaaaatatactactgtaacaagtgttatttgttaggaaatattgcactgattatttttagtctctagcttagctgaatggttactgcaccgagattgctgatatttgactaattcagttttgttccctgtttcgtatctactaactgaacttttttcatattattgtatggtcagcaactatactaatgtatccaatgctatatagccagcaaatataccactgcaactaacaataaacatgttgaataacaacaatgctggaaacgtcttatagagtgttttttccatttatgctttagttaatcatcctagtgagcagctagggcttacagtacttatttttgtggaaacagagtagtcagattgtggctttgaaagttcttttcaagagccagctcaagcaatcacaggtcgagcatcagctgcgacgcgaagtggagattcaaagtcaccttcgacaccctaatattcttcgcctgtatgggtacttctatgatcaggtaaaagactatccacatttctagtgtagaattaccattgcttcgtttatatgccaagagtggtcatcgtttctgtcatgtgaaattctcagacccgggtatacctaatcctggaatatgctgccaagggtgaactgtacaaggaactgactaggtgcaaacatttttcagagcggcgttcagcgaccgtaagttgatgctctatacatgtacttggtgaatttgtctgcagctcatttttcaacaaagtagttatggagatttccttttatttttagtatatcgcatcactggctagagctttgatctaccttcatggcaagcatgttatccaccgggacattaaaccagagaatcttttgattggagcccaggtacttgaattgtgtttttttagtatccctgatctggaagactggaactctatgtttactttcattgttgtatgtttccttggaacagggtgagatcaaaattgctgacttcggctggtccgtgcataccttcaacagaagacggactatgtgcggaactctggattacctgccacctgaaatgggtactttgctaaccatttacctccagttatcaactagttcaatgatttttaaagttcccacagctgttccagttctctattggcctagctgctttccttggctctaatcctgttgtgatttgtccagtggagaagacagaacatgattacaatgtcgacatatggagcctgggtattctatgctatgagttcctttacggggtcccaccttttgaagctaaggagcactcagagacatacagaaggtaactccacaactctgggatcttagtatgcggcaattttgtccctaatctgcccatatgagttctagattatttcttgtgacttttgagctatgctctgataattgtgaggagactattgaagttgcatatagtgctagtggagcaaagagaatgcactatattgatcaccacagctccacatgtttttagatccatgattttttctaactataattagtatatacgtaatagcatactgaatatctatccttgtggttgtgaaacttgagcctttgacttgcttgttttgtggctttggaaataactgctgtttctgaaagcaactatatgggatcttagtatttagcgattttgtccctaacttgctcatatgagttctagattatttcttgcaatttgagctatgtctgataattggtgaggaaacttttgaagttgcatatagtgctagtgtagcaaagaggaagcacaccacacagcttcacatgttatagatccatgaattctttctatcattagtatatatgtatagcatagtgaatatctatcctcgtggttgtgaaactcgagagcaactgctgtttctgaatctgttgtttttacttggatacaggatagtgaaagttgacttgaagttcccactgaaaccattcgtttcacccgctgcgaaggatttgatttctcaagtaagaagtcttcatttttttccccttgtcttgtaaagaaaatggttgttcagattcagatagtcatatccctgaacctcatcaattgttgtacacagatgctggtcaagaactcggcgcaccggcttccactccacaaggttcttgagcacccgtggatcgtccagaacgccgacccttccggcgtgtacagagggtagaacaaccactagctgaaggctgcctcctctgagtactctcctccactctccccaattcgaggggagtgcgattctttcgactgttgtttattatggctcttgccctaccaactaagcttctatcccccgaactgtatcttgtagcaccgtctctacggggataacaagcaatgtggattagcgtctgtgcgatggggccgtgaccttgtatacggccaattgccctgtattaatgtagcattcatgttgaacaaccttcttacgcgtctatatgaatatatatctgttctaagcctttctgaatcttgatatttaatttgtcagcccatatgagccttgaagaatcacgcccgtccagtggctgtggtttgttgagggaagaaggatttgttcaagtctgtgatgtgtgggaaaatgcggaagatctcgttcgtaaccagcataacatgtagtgagctcaattttgccctcacctgacgaaatttaatacacgtagcagcgctattagctcattcacaaccaaaactgagcttacttcagcgaagcatatattattaccaaatgctcacattatccaagcctatctatagtagtggtcgctactctctacaacgccagcacccaaaaagcaaaataaaaagaaaaagacaaaaaccccatctatagttacatgcttataatactaatatatatccttgcgtattcttgtgcccttcacactgtcccattgcatttggacgcgtccttcaccggcgagctctcgccttccaggagctgcgtgttgtgcaggtggtgctcgtcgtcg

SEQ ID NO: 4240 - DNA, 11919 bp, Sorghum bicolor
gcctgacagagccgagccaggacaaggcgagatacccgctacgagcctgacagcctacgagcctgacatcgtttggctaataaatcatgataaaaagtattatttgctgatttgttatactaataaatttagctgataaattcaaacaaacaggctttgtccagtgctggagtttcagaagagataaaatggccatggaattccaagaaattcatgtatatatttgcagtcatcgttgcacctggagcaatctcctgcagcatgcatgccgagttgggagataggagcagctctgaaattgtttgctgaaattcgaaagatgaactgtgaaacgaacgatatacgatggtttgtgaaaaatctaatctttacgttcaaaaaaaagtttgtgaaaattctcaggaaactctaccgtcttgctagtgctatgtggacattataattttcgaatcacggtctcctcgtaccttttcttttatcttattattgtcttgatgatgagaaaaatcacacgctctaggccatcgaaatgtgccccaacgcacgcctgtgctttgggtttgtgcccaacacgtgcccacgcaatttacggtgggaacgtcacgaatttgatgataaaaatctatatactatatttggtagatctataactttaaacttattagcatagtttatcagccaccgtatatgtttttctcttacaataaaacaacattagccaaattatcaatcgtagaaaccatcagccagtgctaataagttcaagaaaatataacttatatgcacaatttatctgtcatgatatatgttttctctcacaacaaaacaccatcagccgacttatcaaccgaacaacccagtctccatagctgttggagctctgctcatttttgtccctgctcttcaagcctctatatccccttatcaatgaagattgcaaacatcttcaagtctaatttggaaacgccaatacctttgagatcccggacttttctctggacgggtaatctataagaatattattttaattattatcttagtttttaaatggaggttttcaattcctgaattttgctccccttccaaaggaggactcattgtgtttggttcacgtcatggaagggcgcaagacgatccaaaacgtttgacgcacgggcttagcccatcctcatcgagtcgttccaccagtaggcaaaaagtcacgaaccacctcattctcgttgaaaccacatcagacgagcgcattatcaaatccactccactaaccaaacaatacattagttcactccatttcactaacaaatactactactctattccaaattataagacatttgactttttgatctcaagtttgactactcgtcttattaaaaaaatttatgcaaatatagtcaaatttaagtcatcactgaagaatttttattaacaaatcaagcgacgacaaaagaattgatattttgtacaaatttttgaataaaacgagtgatcaaatttgatattagaaaagtcaaacgacttataatttaggatggattgagtacaatcaaagcataatccgaacttacaagcaaatatgacatgctggatgaattaattccggatgggatcacttcccaaaccaaacacgcagacgtatttcaatctcattatctgaaaaaacgtaaaccttgcgggacagcggaaaatgggaaacccgtcacctctttcactttgggcgcggccttctcgctcccactagccaatttcccgctcgaaatttgcccccaaacaaacaccttccctcgtctccccgccctcgttgctgcctctccccttccccttccctcgaccccgagctcgtccactccgcgcctccgcttcccggcatcccttcgattgggcccagccgccgccgccgccagatcggattggggaggggagagggtgtgtctctgcgccgccggtagctggggtagctgccccaccctgccgtaggaggcgcctcccttcagcgagcgatggaaccgcggcggcgtcagcagcagcagtcgatcctctcatttctccagaagcagccgccgtcgtggcgggttccctccggggagggcacgcctcccgagaagccgacgcggccccctatggggtccatcgccggcatcttggagaggctcgtgcgccctccgccgccgccgccgcaggccaggtacggacggacgcgataatcactcgccatgttagtgtggtgggaggctagggttttggggtttcgttgggcgtcggttaggccgtctgtttgagtcgccgcgaggcacggattgctgggctgggaggagctctgggtttcgagtgatagtgcggatctaacccatcagtgctgggtttaaggatgtgcattgttcgaggtgtctagtagcgactgtccagggattttaccatatatgttcatctgtttttactgcagctctgcctgtgattcatcagtctggcttccattttgtgggttattagataccactctacatgatatatgtctttatattgcacatatgcaattaggtaactccgtttcagtcattgttagcctcaaagtgtattagattttgatttttgaattcactgctgtgctccgctgagctacttgcccatagttttttagagtaggacttgcatttgcatctcatgtattttttcttggtcagatatatctttgcttcgtagtatttttcattgcagacatgccattaactcgtaggcccgaccaagcgtttgcttacgaactcaggaaacagattgtctttcactctttcacttgcaccttattttgctatcctgaatatgcttgattctcttttatgcagaaatcaatatgcttcccaggttagacatttggaggggaaaaacttgcctgtggaaaaccaagttctctcaaatgagtgctcaggtgcattgttctcaagacctatttacggcgaagacagcagaacaatcctttcctcagaaggaggtggagatatggctccctctcaggagccccaaatgcactcactgaggtcttccactgatgaatttattggagcaagcacactgttgccagaacttggctcaaatcaggctcctattcaagagtatccaaagaagttattctcagagtctcatactaattgcattcaggctacagccttaaatgagaactttgatgtgcaaactccttcccaggttgcctcaaagaaaatcttcccagggcttgctcatggtgctgatacacctctaactggctatggttcagatcaaactcttttgcagcactcatcaaagaagttctcactggtttctgctaatggtcaatacactagagcagcggtgacaggatttgggcaaaattcaaatactactcgtgcagaggaaccttcaaacatgctatgctcagggtcttcagatcctttgtatattagaccaacaaatttgtttgcagaacttgaggcaaatgaaactccattgaagaatcactcaaagaattcctctctgcttacgaacagtaaatataacttagcatctgctatgttatttccaggacttgactctagtcctctgaaaccagaaacaccagcaatgcagccagttattcctcgcctgaagcgagttcaggaagaccaaagtgtggatgccaacaaccaatgccctcctctgggggcgttgaacaagaagatgaaatcagctcattgttctattgaaaggaaggatcatgatgaaatggctgatagtgcgcgtagcaaatttgagtggctgaatccatttgccatcagggatgcaaatagaaggcggccaaatgatccactttatgacaagagtactctttttattccgcctgatgcattgagaaaaatgtcaacatctcaaaagcaatactggaatattaagtgcaaatatatggatgttgtcctctttttcaaagtggtaagattcatcattgatgattcaattcatggcatataacatactctattgaggacacatgaaaacttatttctttggtttgatgaatatctcacaaaactttgtatggtactgagccatttacttaatcacataaggagtgagtgtttctcagtataggctcactgtggaattctccaattgctgttcataatgtttagctgttttacgatgttgatgtatatcaccagatattatacattataaccaatgttgacattttttgttctgattactatcctacaaaagtttctgcactttccatttttgcacttcacttgctattgcactgaggctgttcattccagagttgaagcgttgctttgccccccgaaactatgttgagcactccttattgtagtattagaggtcttataagtatataacctacttaaagtgtttgatatatcattgctaggggaaattttatgagctctatgaactagatgctgagattggccaaaaagaatttgactggaaaatgactgctaatggggtgggcaagtgccgacaggtacgtattgcttatcaaatgcttgctctgaacttttcaacattacacctaaattttgaagtatttcatttacatctcagtatattgtgctgctcgttaagaagttacatgaaccagacaaccactggatcatatatcttatgatccagtctatattatcgttatttccctgataagtctatcacatgaagcctaccccaacctgcttggtagttgggacaaaaaggccttgttgctgtttgtttttaatctaccatgaggctgatctccttgcgggttaggaacacggtcatttgcctgcacctgccattagatttgggttttgggggtaggggatagtgcttgggtaaatctgggacccgtgttgtaggagtgtgggaggcaatggtatggtggcacgatgaggtggtcgccaacttgtgtttggtgggtggtggtggcctgcagcacaacaacagtagttcccggtagtgggtgggagtgacggactgccaccagtttgcgatacacggctgtcctgtgttgggaggcagactggtgcagctaggttggagattgacagcaatgccagagacaaaggaggcgactgattccatgactggggtcacatgttagcctgcttgttctttttatgaaaacttttatgtagtaatgtgctacttatacaaaaaaaaaatatggtgttgctcttgtgtgggatgacaggaagccagaattgatttgggtaaatgctttcaggctgttgcaatgcaccactttgtcatgttttcaaccatcttgatttaaaattttaaattcttggcatttaatgcatcactacctcactaacagttataatacagttccatgctttatctcatctcagtcatgattatttcctaatggtagtgacattaacttcatatttataggttggcatttcagaaagtggtatagatgatgctgttgataagcttgtagctagggggtaagctcaatagctcatgtttttgtttggttttgttcatttccagaattatgtagttcttcaggattatgcttatcttgttatcataacattatcttgaacatcagcaagctcatgctgcttcaggttggtaatggtcggtcaatgtgtctatccttattgatgtggcaataatgaggggtttcttgcattattgactcctttacaatttgatgttagttatgttgctttcatgaaattcaaatctgttcattggtttctacaatgcataaaatttcttttgaaccttatggtctgcaagacatccatgatagcgcctcttccttttctttaccttctttttttggtgctgaagcggtgaggttattgctcatgaatctgacctatttccaggtataaagttggaagaatagaacaaatggaatctgcaaaccaggccaaagctagaggattacattctgtaagtattcagtactgcgatgaaacaccattaattctgagtgtttacactgattgttcatcacttagctagtggcagaagtagcaagcatgcgcctacctttttagaacctctcttttctcagttgcatatccaattttctttgttctggtatggctatcttttgttcaaatgtgcacatagtcatgtacattgtgatttttcatccttccattttgctgcatcggaaacttaattttacttaagacacaattatggtactctggatgggtttaaattagtagcaatataccctgtgcaacacaaaactctataattcagtatgtgctcatatttgtgatgcagtgtaaatatcttccttacaggcaataatattctagtggcatgtaacatttttcctcctaaaaaacttctgcaaggttatcgagagaaagttggttcatgtgtccacaccatcaactgcggctgataacattggtactgatgctgttcaccttctggcattgaaagaggtttgcttctagcattgcacctgtctttgggccaccatacttctctatgatgtttgttgttaaagatcatgtagttatggctaagccatacagaccaaaagttggcaacccactcctaagatctgtgctttagtactagttcggtagttccccttgcatgcagctgactaccctttatgtggttaatacttattttttatacccaacgcaataataattatatgtaaaatggaataacaaagtgatactcaaagaaaaggtgttctatgttttgttgtggctacagaagcaactaacattctagtttcatttggccaaaatatccttggtcaaaataagccctctacctaagtactacaagaaaactcttcttgagtggctaatctgaacgttccagataaacgagcagctaatctgaatgattaccatgacaaatatattagatgagaggtgcataatgcatttgctgaaacaaatagtattattctagattccactgacaattagttttgttcttgcagtttctcttggtattttggtatggacttttttaagtaaaatgacattataaatttgcaattgaatatcttcaattttgcttattaccattcttcatatgtgattcctattctgatgcagcctttcttggaactttcaggttaccctagcttctagcagttcccaggtctatggatttgctttcctagactatgccgcccttaaaatttgggtgggttcagtccaagatgatgactcgtctgcagctttgggtgctttgttgatgcaggtatgctcttgtagccctttttgattggttaagtgaaccagaaactgttattcattattattattcttttttcaggtttctcctagagaattaatctatgaaacctcaggtcagaaaatgcttcattttcaaatccttgtatttttaggagctaatatagtaatacctattctcttttgtcaggcatcacaaaagaaactcaaaggacaataagaaaatatgcctcagcaggtaaatgctcctaaaacactattctctttatttgccagcagataactcttttctcagatagcaagttgatgagacatcagagtttgaaaacttacaaatatctttccttaacttcaggatctgtgaagatgcagctgacccccctctctgggatagatttctctgatgcttcacaaattcgaatgttaatacattctaaagggttctttaacgcatcgacagagtcatggttatctgctttggactgtgcagtgaatcgagatgttgttatttgtgcacttggtggacttattggccatttgactaggctcatggtatacttggcttacctttttcttcccttgaacacatttattagtcatctgaatcgattgtgccatttgtaactgctgatttttttaattaaatcatttgtagtgtttcattggctgtccctagtcattgttttccattgtttatgtattctcgaattattccgcaaaatattatatacataattttctctctactatgtcgaccattgaaatgtgttagagttctaattctacaatctgaaaccagttacatgatgccttgaaaaatggggaagtcttaccataccatgtgtacaaaacatgtttaaggatggatggccagactcttgtgaaccttgagattttcagcaacaatttcaatggcggttcatctggtaggagcacagattctactttttctattccagctatcttatttttgttcttgaacagtagtttttaagcagtaaaacaggccaaagataaatattgctgaatctataccttgttgcaggtactttatataagcaccttaatcactgtgtcacagcatctggtaagcggctgctaagaaggtggatttgtcatccacttaaagacattgatgctatcaataaaaggcttgatgttgttgagggttttatccaaaactgtggactaggccctacaacacttggttatctccggaaaattcctgatcttgagagattattaggacaagttagatccactgttgggttgtcatctttgcttcaactgccctttattggagaaaagatactaaagagacgggtaggtggttcttttctctttgagacactagctttagattctcttatacagctaagttttggagtgatattgaaatgtagtatcttgtaacatatcccatattcaattgatactttattatgcaagaaatgatcttattaagttgttgattatgaaacctttcatgaaactatagtttgtgcttgcagaaaatatgtcaataaagccaatgtgttttcctgcatgttgtcataatcgtctgattcattttcatgatctccagtaatatgctatgaaatatttgcttaaaacaaacgtgctatgaaatcttgaatatgtatacatattagtattagtactagtttcagtgagactttttgttaacatgctaaggtttctaaggaaaaacctatgttctagatttgattattgtaatgcaaattttctagtttttcttcctgtcagttgattgcttcatggcatgttcccagatcaaaacatttacaatgcttatcaatggcctccgcaatggtattgacttactcagtgacttgcaaagagcggatcatggtgtcttggcactttataagattgttgagattccatcattgaactgcctttgtgagttaatccatacgtttgaagagagaatacaaaatgattttccatgtggccaggtaaaatatggcatggtttcccatctgcattagtgttgtacatacaagtgcctgtttccgttttagttatttactgctcacttgtatttcttctgttgccattacttattggttggtcttgtgagctttgaaaggatcctgatgtcgacaacaatggtgccaacaatttggttcgtctggtggaactttttattggaaaggcttctgaatggtctttggtgatcaatgctgtcagcactattgatgtgcttaggtcctttgctgcaatgacattgtcatcatttggtgccatgtgcagaccacaagttctgctgaaagatgatgtgcctatacttcggatgaagggtctgtggcatccctatgcttttgcggaaaatgcaaatggcctggttccaaatgatttaacccttggtcaggatttatctggtctcaatcgttttgcattgttgttaactggtccaaatatgggtgggaaatccacaatcatgcgtgccacctgcctggctgttgtacttgcacaggtctgtataaacttcacttatgcttgtctgttcatgatcttattcaaatgtattaccaaggtttcttcttctttgcagcttggctgttatgtcccctgcacatcatgtgagctgacccttgcagattccatctttacgcgccttggtgcaacagatcggattatgtctggggaaagtatgtaatcattttgacaaattagtacattgcccaccatatctctgttcttggtcgaatgagttagaattaataaatacatgtctgtgtggcaaaagagttgtatgatgtttgtaaaccttggattatcagtagaaagccctcattgtatttatttgaactgttttgtgttaaaaaaatgaacttgtttagtagatcaatcaatctctttatatttcatgatctatactatatttgtacagcgttcggtatgcttgggtatgagatgacaatgacattgactttgtttttataacattgtttgcaggtacgtttctcgttgaatgtactgagactgcctctgttcttcagaacgcaactgtggactcacttgtcttgcttgatgagcttggcagaggaactagcacatttgatggatatgcaatcgcatatgctgtgagtttttgcttctgcagtatctcaaatctcatccttcattcctatgcttgatgttcccttagtatgctttcccttcataattagtgctgttgccatgactcaatgactgttaatgactcatgaggtgcatggtacagggaacttttttatacaaaatagcaacaaaaccttatttgtatggttcacatatttggggatttgttaatttgctagcattagatatcacatattatcacaccattacatgtatttgtgagaatcctactgtgtgttttatctctccagtaagatgcatataagtaggttagacaatcttgaacaaaggtgcattgccttcatgtttcacgggcatgcttctctttctcatcccgttctgcaacagctttcctggtctcacaccaaattaattttttggagcttgaatgccattattaatcattaatgatatctagaattggaactgccctactcctagtccctggaaattgcactgtcatactgccattaaactattctctttcccctgtttcacatcaacaatacatgaatctgcgaatctacatttatcagtgataacatcttatgcattgtctaattgtaactcaggtgttccgccacctagtggagcgtgtgagatgccgtcagctctttgccactcactaccattctctgacgaaggagtttgcctcgcaccctcacgtgagcctccagcacatggcctgcatgttcaagccaaggagcgacggcaacggccagaaggagctgaccttcctgtaccgactgacctcaggggcctgtccagaaagctacggcctgcaggtcgccacaatggcagggatcccaaagtcgatagtggagaatgcatctgtcgcgggccaggtgatgaggtctaagatagctgagaacttcaggtcgagcgaacagcgagctgagttctcgaccctccacgaggaacggctgagggaggccctggcggtcagcgtgcaggacggactcctggatgacgacatcatggacacgctgatctgcgtccgtcaagagctgaagtctcacttcaggaaaagccagatgagcattcacttcaggaaagccagatgagcattcattctttccatcaaattaggctccacacatcaatgattttttttaaaaaaaaagcaagattctcttaagttttgaaaaatatggcaaatattttggaacatttatttaaccttaatcaagtgtggcagattgcggcgatctgttgttgggaacctaacggtgccctaaatctgaaagtgatgtgccatgctgattctcgtggcacaagattgaactcatgatgttaccagagcaattacggtgtcttccttttcttctaatctccaccaactgaaacctgaattctcctcaactgtcccaacgcatggagcagtgttttccttttgtgcccacagtttcaagggtgaaccaaaaatcctacacctctgtaaactttgggcacatgtacatttttgctccagccgggctcagtagccagtacgctagcttgcacatgagcagcttggagcccatgcgtgtgacaagctgttctatcacaagttcacaaccggggc

SEQ ID NO: 4241 - DNA, 5923 bp, Sorghum bicolor
cttgagtttgagtgtcaatatatcaatccttggtcttacgacctctcttcgttgtccttggtatagatgtggatgtgggatgcctttaattgaaagtctccttttgatggcatgtaaatatgttatgattgtctgcatgccatgatgtaaagcaaacgttgaaggctgaagggatgttgacgaggatgtgtgcggaagtaacccaatagccaggccggcgcccatatcctctgagcttgttcgcttgtgtgaaaagacatagttaaaagtagtatttattgattggaaaaagtctacataaccctctaaactatcaagagtagactacttcacctcccgaactataaaataagatattctactctctgaactttcaaaaccagttaaccccatagagtggttttggatggtggttttgtcattttcttttttatttatttccgctaaatttttaaaaaatcataataaatcatagaaaaatcataaaataaaaatttcaattttgttggacttctaatgagtagatctatacagtgaatatataatatggtatactttagtataaagtttttgttgtagccttaaatctatatttttctgtaattaaatcgaataatttatatatgcagttcctatgatccaattgtggtaaaatttttatggtgggctcattattgtacgcttgaactatggtaaaatttttatacccagtggatcacgtataacttagttatcaatttatttagctttattcttgttaaatctatgctttatttataactaagttatacatgatccaatgagtatgaaatttttatcatagttcaagcatacaataatgagcccaccataaaacttttaccacaattggaccacaacaactgcatatatgaattattcaaattaattacagaaaaacatagatttaaagctacagcaaaaattttatactaaagtataccatattatatattcactgtgtagatcaactcatcaggagtccaaaaaaattaaaatttccattttatgatttttttatgattttttaaagattcagcaaaaataaataaaaaagaaaaagacaaaaccactcgagtgggttatttgaccggttttgaaagttcagggggtagaatatctggtttcatagttcaggggatgaagtaggtcaccctagatagtttgggggttatgtagactttttcctttattgatttgttgtgaaagaaaaacattattaaatgactggtagattgcatcaaaaacattattaaaagggcttgtttagatgcaaaaactttttggattttgacattgtagcattttcgtttttatttgacaaacattgtccaatcatggagtaactaggcttaaaagattcgtttcgcgatttacagacaaactgtgtaattagtttttatttttatctatatttaatacttcgtgcatgtgtcacaagatttgatgtaaggggaaatcttgtaaagttttaggtttatttcactcgacagccggatatctcctatcatcctatggccttcctagaccggtgccacaaaaagtcattaaacccgacaaaagtcagaccggcgccataaaatcaaaaaaagatctccgcctcctacatcctagtcctccgatctgtccgtgctccgttccaacaactcccgcgcggtacagcagctcactgtgcacctgcactgatcgctccaacggtcttccaaatcattccgggccagatcgcgtgaccccacaggccagcctcccaagcgccccgaggccacggtgccacgccgtcccacgtgctctcgcctgacgaatttgaacacccccaacggctctctcccatctccccgtcccagcgtccccgtccctatccctccgaccgttgcgcgagacgatacgctcctcgtcctcgtcccaccccgcccgccggcttgcttgcaaatccagctgctaaattgctccgcactcccacgccctctctgctctctctctctctctctcctaatcccgatactcacctgcccctgctccgtacgcgcgtccatcacgcacgggcagcggtgcagccgccggcggcgacgcaaagatggcggcggcattcactgaagaggagaaggcggtggacgacgcgctgggctaccccaaggcctacgccaagctctgccgaggcggcggaggggcggtcggcctgccctacagccacggcccgccgcacgccttcctcccctacatcctccagccgcacgaggtacgtgtgtgtcgtgtgtgttcagcggtcgcctgatccgatccctcgcctcaccgccgccctgcgtgacccgagagcgcagaggacacgagctgagctgatctaaacgagtggtttcgatgggtacaggcgctgcgggccaaggacctgaacgagatgttcccggtgaccgacgcggaggcgccgcccaccgccaacccccgcggcttcgccaacctcctctggaagcagctcgaccacctcgggtgcgtgcgtcacggtttgatttccgcttcgcgatctcacgcccttcgtgagctcggctgattgatttcttcggcgattgaatgcaggaacgccgggttcgatccggcgctcttccgggtggacgcgtacgggaacgtgctctacctgcacgccgactccgcctcgcccctcgcctgggacatcgaccactggttcccctgcgccagtaaggaatcgctgcggtctgatgagtttttgttttttttttccagcctcgaacactcttactgatcgcttgatcggtgactgtggatgtttgtagggggagggaagacagtgccgagcaacctgcggatagtgcagtggcaggtgtgcaggaagaagcagaacaagttagagttcctcatgccgtggtgggatctgcagctcggcgtctctgtcaaccagttcctgtccatcttcgcctccaagaactccgacttcaggtacgcttgctgccgccgcgtgcccagcgttcggccgcttgctgctgtaggaaccttgccttactgtaactgctggatcttcttcatcatgcagaaacagagcattcgcgttcttgttcacccatggtgccagcgaggagctgaactcgctgcaggtggtggaggcgcacgcgttcccgcagcacttctctgagatgaaaacgaaagtaggactcgcccctgctgcaattgtttcctctaggggttctgacaactcggtgctcaaatctcttgatgcgaaccgaccactcaggcctagttaccctttgattggtataaatttctttcatgcctttgattttggtatgcctgtgttcatatgatctgtggagtcctaattgatggttatctgtgtagctgctaagaaatttacaggcgacagggatgagaatgtcaacctcgcaggacaggggcctaattccactaaggagaacaataacccagatgctgacggctacattagcaatccttacttgtccatagcaatggccagggactcactgaggcaacgagaagaggccaagaagaagcaggccgaacttacagaattggagaacgaggccaatgagctgaagcagatgaacgaagaggaacgggtggccatccagggcttggaggccctactaatcaagaggaggcggcgagttgagaagtgtcgtcgcttggcagaggctcagtccaactacaaggcagtgctggagaagatgatcagagatgccatgcaccagtaagcatgattgcttaattaaaagagcattaacatgtggtattcagaagtttagtgatgttaattatctgtcaatatatgaaatgcaggtccgttgtgtacaaggaacaacttaggctgaaccaagctgcaaccagcactctcatggccagattggaggcccaaagagcaatgtgtgactcatctgaaaccgagctccgtaagaagtaccaacatagagatgatttggagaggcagataaagccagaaaggaagaggtatcgtgttgatgatgggttgctcgaggaaaggctcagtgagagtgtaaagtatctttcagcaagaagattgaggagtagccctctcaagcaggaactgagggttttccttgaggaagatcagaggtattcagatgcatacatttccctaggtgaagaagaaattggagaaggaacttcaactcgtactcaagcattcagcaatgccagaaatgaaccatcgaaggtgataaacttcccgaggaggtctctttccattgaacagaacactgttgatactgaaagaggaagaaccctggtgcgggagaagctagaagagttggcgatcaaagaacgtcaacatagcaggagacgggagacaaaagagaccatgagatcgaggggaactggtacacctttaagatcaagaaatgacaaggctaaagcgaccctgcagaagtgctacgagtctgaaactgaaaaatatcatgtcagtgagacagtttcaataccgaggacctcatcacttccaagtccaccctatagagcaatcggcatgtatggaacttccagatacggtacagatcagtcaatgctactgcaaaagagtgaagcacttcatcacctaggttttagcagaccggaagatgatgaaaacatgaaccatgttggcaaaggaaatgtggataagtggctccatatgctcatggataaccaacaagaagatcatgctgtataccattcttcagatgaacatgataatgacgaggagaatgcttcagatgagcagcaaatgcagagcagaattgacgaagagagctgcaggaatggggtaactgaatgttctgatgagatcgttgaggtcgaggacgagattgtttctgaccaaggagcggaaagaggcaggaacagctttggaattaaagagagagaggaaaagaagatttggttccctaggtctgacagcaccaggggtttccggtcactgccatcatcaccctctaagatcctgggaatgagaagaggcgtggaatgcatgggcaggaagcctaaggtggctggcgacgatgactgcagatatggctatgaggattcagtgtccacaagcagcagcaagttcctcagcagatgcaagcaggcaatcaagaaagcagtacacaaataggtcattgcaccatacatctgaacctatttattcttcttttcagtgtgttcaaaatcgatgccatttgttatagtctcggtaactgaataagtgagaatgggcaaagctcgcagacttccgtctgatgctttgcctgttacttgtgtgatatttttttatggtcaccctgacgtgatcagattagtgtgtgtacaacaattttttattcgttactttgttagaaaagataaatctattcctgttcctgagctgtagaagtctgagattttagaacaccgattttacattttccatgttatctgttttgtagcttctgcctgtccagcagttggtgctttcaggctgcgttatagagttcagtcagataatttcaccgtgaacagaaactcaagatgacagtaatataataggccatccaaactcaaaggaattacaactataaccccaagcaaaagcagaaaacacaattaacagccgttgatcaccatcctttcaagttcaacatccccatctcaggacgttgacttgcgccactttgcgtttggcgtcgccgtggcggtgctgctcttcttccccttgggcggcgtccggcgttccatgtcgctctccgagttgtccaccctcgcaacatcggcgcccatgccaccgccgaaccagaacgcgctccacttgaagaagccgccaccgccgccgcccccgcgtcgccgcctctcggagctcagcctgtccacctgggcctgcagcgcgttgcactgcacctgcaacgtacgtttcagtgtcagtgcagccgat

SEQ ID NO: 4242 - DNA, 5754 bp, Sorghum bicolor
  misc_feature (1892)..(1991): n is a, c, g, or t
  misc_feature (2825)..(2924): n is a, c, g, or t
gaacattcattagttcaaacggtttggttcgaagcccgcaatttatgcatggtttgcatgaagctttttttttactagtggcgcatttttgcgggagagatgagaatctaggcgcgcacgtggagtaactgtatgcggatatcgatgaggcaaggacaaaaagaagtctagaggggctgtagtgctacaacgacgttttattcacaatctacggaagaagccaggctgaaggcggtttttttaccctaaaggcacatgccctcactctcctacttattggtttcgttttaagaaatgtgcaaacacacatctcaaagtagttttacattaagatgtgtgtttgtacacttctcaaagcgaatcgaataggtggaatagtaagaggacatgcccggagggagtattcgccgacggttctagacttttggacctcgatccatcagctaggtgcctggtgcctcggcccgcgtacgtcaactgatcgatcgatctcggccggggtcagtacagtactctcggagtcatttgcatgcaggtgcctggtgcgcgtagacgccgtcatcgtcggtcgatctgctacctccagcctcctcgagagaaacgtgcagtgcagtggtttcagctggttgtgtcacggggcacacgtgcgaacgccgccgggaccggccgggccgggaacgtagtacgaacgatcgacgaacacgtcggtggcgcgcgacagatacgagtggtgaatactacgcctgaatggtgatggatggagacgaagtacggaacggatggaggcagccgcgtcgtcgtcggatcggagcacgcggcgcggccggcgggcccggggatggatcatggatggatggatggatggggcctgcagcctgcatcaggggtcgagacccctggtatgcaggagtggcgtccgtctgttttgattcttttttctctttttcgcgaatgattctcacaattatatatatttttggtagcttgattttagaatctgaatttggagcttggtgtcattgtcgctggcgccaaacaaaagacgttaatggcaatggtgccaagcccacaaaccacgtgcacaactgtgtactcttggcggcatcagtggtggcgtcaaatttagcgccaaacggtgttactactgacaccaaacaatgttagcttgacgccgatgatagtagcctaagctctggatctagattctgaaatcatactaacaagattataattgtgagaatcttaaaaaaaaacacacacacacagaaaacgaaaaagacgggaatggcgctcgtccacatggatgtggcgacggggagaggtcgtactcatggatgcgcgtgacatccaatggacgggctcggcgaccgcgtgaagtggatgccatcgattggcgggccggccgtgggcgtgaatgcctgcccgccgtggtgtgtatcacaccttcaacgacaccgcatcggagctggccgcggacccccgcgcgcactgcagctgcagcaaccggccggcacttttgccattgctcctccatccatctatctatcgtgctctatctctatacctgggtgttgctgtcggcgcccccacacacggagcacgctctatataagagccgcccggcgccgcgtcaacctccacagtagtgcacactccatatagaccacacaacacagcatatatagctagctagctcgatctagctagctgcatcctctccccagcagcgtcgtagtcgtacgacggccccggcccttgattaatttccttgcattcacctcgagacccaggctctccagcccacaccgacaccgtccccggccggccgtcgcgcgcgtctccgtcgtcggtgcctcgccggccatctccatcgtctcgatcggcctctcatnnnnnnnnnnnnnnnnnnnnnnnnnnnnnnnnnnnnnnnnnnnnnnnnnnnnnnnnnnnnnnnnnnnnnnnnnnnnnnnnnnnnnnnnnnnnnnnnnnnnacaaagacgatggtgaacaccatgggcgtggagccggtgcagcgcggcgccgggctgccgctggcggcgctgaaccacatctccgtggtgtgccggtgcctcgagagctccctccgcttctaccgcgacgtcctcggcttcgtccccatccgtcgcccgggctccttcgacttccacggcgcatggtaggttgcattgccattattggagttcttcttctcgattcggattgctttgataagctaaggtcgtagctaacaatgtactgcatggcctgcgtgatcaacaatgtatatattcattactgctactgcactacgtactacaggctgttcaactacggcataggcgtccatctcctgcaagccgaggacccggcgagcatgccccccaagaagacggagatcaatcccaaggacaaccacatctccttccaggtatgcaatgcttgcctcccactacgtcgtcaagatccagatcgctagctgttctgcaatatatatagttcctacccacgcgtttgatcgaccagcgtttgtataaatatacatacaaaaatattccttgagatacacagtaagacaaatttggagaagggaggaaaaaaatgaacagagatatacgcctcgatcggtgtcacagttgacactagggaatcgaccgaattaattaactaagtagattaacctgcatgttcgtgcccctgctttatttttctgctgcgagatccacgactgatcctcatcttctgtagaatatagttatatataattaatctgttcctcgaactcggatgaccggtattaagcacccgggcagcagtcgacggccgtnnnnnnnnnnnnnnnnnnnnnnnnnnnnnnnnnnnnnnnnnnnnnnnnnnnnnnnnnnnnnnnnnnnnnnnnnnnnnnnnnnnnnnnnnnnnnnnnnnnnaggaatcaatatatatatatacacacctggtccgttctcttgtgggaaaaatggtcacaacaacttcaattaatttgacagcatcccattcctctagcacgtctgatgtagataccaattagatacgaagttcatcctaagatggtgactgaactcgcgcagcatggaattaatacagacaagccaataaaaagtgctggttgtaaggcttcagtacgtagctagctagctattacttagccacagttgctccatttctggcccccattttgacctcacaatttgctgaagtgggctcgatctgatctacatcttaacttaattaagaaatagatgctagctgctggtgggttacatgcatgatcagtaatgattaataacataataaaaataggactagtacgtagatcgaattgaatatcgatgaagaattccttatgctatctgggtaggatcattgcatgtgcacacggatcatgccaattcctttccaaaaactcaactcaggctgcatgaatagccgaatagatattatttgtatatgtgcaccaagccgccatgcaagctattgcttgcatgcatttaaatgttgcgcaagtgaagaagaaaaccttcacgctcatcagctgttttgatagggactgatgcgttgtctatttgtctggatctatctcttgacatatacatatgtgtactactatgtgctatatatcttaaacttgcatatataattaccatcagtaatttacttattaacacattcctatgtggtgacgggattttgatgtctccagcttttcttggaaaaatgggacatacgaacatggccgtgcatgtgcacctcttagtgagatagcactagtaatatataatcttattaaattgctttggtcaaacatttggaaggaaaaaaaactatattgaatcgatcacactatgtgtactctttaactagacacatccaagaatgatagcataaggatgggcttcggcacatatgcacgtgcatgcatacatatatgtccaactctcctgcatgctctggtcctcaagcatagtagacaatccactaggcgacgatttggaaagttggagaaagtgataacaatagatttttcctagaaaattgacagtatatttttttatttgtgttacacatagagttaatttgtcttcacacccacacaccctcagacagcgtggatgctgcgctggcgggatcatatacgtatctcactcacatgcagatctggcaagaccaacgaacgtacgtatctgcatgcatatgcatgcacgactagccataggccgttgcactataataacgacaatataaagttaaaatcatgcagtatgcatgctgctagcatacatgcatgagtgcttcttaccaaccatgcatatgaacaaagtcatctgtcacggaaaggtgaactgatagtgcttgtgctgttgcatttgcatgcatgcagtgcgagagcatggaggcggtgcagcggcggctcaaggagctgggcatccggtacgtgcagcggcgcgtggaggagggcggcatctacgtggaccagctcttcttccacgaccccgacggcttcatggtcgaggtctgcacctgcgacaacctccccatcgtgcccctcgtccccgagggccacgccatcctcggcctgcagcagcctgctgcagcgccagcctgcaagcggccaccagcagccgccctcaggcagcaagcgccggcgccgcttcctgttcccgtggccgtcccaaccccggtgccagctgaacagtgcattccggcgaaggccggcggcggaagctgcgtcggcgaggtcgaggcgagcatccccgcttgcgcgatgagatcttgcccggagcacgcgtgcgtgtagcggcgcgcgtaggtacgtctgattgatagccgagagaccaagcagatcgaccggaacgctgccggcattttgaagatccattggagaatttcgttgccttcttgtttccttcaattagtcgtcgactccaccatgtcgacgaagctgtacatgtgtgtttttgggtgtgtcttgtccgttcgttaattagtttattttgttcgattcgattgttggagtgccctgacgcgaactgttgtagctgcagctgcttagctagtgggttagtcgccatctggttgtgccaaactgccaattgctttgcactgctaagcgcgaactggtgaggagatcgatccaccgatcgctctacagatacggcacctaccaacacttctgcaaatgccagccgtgccaagtgccaacatgatgtaatctctttatatataagatatttatccatataaaatgatagttgtgccactttttctttgaaacatctggcaaattttaatgaaggagtgacagtttaaaacacaatttaatttgtagggacagagctagcttgattaaaggggacgaaaggaactaaggaaacctcaaattgacaagcacatccacaccaaacacaaacaaattgtagttcagcttgttggaatggtctcgcattgacgctttcctcctgtgccacgcaccaaggcccagctagcttctggatgggtttaactggttttatgagcacatttaattattaaattaattaatcccagggttcatgtttaatgtgaagagttatgtgttgtaatcctgcaataaagagaggattgacagaatcagaagatctttcctttggaagggtgcagaaatagtaatggtgggcattgtctagttggttgcattggccaaaggtcactagaccaaaaatactagcaggcccgggcattcttgacttagagggcttt

SEQ ID NO: 4243 - DNA, 7107 bp, Sorghum bicolor; identical to SEQ ID NO: 3768

SEQ ID NO: 4244 - DNA, 5511 bp, Sorghum bicolor
aggtagggggaaaacatgttacatacttggtgcgaacaagtaaaaaaagagagaagaaaaagctaaaagatgaaaagataaaaaaaactccagggggtcgtctcatctcctcctcgacgtgcgggttccgccaaccctgtagactctgttggatggctggaatggtgtcgtgccatcccctcgttggccactgttgccatgcgatggctggcgtaggacaaacagggagctctgtactttcccgattaacattatggtcaaccggcttcccaggtgaggaccatacctgtactatagagtgttttggtaggagaagtacagaggttggcaacacattgtcgttctatacctatctttgatgacatacgacatctcggtgttgctcgatgtggacataagccacacgagggcgtgtgctccactttcccagcgttggagatgttagaggattaggttcaaggtggttgaaggcgacataagctttatgacatgcgtctgccttcatccgagggtcgttcaccgtcgtctgagggtccttatgcataataccattgtgcgaggtagaaacttccttcatgagaccgaaaaaggggggtccaccttttccaggtcgagcaaggcgggggcgcgtccttggggtcgggcgaggcggagatcacaccctcggggttggatgaggtggaactcactcccttggggctgggcgaggcgaagcttattcctttggggccgggcgaggcagagcccacatctttaaaattgatgtgtgttgagttacaagtattgggaccaaagtcacaagctagtgattcacatgacatgccttgtcgttgcctgatcgacgaatgaccgataccgtgtttgcaccttgcgaccatgatcgagagaatctatttttgtgtagtctctatggagcatatttttttcaggttggattggatcaaagtgaagagttatttccaatctagttcggaaaaataatacagctatttagagaagactaaaacaacaccatgctagaaggctacaaacatagaatttgtttacttggcttaaaagttatgattaaatttactaatcattaatttattataaaaatattgctgaataactagcaaatctcgaaatcagactgcacatgcgcgcgcacacacgcccacaacgaatatgaatagagacaggcagaacatgaagcaagctctagcgactagcggtgaagacgcatcggcgtgcaacgtccgctcctcctccagtcctcttaccttaggccttgtgtagggccttgtttagttccaaaatattttgcaaaatcgacactgtagctttttcgtttgtatttgataaatattatccaatcatagactaactaggtttaaaagattcgtttcgtcaatttcgaccaaactgtacaattagtttttattttttatctatatttaatacttcatgcatgtgtctaaagattcgatgtgacggggaatctgaaaaattttgcaaaattttttgggaactaaacaaggcccagatacacccaaaaacccaaaactttataagattctccatcatatcgaattttgcggtacatgcatggaacattaaatataaataaaaaagataactaattacacattttacatgtaaatcacgagacgaatcttttaagcctagttgcttcatgattggataatgtttgtcaaataaaaacgaaagtgctacagtgtcaaaatccaaaatatttttggatctaaacaaggccttatccgaaaaataaaaataaaaaatcacgtgcgacggtacgagcgtgacgcgacccgctcgcgctcgctattgggccccagtccgatcgggtcggtgcctacccactcccgctggccgccgcgcccagggcccaggcgaggcgatgcgcgtcgcggaccacggaaccaagcagaccgaccgagtcaatcaatccggcgagttgtgcgtgtgcggcgcggggtgtgtgtgtgcgcgcgtgaggcatggcgaccacgcgcgaccgtggcgccggcggcggatcggcgtcgagggtcggcgacggggacgtcgacctgggcgagggctgggactggggcgccatcccgcggctcctctcctccgcctgcctcttcctctgctccgggtgggtccgcttcgctcacggtcctctcccccccttcccttccatcgctcgccttagctttccgcatctggtcaatcaagtgcgatctgcgccgcctgggaccgaaccaaccgtaggaggggtttgcgctgccgcgaccgcgagtgaaccagctgcttgcggatgctggcagattgacgtagcctgtagagtgtgtgacacagatggaaatatggaatcccgccgttgcgagacggctgtgcgttccggtcggcgtccgcgccatggttcatccatctaggttggtgattgattccgctgcgcatctgtatatgagttcgacataggtgctggaactcaattcatatcgtttttcaagacgttacccctcgcaaggtagtggcgttaccagatttagcgactacccactagctgtctgcagcctttagcctaggtgtctgtttgggattagatgttaggatgttctcgtgctctcggtctttcacccactgactaaagtcgctggtgaccttgtctgcctctagattgtggcatgtttgccatctgtttcagtttcatatttgggtatctttacttgcctttttttttaatctacttatgctaattgtctacatgatcaaactccttccgaacagagcagaggctgttttggttgctgcgataagactgtaaaacaactgggtgaactgtccagaaacctaatcacccatgaccaaataaccattggagagccatattggagcacaaccaccatcgaggttgaaccagcagatctcaggggtgtttctccaatgagtacatctaactgggcctttgatcagcatggaactggtagcagtcataaccttcctggacttggtaataatggtaggtcactctgaatcatgttttcagttctgctaagctagggcattttcactggatcgacataatgcctcctttactacaatcttaaccttgactttgtcctagtttctctgagctgagaaaaaagaatgttgggcttagttttctgtggtttcaatgggaaatttattttcatcgcttgataaattgttcttaaaagtaccatcgcttggcataaatctcaatattcatgttgagctatgtcagggtttaactattgccagtaccgagatcgatgcattactatgctaccatgtcttaattttctgtggttttaatcagaaatttatcgaatatttgaaaccacagttttgttctgtcatctttcacaacatatggtacattttgcaactagattggtatataagaaactttagtaggcagaagaaaaggcagtgccctggtcgtggggaggttacttgacctctccatccacccgagtttgacagcttcaaccagctaaggtgccaatgtcctttggtgaatgccatatcttctaatcatttgtcttttcctgaaagaatgggtgaagaagttttgacttttgattaggcaaactattgcctgattgttattctgatgtttgtgctggataccatgtgaaattggtgtacctattgagaacaaccttagtatggttgtctgaagttcattttttttttgcaggactcatcctgtgggaacagactaggcaggagtggactgaaattagaagtctacggccgaaggtgaagcaggttcgcgaaccagtattgaggtatgagcgaatgaaatgaagaccgcaacccaaaaaatttacccatatcacgtttctgtcagacaagtatatattctatgaagtacattttctttgaccaaatgcactttgtcccttcttcatattgaaagcaaagggttatgctgggatcaccagcttttcatattaaacctcagaataccatgcttgcctaccatcattttagctttcagtaaccattttgtctgcattcttatggaaacagagctagtatccttttataatctagttttagacgcatatttttgttctcctgaagtttgaaatcattgcgatagacctgtttttatccaggtgatattagttgtattggtcttgttggagtttctactgattcttccaattgtgcgctgttagtatagtttatcacttcattcatgttgcgcactatatgttgctcaagcccaatgtgttcctttgtgcactccgattccataatacttgttcatcatcctcactagcgtcattgggaccattttctacacctactttaattgtagggaagtgattaagcgattgtaaaataatatttgataaggttatattgagcttggacatacataccgttaaatggttatttcttatgtgacttgtaagttctacagcatattatctaggaaactttcataagcaacaaatagagtacctttgaatcaaatttgatggcagctgctccttttacaagaaagatgcagagaaccagctatgatgttagtttttttttaagaagagctatgatgttagttgaatcagaaagtggatagtcagtcttatttgtgtgcaatttgttttctctcaaataggtactaggtttttattccattccccataatatgctgaagccaataatgtcttattttgcttctgatgatgtatttcgtttgtgccacctcaagaagctttaaggaatgctatctttattgattgtggaggtttgtgtaattgtgctaaaaaatctatatttatatatgcagttggaatgcagcatatgagagtctgcttggatcaaataagccatttcctcaacccattcctcttcatgtaagatctaacacatttcagtctagcatttcttgcaaggcatgcactcttaaacatgggtcatgacattgcaggagatggtcgatttccttgtggacatctgggagcaggaggggctgtatgactagcgcaaatgatttcatgggataacatatctgggataacacatagttgttcctcaagagaggggaaaaaagaatgacatagggtgtgtaggcttgagatgaggtggcctgtcatacttgtttttgtcaatggaggcctgttgtacttgcagaataccgagcttgtaatgctagagaagtcctgatactgatagtggctttgttgaatttgtcaaagaaagttgtgagaggttgagttgtgacaaaaagtgcgatttgtatttgattaagaaggctttaacagttaacacgatggcagttgcgtgttggttcgagatggttggattattctaaggagcgaggagtcatgtaagtgtccagttcgtggtgaatgcaacctttgactgatccagttccggactgttaaaattcgttcgttctgtaatgtgaagtggctgtgacttgtcattttgatgaatgatctctcttgccataaggaaaaaaaatggttaatgtgtgcacaa

SEQ ID NO: 4245 - DNA, 5792 bp, Sorghum bicolor
  misc_feature (1)..(14): n is a, c, g, or t
  misc_feature (255)..(354): n is a, c, g, or t
nnnnnnnnnnnnnnccacacgaattatgaaacagtctaatttaccccctgaactatccaaaaccgttcaaattatcccctcgagtgattttttatggcgggtttgctacagtaacaatggttttgttacagtaactgtggttttgactttttcttttttcttatttgttttcatataatctttgataaatcatagtaatcacagaaaatcataaatataaatctaattttgttggactccacatgagtagatctnnnnnnnnnnnnnnnnnnnnnnnnnnnnnnnnnnnnnnnnnnnnnnnnnnnnnnnnnnnnnnnnnnnnnnnnnnnnnnnnnnnnnnnnnnnnnnnnnnnncgcccgaggggtgattgaatggttttagatagtcaggaggcaaattagactgtttcatagttcggggagtaaagtagacaccaccccataattcagggggtgatgtagactttttccggttccaaatacagaggcactgagaggcaatgcagattgctgtatgcctgtatctagcaaggtgtgaggataacaggtggagccatttttttttatcaaaagtcttttccccccgttttgcaagcggacggatgctcttgattgatatctccgttcgctgcagctaaacagcagctgcaactgcaagcctcctcaatgggcattgtagcagcagcagaagatgctgctgcagccgctgttcagctagtaggagtcatgcattttcattttattattatcgtggttttaatattactgttgtttgttttctacaaacttattaatcaaatttaaatgactaagtttaacttaggatatacgaagtagtcctcatagtcaaaagagggtatcctgagcaattggctaatagtgttcatcaagatacagtgcccatgacaacccaatgttgaataggcatgcaaccacactatgttgtcggacaagatacagtgcccttgacaacccaatgttttgagaagaattgtatgcttgtccccctcccttaaacaatggaaaaattgtattttctggatctatgcctctgtgcatttgtagcagcttttaatgtttttctggctaccttagaaattcattacaatatgttttattttcagttatctctaaaagatcaattcgtaggtgtaattggataactccctgtacaaagaatctattctttagagacccttgattagagactggtggaataactgactctaaaattcatttttttgtcgtgactgctgtagtagtgcttaaatcctaggagctcgaaccaacgtttgttgaggattatcctctctctgtccctctccaccaaaatacaaaccgggttaatggttttttagtggttggcggcgtctatcaatagtaagatacatgtggtggtttcatcaattttaaaatatgtcggctcagtagaagtgctcctaagagtagcatatgtgtacgtgtccgttggtgtgagtgtacaatacatgtatgggtgccagtgccaacgtaaaaaagacacgcacctgccacatattggaaatggcggaccaaagaagaaaacagagtggcatttccttcagcaacgaacatactcgtttggacatagtagcgacgttaggtgaacaaacgtaacaatcgtcttttcgactttaggtgaacaaacggatcatcttttcggtttgaaccttagggtgcatgtatgtaaaacgattcatcgagtttctactctgctttgacaacattgcgcacacaaagcggaattgaagtaaacaatgcagttgttgcttacagaagtgatcacctttcataccctacattttttgctgacaatgtcgcatggcatccaaactcttgtcaaaccagagttcatagaaaaccataaaaacacctactacttacctgcccccttcatcaaaaagaccaatactacaccagaacaaggagtatatatacatcacgcgcgtatcagtttcacaatgtgatcatcgcaactaacaatggggttcggcgtggtgtccctgctcgacgcggtgttccggcgcgcgttcacctccgccggcctccgcccaggctccgccgtcgtcgacgccgacgccggcaccaccgtccacttcttggcccaccgctcgctcctgcttccaccaccgacgacgacgaccgcggaggcggaggagcagaagaagcggccggtggtggtgctcgtgcacggcttcgggccgggccccacgtggcagtgggcggcgcaggtgggcccgctctcgcggcacttcgacctggtggtgcccaccctgctgttcttcggcgcgtcccgcacgcgcgccccggccggctccgtcaccgaggcctcccaggcggccgccgtcgcggcgctcctcgccgggcgccacctcccgggccttcgggtcggccgcccggcggtgcacgtggtgggcgccagctacggcgggatcgtcgcgtaccacctggcccgcgcgctgcagcagcacggcgccggcgtggcgctggggaaggtggtgctgtgcgactccgacgtgaccaaggggcccgaggacgaccgcgccctggcggcgaggggcggcgtggaggaggtgacggagctgatggtgcccgcggacaccaagatgatgcggcggctgacggcgctctccttccaccgcccgcccatgtacctgcccgagtgcatcgcccgcgacctcctccgggtacgtaattacagtacgtaacagtgtcgtccaccatatacccccaccacgtaccgttggttacagaaaattggaggcctaactgtcgttgccgctgccaaagtcgtttggtccagataactaatgaaagcatatgtactgcactactgtttgcactaacaacgactcaattaattaaggacgttaataataatctagcatccaacaacgaccgtgtttctggttattaagtcaaacatagctatttttgatcaattattttgtaaaaaagaaaaaccttatagttcataacatatgaattatatattatgatagtgctctctctatttcaaattaaggccttgtttagttgacactaaaaaccaacttttcaagattctccgtcacatagaatcttgcggcatattgcatggagtattaaatataaatgaaaacaaaaattaattgtatagtttgcctgtaaattgcgagatgaatattttaagcttagttagtccatgattagacaatatttggcaaataaaaacaaaaatgctacaacacccgaaataaaaaatttttgaaaattgaacaaggcataattataagttgttttgatttttttggtacgtctatttactatatatatagacaatgtctagatatataggaaataaatataccaaaaaaattaaaataacttataatttcgaaccggggagtatttcttatagtgaaccacatatagaactcatgttggtaaagccagcctatataacaaaaatagttggtctcttttgcactttactccacttgctgcattttctagccttaataaagagctaaatgtgtatgagcgatcactaaacttatcaagggatgtcatttatgcccataaatttttaaaaatatattttagattgctaaacttgtgaagcagtgcacttaaaatgacctacgatgcactatatagcaagtttagtgacccgaaatgtattttcatggttcatggacctaagtggcattgcttgataagcttagggtccgctcatgcatttaacccaaacgtcaattactctcactgctaattttggagataagaacaaaagatcaagtttatttccacgtagctgaaatgaagcaagctattgaatactctgcaaaataatattgcattgctatatacagaaatccatggagggtcagagacaggagaagattgagctcatcaaagggatgaccaccgcggaaggctcccagcttactcctctgcctcaggtatgatctacattaatcattaatgcaacaccacaagcacaagagttcacgcatatataacttccataacaacatagaaacgttataattaatcattaattattagaaaggaaagtggatagccaaaacttggttccagaatgtaggtccatttagtggcatccgaagtcaaagtgaaatttctccggcttaaaaatcatgtttaaagccgccacgaggtagtcttcaaatccctacaaccgtctctgcctcgtctacttcacagctgcaaagagacatgtcgactttggagctgccgtcttcgacctcacaagcgctacatagctgatctttggtgcaatttgtttgtaatgaattaaaccgaaccctttttgtaactttgacatttaggcgctatgcgccctccgttacaccggcttgccggaatcaatggaaaatcattcaggtgggatctctcccctccggtgaatctttcaaaaaaaaaacaacaaactctacaacatcaaaagctttattaaatccatcatgaaatatgttttgatgtttcaaagtcagagaagattaacttagtactcccctcattccaaattgtgagtcgtttcgtcttttctagctatattgcttttgctatacacctaaatatatattatgactaagtacatagtaaaaactatacatctagaaaaaaaacaagaacaacttacaatttgaaatgggagggggtacaaaactatagcaaccaatggttatgccactattttagctcattacacaatacatacatagaagttaaacatggttcttggccaaactaacaaagaatcaactcgcatatccctaattactcgggtcaattagacactttctttatacaataaaacattcagcaggagatgttgatcatctggggagagttcgaccagattttccctctggagaaagcatacaaagtgaaagagtaagtttctaactttctattctgtacttctttttttgaggaaccttctattctgtacttggagtagtaaaagaaaaatcagtaatgcatgggctagtgctccatctttagagtttgttctttattcaaacttttgagtgacttcacggttgactgagtgagtgagatgaaatatatgaatttatttaagattaactggatggaatgcacacttgcaggaagctcggggagaaggccacggtgaaggtgatcccaaactcagggcacctgccgtcgcaggaggaacccaagctcttcaaccgcgtcctcctcgagttcctgctgcagccatccatctccaacggcagcgccgccgcagtagctgagaaatagaatagctttggtgtcttgggttcgacgttgtgtgtcatacatggcctggtaaatggtaatctgtcttatcttaagttgcgtttggaacgctctagtattcaaataaactcgactccttcatttcatcgtgggtccatagctcagtggtagagcatttgactgcagatcaagaggtcaccggttcgaacccggttgggccctcctctataattttttttaaaaaaaaatcaaataaaatcatgtcatttactctttttttttcttgttggtatagaaaaactactttgtccccactcatatacaacagctactgctaggtggaagtcaaatacgacaagaattaaatgaatcacgacatcctcaacgttaaaagaacaaggcactcgttctcaaaggaacaggttaactaacatgaaaactaatacgtccacgtgcttctttgggacctcgttctctcctccattattattgcaaggactcaatggctggtgtcaattaca

SEQ ID NO: 4246 - DNA, 6321 bp, Sorghum bicolor
tttgctttcgattacacaactcaagttctggtaagcattaaatcaggttttagggagtttaaattaactgttatattacttcatctgattatgggtctgcatttattctctgcagtttttcatcgtgttgtcatgcctgatttcagtctcagtaaacttcagtacttttctcgtgattgggaagacatctcctgtaacttaccaagttcttggccatctgaaaacatgcttggttctcacctttggctatgttctgcttcacgatccgtttagctggagaaacatacttggaatcctaattgcggtaattgggatggttttgtattcatacttctgcactagagagactcagcaaaaaccagcagaagtctccccacaagtaattcaggtatgttctgcaatggctagctaagttccatgaataatattgtgttttgagcagataaattccatggatagtatcgggttttgagcagataacattcaaacagataaactccatggacgtttgaaactgaaattcttattagtcgacaaaacattacctgcgtagcatgtgtttcagtgcaactactgttggattgacatctataaatttttattgttccattaatcttttgtcatcttttcacttgatatgcaacatttatatttttgtggaaacattactacgtttttctagctctgtagaagctttcttgacaagttgcatgctattgacatcacaggcgaaagagggtgaatcaaaccctctgatctcagactccctgagcgctgctgaaaacgggggcagtgccaccgacgacgaacctctgaaggtaccaatgtggagctcaaagtactcgaaggcgtgaaggctgttctgttactagtgtacggtgctatacagaattcagcttggttaggcagatactagggttggaaggcaaccctgttcctgttccatttttggccttctattttttttcttcctttctggcatatactataaatatatgtgctgtcagtaaatggatctcactcttcagaggataatacctcagctcgagacgagtggtctgcctgaaagctattttcttatgctccactccacatgtgtaacttggtagatggacatgatgtcaacagtagtagtttgcattcttttgtactagtagtatatgtatatttctcagtcttctgttatgtattcctcgcgttccgcaagcttcttgtcgcccgccatctgcatccttcgcctccttgtcgcccgccaccaccagcattccgccgccctcttcaccgctctctaagccacattcctcgccggagaagaaaccaccgcggcggaggtggtcgcccacaaggccacaaccacaaaggtgcagacagaagctatcgggcctacttgtcagctttgctcgcccaagtcctgacgtcgatccagcggtgcaaccttattactactatctttggccataaaagaatacaattcttggattttaatgagtcaaacaatttgaactttgactaaatttatattaaaaagtatatttttttatacaaaataagtatcattaaaatagttatagaatatatttttataataaatttatttagagatataaaaattaatattatttactataaagttggtcaaacttgaactctattgacaggtatggataccataattgcattttctttggacggagagtattaaggttgcatttttttttgacacaagggttcctggacggaaatattttaggcccatgtcatttcttccaagaaggttcagactgggccttcatagtcataggtctagacattgtggatattggcccatttagaactgggcctacttcggctcaagagacttacttacccagcccaagcccaagagcgatggcgggaagagggcaggaaacggcgggaagcgccgccgccagtggcgccaaaaccccagccgctataacacccctccctcccctcagtcctctcgtcccctcgcctgcccacctcaccccgccgttgctcccgagtcccaaaccccagcgcgagagaagaagagagggagatggtggggccgcagtacgatctcgtcgggaacccactgggcgcggtgcgcgccaccttcgagaggacggctgccgccgcggcggcggagtccggaggagccgaccctgtggcggccttccgggggaaggattggggcgctggcgacctcttccgctccttcctcttcgagcaagacggccttggcaaggtgaacgatcattccttgttctttctgtttttttccggttgctttacactgatttgcctatggatctggccatctggggtggtgattgaagatatacattggctaatcttataaattgtgtctcatttaatttcgatgcatcaataatctgtagaaacaagaacatgtgttcgttttcatattctgaggaggaggcacgcattgtcgtatcgagtttgtaaatgaggcttctaatgccaaagtaaaataaaattccaggttccggtgttggatgcatcaaatcttggattgatcaaaccaaacaccctggtccggtaccggggaatggtccaggatatgcttgggaatgagtactacattggtgctttcaaggtactggactgaggctcataagttcttgtggaaactgccattagtgcctgctaagcttattttactgtatcatctgtgtaggatgggtcaacttggaggacaaacaagttcactgacgtctcaccgttctcaatgccgcatccttgtgattcgcatctttgggagcgccatctcttccactgtgtgcctgtatgttactgcttccatggcattttgttttttcattctgtaaccctaaaaggtttttggaccaggagatggaaatgagaattcaccaggatttgtaattggttcattgcaggcacctggacaaaattcttggacactggagtcttcaccaggacctgatgttcgcaggatgacaaactgcttggcacctgaattaagagagaaaaggaagagagatggggatgatgatactatggatgtatgcttttttacatgtttcctgcaaataaatgcagctattattcctgatgcccactgttgaagtgttctcattggttgtatttctttcattcgacaggtttcagaaaatgggcacagagagtcttcttcattctgcaagaagccggtaagagttgacaattatttgatttcagttaaactatcaagggtaaatatattcatactttcttatatgttgatgtgcatacaacagaatctcataaatgtatatgtatcgttttcttgcttttttgggtatttgggagcttcatctgtcaattaccctgaatatatgtcgtcctgtaatttctactctgaatataggcaggtatcctaataaattaggacagttgataacctgatttatttatgcatacctgcttatttttcttataacattgtgaagaattatatgaactggctattaatctgatttaatctccattctctttgcagaaggaaggcgatgctcatgtctcatccagttcaactgaagtggcaggaactgttccagagatgaatggaggcgatcatcatatacctggaagttccttttcatgtctggtgaaggtgataacttagaattttgtgaatgaaatgcaaatgatcagatttatttggttttgtttcagttgttatttatgattgactatttaatatctttgttgcagatctatgatatgcctgaaagtcaagtgaagctaaatgatgttattgagtttattggtgtatatacatttgacccagaacttgctgctcctagtgacaacccagatgacataatgttagacctcatggaagatgtaacagttcagttgcccccgagcaaggtatgcatatacatagtacttgaggtcatgtaacacgggaaaatgttggtttatcttatgcttagtttttttttctttttgctaacttttgattcctttaaataattatacaggtgccacgtcttcactgtttggtatggagaaaattatcatcccacgattatatttcaaggcctgttgttgaggtagatattaccttattttgttgtcatgaaatgtactgtgtttgctactttcactagcttttaccactgactaatagaacttattctgttgtttgttttggtcatgcagccttcacctagcctgttaaaaggcattcggcaatctttgctctctcacctcaccctcgtgttaggcaatgatgaacttgcagcccagtgcttgctattgcatcttctatccagagtatgttgtatttctaatcaaatgccctaactataagcatactataaaagtttggtttgagatgattcttgcaaagtcaattcatatccaattactaaattattgctcattaatctccatgcagcttcgcaatagggtggacgtggtcactgttggcagactctccttgaatttcactggcttcaacaaggaaagtgcttccatatttgggaatcaactgtattctttaatccagaaattggtgccatattcacaagccatacctctgtcaattgactatctcaacacagccacacttcaacctagaaaggacaacaagtcaggaaggtacgtgcttttagattgcctattaagcatcaacaatatataagtatattgacatgaactttcatttagagctaaaatgtaacctatgcttaccctaatatttgctgtaggttggtcacaggagttctgcagctacctcaaggcactcatctgacctttgatgagactcttctgcagacagggtcattgacatctaaaggtgtggaaaataccatgctgctcaagaatctgatggagtcgcagaaggtaatgatccttccaacactgaacctaatatttttaattctaatactggtgttgctggccttaggttaatttgaactgattatctaacatttaagtttctttgaatttacttgcaggttgactacgattttgagtactacaagctggaaatggcagctgatgtgcagctacttactctctctgagggaaaatcaaacatccttccttcagacttggtagtgcctttccggccatcctctgttcccacagttaatgcaggtgctgaggaaactgagagttggaggtggtatttggccacagtaaggtctcttcctcagtccactgaacctgagacctaccaggtaaacaccccttactccattctctatctagcagtggcactgatacaaaaccttgatataattgcattgttcttaaaaccgggaatatgattgcaaaagatgcatattcgaatatccaactataccactttgcatgacatggttagtgagttgtgtaacatttgcacttcccttctcattgcagatgattcaagatgaaatggtcagtgccatgcgtgatgataggagcttgggttgttctgaacttagcaggtctgtattaatgccacagttgaaaatacttgccttgctgtttgtccaggaagtctatgaattgtttttttagctcacttctcttcctctgatctacaggtggctaacaatggcacaaataatggcctcaagctttggtgagaagagtctttctttggagcattggcagatggtgaaggagcttgagaggcttagaaagcagaggatgcaatgagatgatgcatcattagcatgtgtttttacactctaaatgttattatggtggtatgctgttatgtgtatagtactggatgtgtgaatcaagacatggatccaagtcatttcgtaacaactaacaacttctatgatcctatggatgctatgatgatgtctgctgtgcatttttttgctcaaatttgaaatttactctggttactatggcatgccaaaagtcagatctgtgatttcaggattgtaatgctaaattactctgaatggaccacgtaatggatgttttgaaataaatcaaatccatttttaactctgcaagaatttaaagcttttcttaagtacattcctatgcacttaaatataggttatatacagatatacggcaaaagctgtatacctacaaaagcctaaacaacttgtaaataccactctatgtatagatacatagcaaaatatatgtagaaaagccaaaacagcctttgattgcttccatctaaattatagcacacctttgattattacttccagctgcaaaattatagcaaacaaagattttacttccacctaaatggatggagttttttggttgtgcaagtttatgagcgcaattgctcaacatttctaatcactacgcttattt

SEQ ID NO: 4247 - DNA, 6543 bp, Sorghum bicolor
gcttcaagtagtgataattaatatgatcaacctgctatacagcaatacaagtagtgatctgatgcaatgtttcatcaagttcagttttacacacttatacttttacctcgatcgtatgtttttgcttgtatcttttgagatattcttggaccgtcctctcactgactcactcggaaaagtcagttcaaacctcttgctcgttgattcacgggcacggttttgcttgctccgctcatttgccgacctgatgcgtgtgtgacgttaagctgtaatgatttctataatcacgaatccctccactgtgcctgcattgaatacctccgttgtagagaagatacatactgctctctccatcccaaattgtaagtcattccaagaatcttggagagtcaaaatattttcatgtttgaccaaatttatagagaaaaatactaagatttgtaacgtaaagtgagtatattatgaaaatataattaagaaagaatctaatgatacttagttggtatcataataataattattttattatataaatttggttaaacttagaaaagtttgactctctaagattcttggaatgacttgcaatttgagatgtagggagtagtataattctagctgtatccctattttttaaggccttgtttagttcaccctcaaaaccaaaaaaatttcaagatttcacgtcacatcaaatcttgcggcacatgcataaagcattaaatatagtaaaaacaaaaactaatcacacagtttatctgtaaatcgcgagataaattttttgatctagttagtctataattggacaatatttgccacaaacaaacgaaaatgctacagtggtcgaaaacttttcgtttcaccaactgaacaaggcttaagtttaaatagatttattaaagagtatcaaaattttaaatcatatatattgggtattctactaaaatatgtacatcatgatagttttttttactattatgaatttaccccttgttttataaacttggttaaatttcaatagtttaacttatttctgtttagggagtattatcataactttgctaataaaaacgtccacggaatcagaaattcacaaacattgaaaatctagaaaactctctacactactcttaacagttcaattcaatcctctgctgcctgttggaggatgcaaatatgctcgagacgcacctctaaaagttacgcagtagccgtatattatacccatccaagtatgtgacgcgaggacaggccacaacaggcagtgtatcctgtggaactaaaacgagccattactcattatcggcgccagcacgcggtggcacgacacaaaactgctcgggcctattgcatttccattcacagagaacaccagctggaaatatggccaacctgctcacttttctgaatcggcctatggtttagtgagaacaccagctcgaaatatggccaacctgctcacttttctgaatcggcctatggtttagtggtagcgtaatctagtaggacgttacccaccagagtttaaaacctggtgattgcaattttttttgaatattttcagaaattttaagttatatatgtttgcgcgttcggtggtactacgtgttttctgtgcatgtgtgagttgtgtgcgtctaaattgtattcgataaaaaaaccgctcccttttgggacgatgagatgaacatgtactatgtttctataaatttagttaaattagagaagtttaattaaacaagttgcaattcgaaacagtatactagcttgctgataactttacaagtgtccctctcggagcgccaacggccgagcaccgcgcgcccgggccagacggtgcattgggttcctggccagctgcgctcctgggcctgagcggctcagcccacccaccaccgggcttttcatttttttttactaccggccttttgagttgggcaacgccagaagttgcagccttctgtgggaaatttccattgttcctcaaagcagagaccctactgatagccatgtcggagactgaatcggcggcagtggccgcggcgctggacccggcggctacagcggagccgaagcctcggcggctgcgggggcacaagaagggcgccgtcacctgctgcgtcgcctcctccgcccgcccgggcgtcgtcgcgtcctccggcgaggtaggcgtttccatcacgctgctcgtctactcttccgaggacaaacactgcgacgtatgatgactctggcgtcctgcttcggggcgccccatggtccatgggcgtcggccaatagttgcagtgcaggccgtggtgtctttcgctgaggacacgagtcgaacacctcatgtgcagtggtcgctagttaattggtgctcggttgagacattttgtcggtcgggtggcaaaccatgcgctgactgcacatcgagctaagcgtgttgccagaacaacgaaccgcaccttgcgtgctcctccttgcattctatcaatgcactggatggaatatcctgcgtgggattagtaacatagatgattctttcgagtgtccagtgaccattacatagaagatcactggcgacaacgtcaccctggcacagatcatggccgatctgcctcccagtccatccgtttaacaaaatctttgtgcttgttgttgacaaaataaatataaatccaatcatgccatatagtgctcctttagctcaaaattttcctcaccagcggcgaggctattgcagtaatcttatgcatatgatttgtactatttgccccccttcccccgtttttcgagcccttggtgggtcaattgtcatgttctcatgtcttatcctaccgcctcaggatggatgtctttgctggtttgatctgcgcaccaaagatgtacttttgaccatggaagcagcaaataaaccaatttcttcaatttgctttaaaccaggtcagtatgccatccaaatacaagcatctttgtatgttaatccatgaattgagtatttggtgggcgtgcagacattttacgcttacaaaatcattatttgtgtaggaaatgaagattgtgtgtatatctctgctggaaatgaaatattgtcctttgatgttcgtatggtaagttcagaattcaattgtattttgttgttagtttgaagttatatgatccaacttactattatctcgcctgtgccttggtttcttgtcagtaacatgattacagtggctttcttatagggagctcaatcaaagccattagagacgtataactacaatagagatgaaatcaatcaggtagtatgctattctacaaaaccactataaaatatcctcctgtgatctttctcctacaattcacttctaggctttatgataacattgaattgagctaaagattcagaatctgatacttccacttttgatgcagattgctgtcagctctaaaggttttctcgctgctgcagatgatagtggggatgttaaggtatagaatattttgcaagtgtatgaatataaatgtcaaagatcattgcattttaacaaatatcaaataccacattctccagattttggtgttggctattttgaggttgttgcatgaatgtgttgtgagtttgcatacctccaggcattgtagtgctgacacaagtaaatttagacaaatattatatatataaaattatgagtttattgtatgagactagtaaagccaattctagggcacactgtttttcctgcttaaggtatataagcatatcgtatgaaatttattttggaatgttctgtttcgaaaatggcacaaatgatgctcctgaagagtaagtttgctgtaagatcgtttgtcattatgaattcaaatttactggcttatatattcgtgctttgttctgaaaccaagaagaggttgttatgttacacttttttgaatagcatgtagattgctagagggtttgggaactggagaacagtggaataaatgcctcaagttagaagaaagatatgtgcaacacactgataggcatgataatcttgcacttggtcaatgattttgttcttgagagttgagaagctatggtctattttgcagattgtcaataccattcagaagtgcctgtataaaagattaagggaagcccacacaagtgtatccttatatggtgtaactggatgcttttgataatttttctttgtacagtagtgttccatttttatgtttaaaaatgttcaataagttcctttctatatgcaatatgtacgccagttgttccttgataaattttcgtacagatttgcagcagcgtgcaattcattccttggagaccttggacaggttagtgttatcattttctttttcttttttcagggttttgtttcgcttaatcttgtagtcttgtggctccttttttgtcaaccttttaggtagccaatcctagaaaactttgttggattttaattcttatttttttcaatgcctttattgtcaataataaatatttttcatttggcagcaattactggtggccttgactcaaagctcgttgcatgggatttctccaaaggacgaacactgttttctattgattatggtacctcctttactttccatggaacacctgtgaatagcgtgcattacttaggctgcttcatgttctttttgtctttgtaaaagagtatcctagcagttccttgatctcatacatttccattaagcatttgtaaattgaactctcatattgtccattggaaagtcggttcaccttgctttacatagaatattagtttctgttcatgtatgacaaagctgtatcagtattgtttttcacctcaaaatactctccaattcggatcaaccaacaattcaacataatattcattactgagtttcaggatcacctgaattgcaaaatggcaattcttccggtagtgcagggcaatgtttcaaccctgcttttgttcattcagtagcagtttctgaagagggtattttgggagggctctacaaggtttgtgctgttgcaaggggggatggtgctgttgatgtgattgatcttgagtatgaactggctcctgcgaaatcgaagggacctcctcgggcagctatttcaaaaaagagttcaaaaggagctgaacttggagatgggagctgtaatcaaagtcaagcgaaaagaatccatcttgactacacgatgggtggccataccgcagctgtatcttgtgtgtatgtcccttcattttgccaatgtatcagttaaatatctcattatatgcagcactcttgtgtattgaggcgaatcttgttttcttgaactaatcagctgcttaacagagcattttcagtatttggtgagaaggggaagttcctcgtttctggcggcaatgatgcatcagtgaagctgtgggattggtcgaaaggattttcgtctgaaacaaacagcaaagttgaattggttttgaatattgatgtaaagaaaaaggttaggactgaacctttatttttttgcgactattgtgatgttctcttttttgtctttgactattcatatatacagctgataacaaaatatagaaatctatataataaacgggtttttgtattttaaaagatgaagttcttaggctcagtaaaaaaaatcatgatgacctctgttttggcaggtaaattggctgtgtactgctccaactgattcagataacttgattgtgtgtgacacatccaaggtggtcaaagtatataatttccggtagatggatcaaggtgtagcctcagtttgtcagacagctatccgagggagtgaagattgtctgaccgctggaaccaatttggtcctaactctggtatccagatattacaagcctggtgctgatagctcctgagtcgagaagtcattggttagcaattcacaatatcagttatggcgtggaacggatctgataaagtatcgattattttgttactggcggatcttattttcttccgatatgtgtgtacaatacaacttccacaggctgctagctagacttatctttttgttgtatggtgaaatgaatttacgtgtttggagaaaagaaggcttgtttgtgctggaagacattatcttttttgtttctatatactgtagctgttatttctcgatatggtgctacctgtggtaaccaagaaccaaggaagatgcgaactcttgttgcgaactattgttgtacccatggaaattggaaacaggaggaagaagaggagtatacaaagctttccgtgagatgtcgttatctttggtgtggctgtgctgtgctggactggatagctttctggattaggttgcgcatttgccttttgcccctcacattttatacaaacttaaacaaaggagcacatgaattgataacacatttttgcagtctttcccaacaattgctcagaaagttctatcttgtgatgaggagggtatttctgaaaaacttccaggtctgtatcatctttcatttgcatgtggtcaggaagtggatagaagcaggcctgaaactgtctccattagaagacaggaaccagggggttgtgctgccgttctttgta

SEQ ID NO: 4248 - DNA, 9876 bp, Sorghum bicolor
atactgactaaagctttgggcaaaaccaagctggaagagatgaggagcaggattgggatcaaggagatcaagattaattgaagcaggccttagggggagaaatgtagttaataagccctgcttcctaagcatttcttagataactgtgctagttaatttctgtcattaaagaccttgggtagcccaagagttgtgcgggtacccaggcagctattctatctagttaaagctctagtgagctgtttgtaatcaatgcaatatctgtctttctctatatatatgaaggagacgcctggggttagttgcctcaaggctactcaaaagtctgtgtttcctccatcaatattgagtttttttattatgaaaattctgtatccacgtatccgtatccatgctgcatagtgtgtgagtgtgtgtgcgtgtctgtctgttggggcggcagcggggagtctggtggggattcaatggagtgggtctttttagctctgcagtgtaaatagagaagctattcttgttagatcctcactagaatgttgttggtgttttacccttttggttttctaggagcattctcatggagaatctggagcttaccagcccatcttttttccttgttagacccaaatgtttgcttggatagcctgtgattctaattggtttgcacccagcctttctacctggaaaatatccaaacagggcctaacagttaaataacagccaaggttttgatattctcatcattattagaattagaaatcttttatgttacttgattaaaaatcgtggcaatagccaacgagttggcacatactgacaactaagcttgtgtgcttgctttgccttcaagatttaaccttctagtatagtcgtttgattccctgatggttatgtgcgattctcatgcagctactgaacatggaaaattagaccacggggttatttgtttttcagtccaatgtagttcccctaacattggaccctaaactaatcttttacattgtcataatttagtaacatactttaaaagtctagaaatagcatgttttcatatgagtgatacataattttattttgctcatgattggagtgaataatactgggcccatttaacgtaatttagtttttctccttcctgcaatagttaattttagctaggtactatttttcagtgttccaaaaggcatagcgctcgcctaggcatgcttaaatgctaggcggggtaggtagagattaggcagcgtccccaccagatccagagccttttttttttgaaacggccggcaggagctctgcccggcatatattaatacagaagtagagtaagtttataacaagaataaaagttcaaaaagaagggaaaaacataaagtcaaggagctcccctagaggactactcttgaggtaagatctccttgagcctcttggcacctgccagacatcaggtcctcgcttcctccttgaatttcgaaattaggcttttcgaagtagaatggcgtctttgaaaaatcctattattgcgttccttccagagctcccaagccaccaggattgtcaatgaccggatggctttaataggcatgccctcagcctttccgatcgctctccaccaaatgctcacatattcaaaggaagcccagcctgaagggttagggaactgtccctcgatccaagtccttaccgcagaccaaactctttggctgtattgacaatgtgcaagcaagtgtaccactgagtgatggtgggtggcagcggagttgtcgagcgtggccgggaggggggcaggctgcgggtgcggctaggaggaggctagcggcgtgcggtggctgggaggagggcaggcggctgtcggtgcccgggaggagaggaggcgccgggcaacgagcacggctaggaggagagagatgcaccaggcggcgagcatggccgggaggaggcagacgtgacggatgaagagcacgagctgaggaggtgcgtgacgagcgcgatcagaggcgacaacgatgagcgtctggagaggcgagtgctcacgggcatctggaattgggaggaggcagctggataaggctaggtgggctggacactttgatgggccttttttctaatctaaacccactgttctgctttattcgtttcttttagatgttatatatgtatttgtatgaaacacctaggaaaactcctaggctcgcctaggctctaggcggagggttaccggcttaccgcctattgagtccctagcgccttttagaacctttgctatttttattgacataaatattcttttgtgctcactctgttccaaaatgtaagaggttttaactctgttgcaagtcaaacttctcaaactttgaccaagttcataaagtaatgcatcaacatatacgacatcaaatttgtttaattaaatcaacatgaaatatgttttcatagtgtgtttatttggtatgatgattgatgttaatatatttttctataagcttggtcaaagttagagaagtttgagttgggaaaaactaaaacagtttgcattttggaatcgagggatttaactacatggtaaaaatctgttgttgcttgatgcggaaacacaattctgatatttttgcctcaaaattttcatgaactccactccaaatagatattcaaatgccttgttaagctgagagtgatccttcctacaagaattccaatatgatgaccttaggtattgttctcattttgtttctgtgaccagactaacgagcattcgaattgtttaagattctgagatggtcaacagtacgaatgccttcatgcacaactttaccgttgtcacttcagaacctaatagggttatcctgctacagcctcaaattcttttacgatgctcggatgctgtcctcaagttcttttagcacaacctcaaagagtacaaggaattgtcattcttataatcttattgaacatttaggcaccatataacttctctatacaagaattgtgtgcagaagaacttgctgccactactctctttacttctactccctccattccaaattataagacatttggcttttctaggtacatttcctttactatgtatctagacatagtgtatatctaattgcatagcaaaagctatgtatgtagaaaagccaaaacgtcttatagtttggaatggagggagtacttgctttgggatgaggttggatttttgagttgcagtgccttacccttggatgtctatgggctccacatatacttaagaatttagtatcggtcctattccttagagtatacttacaaatactataattatctttgtactacatttctccagcgcattataagattatatagtattattgtatgagtagcccccttttcaaagttgatttaccgcattgattagctgcttaatgttgttaatgaaagtgaactaattatgtgtcatgttttcttgtatgctggatggtcatatagggatggtacgtcacttattttatcggacgaaattggtcaaatattcattattggtactgggcaaggagagtcccagaaagatgcaaaatacgatcaggtacacaagttgtttctggactatcacattcttggggattgtctagtgcaaactaatgtctgggtgcaatcatgcatattaccacaatcccagtgacaatgtgaatcatttgatgagtagcggacggattggaatctatagttcaagttttatgtcatgtataaatttctaatctggcaggtctgttgggttagtgttatttcacaaaagtagccacacatgtgcctatatccctggtaatctacttcatagaatttgcaaaatgcactcagacatgtttacactacgtagtgccccccacccactcagcaaaaatttaaaatactgatttttgcagtggaccctaaacttgttctgcgttcgggtccacaaactctcattagtgcccccccacccactctgcaaaaatttaaaatattgatttttgcagtggaccctaaacttgttctgcgttcgggtccacaaactctcatattgcatattctggaccttaatggttgtccttgataggtttggtctaaacaggtccaaattggctgctgcctatgtggcggcatgcaaccatgatgtcccctagttaatgtgaatcatcctaatatcttctacccccctggttaatacttcacagatttgcttagtgcccccatggatgaggatgttgatttggacccacctggaaaaccatgacaagttttaaggcttcatatgcaatttgagagtttgtagacctatatgagaatgctggacatgtttagggattactgctggaatttacccaataataataataataataacaacaataataaactattgtgtagttgactatcccttttgatgctgactaccattgttctttctaacagttcttccttggagactatcggcctctcatccgtgataacaatggaagtgttattgatcaggtttgttaagaaaatgtgattaatttctgatattgaaatgttttcaatttgagtttttagtggtacagttcagagttattttttctgatgatttgtttctaaaatggataatttcattcattaagatgtgaaattctgaacagaatgttctttcataatgtgctttcaaaagattgctgttcattattgctgttggtgccattgtctcttggcattgctggtactcttgctcactgttacattgaactgccctgttatcaactggattggtctggtgggctgggcgtgcatatcgtttctctctaatacagccacatgttgttcgttatccactctaaacgctggtccttatagctaatatggtattgcctaggcatccagtgcttgacatcttaatagccttggttgaaaatatttgtatcattaattatgattttcgtacactatgtttttgagtagctgtaatgttagtgtcccattgtgcgaatgtcaagaagttatgtacagttatttcaggagcttcacaaaattcattctacatttgtagctgtctggttttgttggttttagtggaatcctgaaacattattaaacacaaaggagacagctctcctcaattgaaaccatcagaattcatcactgttctaatataactttgtagagttgttttctctgcaaaagcccataggctagtgagctatgcagctgttcctgatgcagcttttgttttatgcaggaaacacagcttgtaccatacaggagaaatatgcaagactttttgtgtgacgctggtatgtaacttccatattagtccttctcgagtaatttgaatagtcagttgcactcatcatacttggcaattgcaggtatgataccatatccagagcccttccagagtatgtaccagaaacgccggttaggtacccttggtcttgagtggcgacctccctctgtaaattttgctgttggccccacttacaatgcaacaaccggtgaataccaaactatcccaattattgatccggataggtgggaaccgcttccagagataacagacttcattgagcttgaacctgaaaatgaagtgatctctgacgatactgattctgagtacaatggcatggatgagtattcaagtgaaggagaacaggagattatgagtggtgattcctcaggtacttcatattcaagtgcagaaattgatgtggatgaccctaatagtgctcttctccgccgatcaagaagaaagaagaaaaaatctgaggtaaagtgtcaactttcaagatcatcctatattccttggtgttgtgttctaagttttggcatattttcatctcctgcaggctgatcttgttactttgtctggtcggcgagttaggaaaaaaaatttggatgagcctggtgtagccacagtgtcaaggccacatagaggaaagaaatctaggaatggacgttctagcaaaaggaaaaggtctcctaaatccaggggtttgcgacctcaaagacgtgctgctcgaaacgcattacattttttctcaaagataggagctcgagcttcaacagaagaggatgaagatgactccgagagtttctcagatagtgaattgaacacggatagtactgaagctgaacagttagaatggaatggccatctaagaaccagcagagggattaactcccaatatgacactgaagatgttacagaaccttctcattttactgataataagggaaattctggaactggtaagaaactagttctccgaatacgacggcgtgatttaaaaactccatttccttcaggaagtggaaaagcagaatgctccacacaggataaagcagtgaaatctctttctctagctaacgatgaaccagctgaggaagaactaactattgaaccgggacattcctctgcctgcaaggctgaattaacaactgatggtgatctgcatggtagttctactgttcgtagtaataactcaattaggtggggtgaggttaaggcacgatcctcaaagcgttgcaagtacagtgagccagctggaggtttgtggacctcttcaaataatgctgttctgcaggatattgagggatcgggcagtcagcagatgcctcatgaatatggtgatggcatccagcaaactgttgagcaaaatgcgcaagaagtacaacatggaatagttctagatgacattcaggaaaacaacagtattgatgagtataacagagaaaatacgggggatcaagaaaaaatacctaacaataataagacccatgcagatgtagtgaatgacgcagtacaagttcccaatacttctcagcctcaattaaaattgaagttcaagtcaagtggatctgcagatgcagtaggaaatgtcatgaactccaagcatggtaaagattcagtgcagcatggtgatgattcttccatcaatcaacctagaaatgctgacctttttaatgtgcccagaagtgctcaggaattcccagataaaagcactagtttgcatgattcaaaaaaactgtacttggattcttcaaagaagtacaccgcagtgtacaaaaggttaaagccaaagaacaagaaaaaaatggattcagatgaatatgcaaatgaggatagcacttctatctccaatgacgatggtggataccaacctccagagtacagtcctgttgcagctgcaagtggtagattgagaagaagcacaaggaagtcatttgcatacaatattgatgctacaggacaggatgatatctcagaagtgaaagattcttacagtacccatgaagcatcaactagtggaagacgagttgtcacagatgtgcgtgatgtaatgtggcgacaaaactcaaaaactgttggtttaaggtcttcgaggaacaaaagagaaagtagcaactttcctgatacacatccattgggtagaaggcaccaggtttccttaaagtattcatggttaatgttacttgagcatgaagatagctaccgttatattcctcaactcggtgatgaggttatgtacttggggcaggtaatgttatttttacgttgtctacaaaaataatggggatgaaagctctcactttttgttctcattttgctgcttctcattgtccctaagtgtaggactactaattggtggaaaaagtacatgtaaattgtaaaagtgaaatgaattacaagcatgtgactctcacttcttgggttgctttgtttagtatttcactattgtaatacttctttctgggcttgctatatttgtagggccatgaggaatatcttaaagaagtgcaatcatctgaatcttgcccttggaaccggataaaaggccttaaagctgtagaactttgcaaaatacagggtcttgattatgccacctacagaggatctggcgaaagctgttgtaaattaaccattgaatttgttgattgcacttccagtggatctggcaatacatttaagatcacattgcgtgagctggttaactttccagattttcttgtggagagaacaaggtatgaagctgctattgagcggaactggacccacagagacaagtgcaaagtttggtggagggatgtagaaggacaggtaggaggaacttggtgggagggacgggtgaccgcagtaagacctaaatcacctgattttcctgagagtccatgggaaaaatatgtcatacagtataaggaggatggttcttttcacgctcatagcccctgggaacttcatgatacaggcaatttatgggatccatggaaacatccgcatatcgatctctcgattcgagatcaattgatatcagaaatggaaaatttacaggaaatgtcacatagggatcaggtgaagccatttgatttttaatcatcacacttttgctaccattttttctgtggtattgatcaattacaatatgaatttatggttttacaggatcgttatggtgtcttaaagctggacaaggttgcagaaaagtcagattttgtcaacaggtactaatatattgttttccaacaactttcactgaattatgaattgtagggcagtatttgttgaagtttttgtcacaaaaggttgacaaaaaaatttgacttcatacttcctttttttctaattcctttttctttcataatatattcttttaagtcagattatctggaattttaggagataccatatacggagtgcattgctttgagtttttttcgctcagtacaaagattacaaacatctgttgtgtattgttttacactaatgttatatctaacagtaatgttcatcttaactgagtcctggcatacaattcttgccctaggtttcctgtccaattttctattgaggtgatcaagacaagattagcgaacaattattacagaactctggaggctgtcagacatgataccactgtgatgctttcaaatgcagaatcttacttttcaaagagcagtgaaatgaccaaaaagatccgcaagctctctgagtgggtcgaccagatcttttcatcactgtaggtgacattgcttgatgcctgattgacaatttcccgttttgtttcagcaaattttttgcatcaggcatcgggatgatttttacttgtcctactgaggcatatttagagaaattaaccaaagtagttctcagggcagaaagtatttccagtgtagttccaaccagttaaactagttgctgatacaaagtgctcgttgctaacacctctgaccatttgatctccagttgtcaagatacaatggttcatccaattggacatgaaacattggggttttgttagagaagatgctaatgtgtaaagctggtagaggaaatgcattaacagataattcattttgtacagacaccctcagaaataaaaggagaaaggaaatgtgcatctttttctgtgttacattttgtgatgatacatggtaaccataatatggaaacttagtggcgcttttttctgtgtgcccaggcacgctttttatgttattttttgacatcttttttggttgctcgttccatcctgaaatagagatcatccaggccttcaagttgtcttaaattataagggattctaggtggtaaccataatatagaaaattagtggcactattttctgtgtgcctaggcacaccttttatgttattttttgacatcttttttggttgctccctccatcttgaaatagagagtatccaagtcttgaagttttgcttgatgcctgattcacctccgtaccattaattttctatcataatacggtaatcaagaagggttacattgtgtcatttggttgatcgaattcctagggtacctttattcgatagagtacgtattaggttgtctttgacttttacaattttcgtagcgtcttggacttactttaggct

SEQ ID NO: 4249 - DNA, 10662 bp, Sorghum bicolor
  misc_feature (4967)..(5434): n is a, c, g, or t
  misc_feature (7591)..(7809): n is a, c, g, or t
tgctggcgtgccctcccgtgtcctcttctcgttctccaccggagcggctctcgatctggtttgctccgcctcgtcgctcccctggacctggacgtcgccgccctagcggctcgcttcgccgcatccgccgcttctcgcgctctccggctcctcctctggtggtcgggtttgcaagagcggctccggcggggcggcgtagatcggcggtaggtgtttcgcttcctctccgctctctgtcttcacggcgctgcgacctgcgtgctcgtgtggaggggccgccggccgccgccttctccgatttggcttttccgctcgtgcgaactggttccaggtggggtcaccgtggtcggaattttgctgcgccgctcgggcgctcgccgctgtgctgcggttctataacgcagacccgctaacccgttaacccgttactcaaaaaaacccaatagcccgtaaatctaccccaatcggcctatccggatcatacacccgcgaaccaacagcgcccccgtctctctcagcccccctccggtcctcccccaccactgtgcgtctgtgcctagggctcgtacggactacggaggcgacaggaccacggcctccgacgtccctccgccgccgtaggtgccctcttcgtgccgcacgggcgctgccgaggcgccctccatatctggcatgcctctgagccgtcgcagccgcgtcgccagagggcttgccgacgaggaggtctgtctctatccccctgtctccccctctgcctctaattacggcaaccccatgccgcttttcgcctatgtggtttgtgttagattggtaatttgagcctgttgatgcgtccagaggcgtgcggaggatgcatcgattttggtttttccgtacctaagaaatgattcagaactccggttattgataattgagccgatttcacgggttttattactagggtttagcatggcctgcttgtggtggttacccctgtgataattttggagaaggccatcatgaagataagacggctttggtgcatgcacataattgagtggcctgaatattggatctgcttgttttatgaatgctgtgaattctagggttccagtgatgggaaattaggtgtctcaggaagaaattgctgttttgcttgttaggaactggtgagcttgcaggatattatctatttatattaagctgaaagtggaaaatataggatgaatatatacatactaagcatctggatctccttcacttgttgttgtgttgacactgatgcttagatggtgggcgactcagagaggttgaagagaaattatcgctttgtaatgtttcacagataaatagactgagatgcttgcatgggctgattatgtggtccagttttgtatatgaatattacatacttagcgtttggaactcctgcatttgttgttctgttgacgctgatgcttaggcggtgggtgagtggagaggttgaagagaaattattgctgtgtaatgtttcttagataaatagactgagatgcttgcatggctgattatgtgtccatttttatatataagatgtgcttttgctccacagttcagtgagttctgctttcctgtttttttttcagtagctacactaatgcattgacaagtttactaagtttgtgaattttaactatacgataagataggttcttgcttgcctgtactcttgtacaatgcaccacatttcttttttatcatgattccgccatatctttcagtagagaagttggtttcattcagtattcatttttctggcatatatctcatgaccgtcagctagctgccgtgtttcctatttttttaattctgtattttatctatggcttctactttatatatctttattatttactacttctgcggcagttaattttttccatgtagttgcttgttcattgctttacttttttagttatttaatttaatttagaatgtaaacttattctttatcatttccaggtccaggtggtctagtggacatgtctttcagaaagcaccaaccttccagtaatggagcttccattagtatagttcctctggattttccaagtcaggaactggagaaggttaatcctgtgaattcagtgatgtcaactgattttgcatccatggatggtgttgatattgatatgagagaagtttactttctcattatgcattttttatctcatggtccattcaaacggacctttggagaactgtgcaatgaactcctggaacatcaactgctacctagaagataccatgcttggtattcacgtggtggtttccatagtggtgaagaaaatgatgatggcatatcactccctttgggttatgtaaaattagctgagaggtacatacatgttactctcgtgtctaatcaatttgcttctgttattttctaatcatgtggtagtgaggaactctttattgttgattctgcaagtaattaggggggactggagatgcttcctagatttgaatacagttgaaaaaaggatctgtatttaggtcataattcgatataaattcatttggtgcctcttgtggagccttctgcccacagttcatccacagtttgtacatggtactaatatttttcatagcttgtctggccagtcctacctgattaaaccttttgattttgaaacaatggttatcttgaaaatgtatacaatttagcacaatagtgacctgtcatatgaattatgcctcttaccttggcaggacagttaatttattatgatttttatttctaaaagatcagataacgctgagcattttctcacttgttttattgtaggtacccccacattggtaaagaccacttggtgaagctattaaagcaactgatggctaattcctgtcacccacacagcttaattggaagagtttctccaaatgctgctgatgtcccaacacttcttggctccaactccttttcgcttcttgcatgtatgtgtatcaatgctgttcaatgggttacttttttttagtattatttcctggagctatttgttagagcacttgtatattcaacttttttccagatttggtagctccatctactctttggttttccatgttattaatattgtaatgcctttacacattcttgaatccttcagctgacaggcaagataaggaaactcccaggctgccaagttatcttcgttggccacacattcaggctgatcaagttcatggtctaagtttgagagagattggtggtttcactaagcacgcccgtgctccctctgtacgagcatcgtgttatgccatcgcgaagccatctacccttgttgaaaagatgcaaatcataaagagattgagggggcatcaaaatgccgtgtattgtggttcgttgaactttcttgctctcttagctatatatatgtttaaataaaacatcttaagtgtgtttgattggtgactgatattgcctacggaaaatggccacctaacattagctaaagttagtcatgctacatttttgtggcaagaaaaatggccacctaacattagctaaagttagtcatggaacttgtccaggaggctaagctaagccgactaaggtttggcagcaactaataaacactgcctaaggaaactgtggttgactagtcttagtcctggcaaacttagggtgcaatccaaatagggagttctaaggatcgggccaaactgccccctatccaaacaggcaacaatgtatctctatagatgtatgtatcaactatgttaaggcctattatacttgttagagaagttctcgtggttgattattatgtgttatttcattcagttaacaatttgtatatgctgttcattatgttccacaagaccttatccccccccctctcccccatgatatatcttagctgctgccttgttttccttgcttcctcaaagcccaaacttgttaccttatcatcgatacatcttttttatcttctgcttggctttcatactaatcctgtttctgcagctacctttgaccgcacagggcgttatgttattactggttctgatgaccgccttgttaaaatatgggcgacggaaacagctttctgcctggctagctgccggggccatgaagtaagttttgcttgctgtggcatatatatatactcataatgtttcattgataacttaatcccacttatcctgtttcatttccaaatcaagggtgatattactgatctcgcagtgagttccaataatgctgtggtagcatcttcgtctaatgatttcattattagagtggtaagtttagtagtattcattcttcgtaagtaaactgccacaacagcctttcacaaccatgacgttatttcttccctttaccttgaatggctccttataccaataaagtggcgtatgcctgatggaatgccagtctcagtgctcaaggggcatacaggggcagttactgctattgcatttagtccaaggccaggtgctgctttccagctgttgtcgtgagtgcctcttttctctttcttgtttgcccctgattatattatttgcgctacattgttgttcttattgccctcagggctctgtgtacagatcagcctttcttcgacttcctctaattatacacagctctcctgtgtattcgagaaagataatttgcgctgcttttttcttgttgctatatacatgctagatgcaactgctttacaaacgaaaatgacctgcatgaagtcatgtatttgataccagccaatggtataacaactgtattctatctgctgtagtttgagtgtttgatcgaggctggtacttatctgaaagctggattgccacagtgaaacatgtcattttttctttccaagaactgtttggcacacagtaatgaaatatctatagtataagttgattgctacatttttctgtgagtgctttggttcatgtgatcttagattctctatattatcctagggcacttaatctgtgtnnnnnnnnnnnnnnnnnnnnnnnnnnnnnnnnnnnnnnnnnnnnnnnnnnnnnnnnnnnnnnnnnnnnnnnnnnnnnnnnnnnnnnnnnnnnnnnnnnnnnnnnnnnnnnnnnnnnnnnnnnnnnnnnnnnnnnnnnnnnnnnnnnnnnnnnnnnnnnnnnnnnnnnnnnnnnnnnnnnnnnnnnnnnnnnnnnnnnnnnnnnnnnnnnnnnnnnnnnnnnnnnnnnnnnnnnnnnnnnnnnnnnnnnnnnnnnnnnnnnnnnnnnnnnnnnnnnnnnnnnnnnnnnnnnnnnnnnnnnnnnnnnnnnnnnnnnnnnnnnnnnnnnnnnnnnnnnnnnnnnnnnnnnnnnnnnnnnnnnnnnnnnnnnnnnnnnnnnnnnnnnnnnnnnnnnnnnnnnnnnnnnnnnnnnnnnnnnnnnnnnnnnnnnnnnnnnnnnnnnnnnnnnnnnnnnnnnnnnnnnnnnnnnnatggtgtcctgcttatgtattatgtgttttagtctagctttctttacactgattttcactgttatttggaccgttattgtttatgacacatctaaggtgcattgaaatgtgtttgttttttctatgtgatttgtgctacaacatctggtttgttgtagtactttgctgcacataactgtttatagggttttacttgccattgttagttatgttccttctgaaattgtcaaataatattgttggcaggtcatcagatgatgggacgtgcaggatttgggatgccagatactctcaacaacctccacgagtgtatacaccaaagcccccagatgttgcccctggttagttaattgaagcatgcatagtgcattagtaatatctaattctggataagccaatccatgtggtgttgatgccaggtaagagtggtgatgcatcttccagtgctgctcaagttcagccaacaaatcaccagatcttatgttgtgcatttaatgctaatggaacagtgtttgtcactggcagctcggacacttttgcaagggtgtgtttttcttcttactttcacttgtcaatttcttatctaattgtggagaattgccccttttcatcagaaatgtttcatttcaggtctggaatgcttgcaagagttcttctgatgaacatgaacaaccgaatcatgagatggacctattatgtgggcatgaaaatgatgtaaactatgtgcaatttagtggatgtgcagtggcatcaagatctttttcatctgattccagtcatacctctaaggaagaaaataaccttaagttaagaaattcttggtcagtattttgtttgcccttatggtttgttttctccttctaaatgttcttatttatttccattaggcattagcagcatcagttcttagttgttgatccaaaggcgtccttttttcttcagtctgttcttagttgttcaccttaatcaccaattcaccaatgtccaaatggtgttgtttttgggttcaacaatcctttgtgagctgagttgtttctttttgctaggttcacgcataatattgttacctgctcccgtgatggcagtgcaattatatgggttccacgatctcggaggtcgcatgtaagctgctgtatgctagaactttacaattttgttttctgaaaactttgtttgcatgaatagttttttttatgaacatgcataactgtccaatctatctactgctttaatggtatggtcgcctcctgaaatgctgccaatcataatttatgatttaggtatgcattgaatttcttcagtgtgtcatcttcattgagtaatgatgtatccaatgcaatggacaagtcagttttactggctctttagcactactgccattttgtgcaaccgtatatcatgaatgcctgcctttattgtatgctagacatgtgttcaaagcagtttcctgtataatttgttcatgcattgatccagggaaaaattggacgctggacgcgtgcttaccatcttaaagtccccccacctcctatggcgcctcaaccacctcgaggtggtcctcgtcaaagataccaaccaactcctcgtggtgtcaatatgatagtttggagtctggacaaccgctttgtgcttgctgcaatcatgggtacttttgatctactatttcatacggtttcactaattcactgcaactatatcgatccagttttactttagagtaaaatgcaccggaggtctattaactttttaggtggtgtcatctgggtccatcatctctcaaactgcatttttttgaattttaaatacagcaagggagaccccaactgtaaggattttattaaattaaaaaacaacaaaaagaacaataccactgtacagagaggaagtgggggacaagaggagccagggggctacaactaagagaactgcacgcttggtcagtaagcagggagaggaagttaggtctttttaagtggttcccttaactttttaagtgattcaccagagttcgtacactttcgtttggcccttagatccgacgtggagttagcagccagtgtggcagagataccacgtgcgggtcgtgaggaccgagctcccttgtgtttttgtgtcttccacgcgccaatgatgctaggggctagggctggcgctagnnnnnnnnnnnnnnnnnnnnnnnnnnnnnnnnnnnnnnnnnnnnnnnnnnnnnnnnnnnnnnnnnnnnnnnnnnnnnnnnnnnnnnnnnnnnnnnnnnnnnnnnnnnnnnnnnnnnnnnnnnnnnnnnnnnnnnnnnnnnnnnnnnnnnnnnnnnnnnnnnnnnnnnnnnnnnnnnnnnnnnnnnnnnnnnnnnnnnnnnnnnnnnnnnnnnnnnnnnntatggacctctggtgaaccacttaaaaagtttagttagggacccaaaatgcagtttgagagatgatggacctagacggctctcctcaaaaattaatggatctctggtgcattttactcttttacttaagcttttcactaatatttgtttatattcccatttgtattgtttaattgtcctcttgcatttagattttttttgtctcttcgattcgatgtaattatttcatagttgcttaacttagtataagtatgaaggaccaatctatttttttttattttgctctcattatgaccaaacaagagtggattggatgatcactctgatcatcaaccattttcccaccgacaatgatgctgcccatcctcacctgccagcttcgttttgaatgccaaggacattatttagtaattgctttacctatactattttgaagaatggaatcatggttacagataacctgcatctctttgatttacaatatagctcaattattagtgctgttatttctaatcatcgtccttatttctatattccgcagattgcagaatttgtgtatggaatgcttctgatgggagtttggtgcattcactgattggccataaggaatcagtaagcatatttcatgcaatctatgctttatgttttcattttgtgaatgatatgttgtgtttttctattcatatgctacttcctttcccttttcgaaggaaagttcatcatgttacttttaccatcttatcttatgtactttgaagcagcatctattatttgcctaaaattttataccaagagcattgattaatgatgatgaaacttaaatggaaaacaaaaacttgcaaatgagatctttggagtgttaaacttgagtattttccttttcttttcgaaaactctgtggcagtatgagtttcaggtgctaatttttgttgtagagaacttatccgttttctctttctgatgaattgttagctttttcatgtacaagagcttcaatgtagtcagtgacaaccttggccttggtggaattttggtttatgtttagtgactgcatttcacactcttccattgccactaatatttgctttggcaatgagttatgttcgtagaaattgatttgtgtggtattatctcaaatagagtactattttcacttgcagttatatgatctgtatcattgctgatttttgattctttaatgatatatacacatatgtgtgttatttggttctaatgtcatgattcctattattttgcatttcatctgcatattgctactcaacttctgtttcctcagacttgtggttgcagaaatattatcctttttaatttgatcaatcaacttcattcttaacagacgtttgttctagatgtgcatccgttcaatcctcgtatagcaatgagtgctgggtatgatgggaagacgatcatctgggatgtatgttcttgacttgatgcctttgtttctgtttttttttttactattgcctttgtttgtgtcataaaaaaaagagaagaaaagttacatgcctttattttctaataaatacacaaacctcataatctaatccaaattttctacaccagatatgggaaggaaaacctgttcagatctatgaaacagggcaatttaaactagttgatgggaagttctctccgtaagtatctttgtatactttcttgacaagcttatttttaagcctttctgaatccctttgtttattgaactatttagcatgtacagtatgcttaacatatactacgattctaggaataccatgcgatttagtactcttagattgctacctggtttgagcaagtttcataagggcatctttggaagcctggtttagatgtgaaacctgtgtaaggtcctgtttggtagagctccgctctcattctagctccagttccctaattgtctgatgggagtgatgggtgtgtggtacgctaccctgatatggcgagataggacgtatcctgtatcagatacgcatccaatatggatatggtatggatacgcgttggataatccacgaagtatccgtaaaaaagtaaatcagcaatgattggatactctttatcgatatgttgggcttgtttgatatgttgttctgatactgcccagcccatcaacagctgactcccccactccctatgcctgctgcctctcttctcctgtaacccttcacggctgccataagcccataacacgcccgcaccgtggtgatgaggtcctctactccaccgctccacagcagttcctgttgaggcgaggcgatgagatcctcgtggacgagcgacagcatgccatgctgctgcagatggtggggctatggttgcgcttgtgctaggcagccatgttgcgaggccggtgaccgtctggccgcatgagatgaccatgatgcgggccctgctcagttgctaccacaagcgtcgctgcgtcgacaatggcacagggatagttggttcggagcggcaactggaaggcctcttatgtcctctggagtataacacccggccctgggcttaataagattaataggagactcataccaacaagttgcaacttcttttccggaagcccatttccaaagaactctaaagttaagcgtgcttagcctaaagaaatctagggatgggtgaccgaccgggaagtacatcctgggtgcgcatgaatgaggacaaagtgtgtagaaaagactggtgttggtccgtgagagctgactatgtcctagaaagtaccagaatgttgtgcattgcttgctagtcatggccagcactcagcagttaggctacctcagttagctttcccatttctctaattttttttgtgtaatttctctccggatct

SEQ ID NO: 4250 - DNA, 3770 bp, Sorghum bicolor
ggttcccctcttcgttttggtctgggagccagccagccagccatggtagcagcctacaatcagtttcatccaagtgctttagacacaaatcctgtcgtttaacaaaattgcaaacctgataattaaacaaaatgtgatttggcactcacgctgaaaattttatggaaatgttgtttctgtaggtattatattcattctgccttctccacattaagccgataccttcacgagcgggggaaaagatacagagccagagttcataagaaactaaggcagtgaatttatgaattgctagagctattggatagaactgctggcatatatcacatagagacatgagtcacatgactgaccaaagagcggcaaagggtctgattgatttcacttattaaattctagctaactaaactttagtcactttagtagttaaactttcaaacacaataactaaaaagtagcaaaaatagtttagtcctactagtcacctaaaaatagctaaaataactttagctggctgttgaagcaaccatcccttttgaccacaatcaacggggggtcgtcgttcgctcgtctgaaaagtcataactgaaaatactgttcgttgatttaggctctgtttggttccaccaactaaattttagctagctaaattttagtagctaaagttccaaacacattgactaaaaagagctaaaatagtttagttccattagtcatccaagagtagctaaaataattttagctagtaaggggaaccaaatagggccttattataagttaagcgaacaaccttaaatttgtcaattccttcagaacaggagggatgtaaggaacttgaggctgcgttatttgggactctgcaggagacgaagtgctgcctcgtcgcggagtgtatagcagtgactcaaattgttcttttttctgtgacggcttaagtggaatcagtgtatagcagtcgttaaatgtcccatcggtgatcagccagcctagcttcatcgtcttgatgaacaagaacaaatgtgtcaactgcgccaagagtgttaacgagtctattcgcttgaacggatctgtcgaatctgtcaaccattcaacggtgtttttcttaaataatactttcactcatggcttttcaacgaagcgagaaggaacgtcaacaagaatgtcctatatttccttctccctaatcgtttgcacaagtatcatcgttgcataacagagttgtgcactgactagagatttgagatcttgtattgaactccggctgtcaaattctgttacttcttctcgtgcatacatggattggattaagaaaggaaagtacaactctctgaaccttagacttagctgccagttactacacatgcatatcgctggctctcattttttgacagaggtaaaccttaccggcttttgtagaaactagaaagcatatagggttttgaacttttcaagtgcgtccgtcttgaactcttgatagaagaactttgctctactagtattgagttgttgatgattgtcctcatagtcgccgttacgtcctccatagctgcaagcagtggcgcgcagcatcatcagtgcaactctgcaggctaccctacgccgcaggctagtagattctcctgtcctgtaacaccaccgtttccgcgctacaaaactccatcatctcgaatcagataccacactagctcaaagctggagcaaaaaaagaacaggctcagcagctccccgctttcccccgccacagccgcaaccgcaatcgctttatgccgtccctctcgtctctgccgataactcaacgatgctctgcatggacagctcgcatgccgtccacacggcgccaaaagtcaagcggctctacattattccttcgctctgcacttcattatcatcagcaatctgaaaaatgctatctcacatcatcttgttctagactaccttctggttcttctttctgcagtgcagccatatatatatatggcagccatctgctgagctttcttgcaacgatcgagtttcagtttcaggtagactgtagactgcaggccgcagacgatcaatgggggcgtcgacgtcgacgtcgcggcaggagacagcgtcggcgtccgactcgtcgcgcgccggagacggccgggccgtggccgtggtggcgagcagcgctgcctctgccactggtagcaacagcaacaaccaggcccagtcgaagagggcgccgcttcctcacaagttccatgagatagtcgcgcaggcggcgacgacgacgacgggcggcactcctgcagctgccgccgaactggaggatcaggtgtacagcacgggggtctaccttgctggcaaaacgaaggtaagtttctgtttcaggattcgtcaaaaaaaaaaagtttgtttcaggcacgaacaagtatacacctgaacctttgatgcttactactgtagtaggagtcagtagatcgctactgatgcaatatgctctgattgatggtgatgcagaagtactgggtgcacgagaaaaccaggtgcaactgcttcatgctgttcgctagggcactgtccatcacttggagcgatgatcccagatactggatctggcatcccgtcaaagaaacaaagtacgtactgctattaccttttttaattaaacatgctcagttcaagtcttgtttgtacagcagctgactttcgctctgttctgatgatttctgaacctgctgctggcaaatcaaccaaccaaccaaccaaccaagcagcgacgccgaggtggaggctgcgtcgctgcagaacgtgtgctggctggaggtgcacgggaagctggagctgtcgcacctcacgccggggatcacctacgacgtcgtcttcgaggtgatgctgacggagccggcgtacgggtggacggtgccggtgaacctgcggctcaggttccccgacggcgcggtgcaggagcggaaggagaagctgcaggacaggccaacgaagcagtggctggagctcaaggccggggaggtgaagacggcggcgcagccgggggaagggcacagcggcggcggcgagctggagatctccctgtttgagtacgatggtgggctctggaagaaggggctcctcatcaagggcgtcaagatcgtccccaaggagtgatgattagtattaatttgtttcatttcgcgcttttgttttcgtgtcagggtgtgccaaaaacaacttgtaagaccaatgagatacgtggaataataatgacatgtgaggcactgcgtgttttaaggcttcgctcaatcgaaaaaaaaaaacccttacaattgaaatgaaataatctatgacgttgtcaccttaactaacatgtgttggagtagtatattagaattatcttagtttaatttctattttacactctggtacatataaattgaggtggatacgagtagtccaaatgttgcaaaaaaaaaaaaaaacagtccggtaactcagtgaccaaaaaattcactcaaccttccataccctatggcttgtgcactttgttgtccatactgatcgccaaccagcggcgggccagaaatgcattttttctgttgccagaggggaccaaacgtgcaaattttatcaaaatttggttgatttttatttttttcaatggaaattgcattggcttaatggggttttgcctcaagcctctccctgcctccaccactatcgctgactgccgccttgtggatgtgtcgttcagcggctgatcagcaatgccaaatgaaatgcggtactgctagcgcccgaacgtccga

SEQ ID NO: 4251 - DNA, 10725 bp, Sorghum bicolor
ggcggagcagcggcgcggcgagggcggacggccaggtggatggcgcggtgtggtggaggatgtcggcgaggagcttcaccatgcccgaatctgaggtggcgggagtggcattaggttggcccgcgaggggccggcgcggcggaagaggcatcgggaacggcgtggagggtcgccggaggtcgcgccggccgccggccgggtgggcctgttcggtgagccctgcagcagctggaagcggctgcggctgcaacctgtgaagtgtgtgtaaagattcgtgctgaaggataagcgtcctcgcctcttcgtcgacatcagtccaaaactgcgcttcccctatctgctatcttctccgtctcgttcccaatggcttcctccctcctccgcgcctcgcccttctccctcctctcccgcctaaagcccaggtcatccgccttgcacctccgccgcctcctcccgctctccaccacctccacctcggcctctgtccccgcgccccagctccgaaccctagcgtccgcggcggccaccgatgcggctgctaccccgccagaggaagcggcggtgcccgccgcggcgggtgcgaaggtagagaggctgcagccgctgcagtggcctccgagggatgcgctgtgcggcgagctcggcgccggggacgccgggcgcagggtaaggctatgcggctgggttgcgctacgccgcgcgcacgccgggctcaccttcctcacccttcgagatcgctccggcatggtgcaggtgagttgtcttgtcgtcgtgttaggctgcatcagtgtcagttttctgtagtggtggaggcatgcctgtagaccgtagttgctttagctaaacggttgtaattgctgcaagcggctagccactacattgtgtcgtgatcctgtgtttgcgtaattgtgtctacattgatgtagctgctgcttgtgtagatgcaaactctgggatgttaattttacattttctccaaactctccgttgcttgaagtgtgttatctggaatgatcgttgcattgcttaattatttgtgtactgttaagcgttgcaatttgcctccagcatcagctactggtccccacaccaagtgactcaactgcttgtagttagcagaagggcaatggagcagtagttgcttcatgacagattggcagttgtgtctgaatgacttctgctcagagaatgtgtgcttctatggctgcttaccttttcttattacgggcaatacgcttatgcattgactgtcataatgataattcttacaggattatgtaatttatgttgctatcagatcattgctggggtttttatatggtactttgtgtagtgtaggtgacaacgttgccagagtacccagaggtttacaacatagtaaacaagctgagagtggagtcagtggttgctgttgagggggtgatccagccacgccctgtggatgccatcaatgcagatatgaagaccggcgctatagaggtgattttgggattaatagacaataagctgggtgatttttcatggctagaatttgataaatgcacaatctacttagaaatattgttgtttataagaagctccctttcccttcatttcgtatgttttggtcatggaacatgtatgggacaaggaataacatattttatatgatgcatagtttaagtactttgtaccttttgactgtcattgaccttcctattttgtattttcttttgtattgattggcagccatcacgccttatgttgttttggcatcaataggcatagtagtggcttttcatgactagaatttggtatttacacattctactatagaaatattcctgtttataagaagctccctttccctttatgcacagtacatttggacatgcaaaatgtatgagataaggaacaacacattttatagaatacatagtttaagtacttgtttctttgagtgccatgaggctttctaatttctactgagttcataaagtaaccaacgtaaccatttgattatgttgcatgttggtaccttgaaggttgtggcagatcatgttttagtgctgaactcagtaactcgttcactgccgtttccagttacaattgctgatactgtaaaagagaagtttccagaagaaattagattgaggtaaaacatttacagtctgtattttcaaaatttgtgcactggacttcttcgaagtagctttaagcatggtgaatccctcgaattagccagcttgcgaggcatattggctaaaacatattgccaaccatgtattgcggcataaacaatgtcaagcacttattctagcatacctggtacttgctatctactgggtgcattgccatttgttttagcataatattatgcattattgcactgtgaaagttatgcatacatgaccacaaagttgcacatttgcctcgtgaatggtatggactgacatcaggggaatttgatataactattcatctcatgctttgtaactgctatgattgttttcacttcattttactgttcacccaattttttcaagctgtagtttgtgattgttgttctttcatggatatgcagtttgttaaagaaattatattgccctcatgttgactgctaacttaataaccttcagctacttacttcctctgattcaaaatgtaagttgtttagggcatcaacacagtctacaatttggcattttgacttgcagtttttgtacaagtgtactattttaaataggaaaaaatatatgtggaagtattaatgtattgattgatatcaaccatgtgttttcaatctatgtaacttttcatatactgatggatcaagtttaagaagtttggctgactaaaaacctaaaacagcaaagcagcaattccagagtcccttcttcatggaaatcttcaccatcgccccttgaaaaatttggaaccaaagaaatgacacaatatttgatcaaggaaggccttttaattcttggaaggttctctttcttgaggaggctaaacttcaggctcatagttttcctgatgaggccaaaagagctgcttttcttctttgtgtagagcttcttgtttacttctgttgtgtttttctttggcctttttaggccagctcctgctgtttggcttcttgccagacaggttcagacagttttttttttgcctcttttaataaaatctctacagtgggggcctccctctgctgtatttaatgttaaaaaaaaactaaaaacctaaaacgaacattgaattccactgtactatatttcttccgatcggctgtaatttgcttcttgttccaaacaaatcctatgctagatattaacacgtgttaaaagttagagcattcctatttgcctaaagttgatctccttgtccttgttcttttctccttacaggacttaagatactagtatgcaaattttattcaaacaatgtgtttatgctcttccagtttaagtaatgagtgccttttttgtaactttttatcattgaatactgtaggtttagagtgttggacttgcgtcgtcctcaaatgcagtcaaacttgcggttgcgccataatgttgttaaacttatacgccgctacttggaggatgaacatgaatttgttgaggtatgctggttatatctactgttacacttgtccattgttttgtctgagtttccgccctaatatattttactacttgtcatagtggcctcatttttcgatgaattgcaatatatcctcttgtgatgtagtgctagatggccaatcttaaatcagggctctaattcttcaacttgtggtttgacgggccagggctatatttttttttcaacctcttctatataacatcgatgtaatttcattgatttttttaccatcatgtaaaaacaaagtcaccaacagtattttttactatagaattactagcagtatgtacagtctaatggaagctgtcttatgaagattgtgtatgtgtggattgataaaattagtcaaaagatccatcatgcattcactgtctggcatcttctgttgcttgtatcacctagcaacgactcattaaatttaataaggcagtgcataggacaccttaccgacaatgattataagccatgttaataccccatagattgtggaagctcacttgtaaaagctagattatagaagttaagttggaggttgtttggatccatagattgcataagttgagatagagaacttttcggagtaaaattaccataatgtcctcattcttttatttttttatgctgctgctgtgaaagaaagaggggcagaatggtcttttgatgtctagaagctgggttccctcagcttaccagattatggaatctaggggcctgtagattgcagaagctgtctagaagctatggctgtttggaacacttcctagattttagaagctagcttctacaatctcggtgaatccaaacaggcccataatagtagtatagcttttaagtttttaacgccctttatgacataaaagcttctgttatgtctgatcgaaagttacatgttccaaggtagattgagactcctgttttgtccaagtctacacctgaaggtgctcgggactatcttgtaccatcgagagttcaggtaattaaactatgtacaaattttctatttcttcatggaccattatctagttttgtttactctttagaaaacactttatgccctttgctactgtttgtaactttgaaagatctgatgcgtcatgtcatgtttggactttggatgctttactgcaaagcaaaaatatatcacatactcttattacagtttaattggacatattaagttgcattctttgtttttctttatgcttgcagatttttatctttgacaaaattgtcttaagatcagttagattcgaaaagttgctctgactgttctggaagacttacctagaggttcttctttgtgtggatgccctgcgttcaaccgctatccacttctgttcttccattttactaaattctcctactatgataatgttagattagtctccagaaagtattaaagtgcatcagaattttattgcaagtgactgtttgtagtaggtctaatagctagaagtggtgtttcttaccttttcaaatataattgctgcatgttccctgatttcttacaatatggtttctgaagccaggaacattctacgcgctccctcaaagccctcagctgttcaagcaaatgttgatggtttctggttttgaaaaatattatcagattgcaaggtaactgtgctgttttctggatgtatttgtgcttttacctttctacaaaccaccactcttcctctattattctatctccttacgagccatgattttcatttttgttgcttactgagagctgaacttctaaaatttccatcttgtccagattattggcaaatccagttggcctatatagtaatagtatcattaatccaattaactactcagaaaagctgcattgtattggttcttataggtgcttccgggatgaagatctgcgtgcggacaggcaaccagagtttacacaacttgatatggagattgcttttacatctatggaggatatgttgaagctgaatgaagatttaatgagacatgtatgctggttttgacataccttttctctttctttcctatcaattgaaatgtgtccgagggtactcactcctgtggccctcagcagaagcatgcgtgaaatgtaaccagaaataatgttaaaacatgttttttataaagacatgacacaatctgtgactctatttactgattttgtcaagtagctatacgttagatagcggtaagccaagatcttagtacattgttaagcaaatgttattgtttctttactagtaccactgtttatggttaaattagtgaatgatgcaagaattcatataacaggtttttcaagtggtaggagatatcaagctgccaaatccttttccaaggttaacatatgcagaggcaatggatcgctatgggacagataggcctgatcttcgattcgattgggagctgaaagatgtgaggatttgtgatctttctgcagacactttaaattgccatattaatgatttgatcagttgacttatctccacaattcacattatattttttgttagtggcctgttattttaatcttatgttgcttttgccttgtagcatatatgttgaacttgtgctaagaaattcctttccctgtttattagttgcaaagttgatcccctcatttcttattgtgtcaaatgcaggttagtgatgtatttttgggcagtaacttcaaggtttttgctgatacattggaaaatggaggtgtgataaaggcactgtgtgttcctggtggtgccgctgtgttttcaaacactgacctgaagaaaggaactgtttacactgaagcttccaaagctggagccaagggactgcctttcctcaaagttatggataccggtaaaaatagagagatctttgctcttctgttagacaaaaaattgtggcattgcttgaacaatagttttgtatataatctgctttcacaggggagcttgaaggaattggtccacttgtatcaagtctgaaacctgaaaagaaagagcagctcgtggaacttctggacgcaaaggcgggtgatcttatcctgtttgcactgggtgaacaatcatcagctaaccggattcttggacggttaagattatttattgctcataagctggaggtgatagacacggtgagtcacaaaatgaggaatataacgatccctattgttgatatgctttgtacattactcatgacacatcgatgaaatgttgttctttgccatcatttgctactaggaggattctctgcgcgttgctgtgggtatgaaaaatataaataggttagaatgtgtattgcctagttggacagcttgcatgttcatagaaataggtggcttgctgacgtggatattacaattgcatgagctagtggattttaattgtgtgcgatagtggattgccaagttggatagcttgcatgttgaaggaaataggtagtggggttttgctttataagagtataagatttctttatgatgattctgtttctgcttcatactcctaacatgtgccctttgcattttctatattttgccagtctgcacattcagttctttgggtgacagattttccaatgtttgaatggaacagcgatgagcaaagatatgaggtcagttgtttttaatcttcgatcagggaattataagaactacttctgtatactttccaaaatcgaaatggctattacttactgtttatgatcacattattttagagatgtctacacttgctatttttaaaggctgctattttaccatgatgacacttggcattacaccatcagcagaacttggaagagttgattatcacattcaaccgccagaatacccactattattgaatttagtattcagaatctgtaaatgacataagggaaactgtgtagctgttctagaaattatagggaaattatggccaatacactgagagtttgcaaatcatagaagtaacggtgtctctctggtctctgagtattgcccattcttctgcttttataaactcaggccctccatcatcctttcactgcaccaaatcctgaggatatgaatgatctaccatcagctcgtgctctggcttatgacatgatttacaacggtgtggaggtacatcccgtttttatctttctgagtgtgcaagcaagctaacttgatatagtgccttatttatgttttccatgtatgatttttcttaacaaattgtcataccttcacgtacatgccagtatcatccaggttccagcatatgtttcagaaaaaagaccaacatacatatttacatatttcatgaaatagaaaattagtataatttctgagaaatgccatgattgtatggaattgagtagcccttgttttgaaaactaaacatgttcattgaatcattagacctagttttacataaatattgaatcatgatttcacataaatattgagtagccattgtttagttcttctggctttctcaggcttgctgtctcttctctttttgtttgtacagtgctgtgctccttgtagagttttttctcttgtttaattttgtataaaatttttgtataaaattttgtattggcccctgctgtttccccaattaaaaaaaagggatgcacattgcatgttggctggcaattggacatactgttacacatcattgtccaatacaacgttttggttgttttatgaagaatgagccgagttcttatctgttttctgttgagcattgtaatgtgggttcataaatgaagaagatacttgtaagtacttaaaaccttgatagccttgacctgacagatgctaaaccacttcaatagatttgcctgagtgaatgtcctctctttctggtattatcaatgaaatgtgatatatctgtgttactacaatatatgtaaggattgcgagatttaatgacgtagacagttgaaaattatacaaaacatcttatattctgtccttttagattggagggggaagtttgagaatctacaaaagtgatgtacaacaaagaatttttgagatcattggtatctcgcctgaacaggtatgacttcagctatcggcttgctcacagtttatatgatctggactgccctcgttatgatagcaatcatgcttttggttctcaactctcatagatcgtgttattagctgaaattgaaaaaacagctatatttttattttgttgaaataaggatgtcttaggctgctatttttttttgcgagggaggctgctacatcttttctgcttttgttaactcagagcataacaagtcataattaaaataatgctttataaattcatcacacatgctcttttctatgccctcccttccccttgtgggtacatatgcatgctgcccatgattttatttttactaattgttcaattcaggtgtagtacctctaaattcaggtgaaatctaagtctgctgatgtgcttttagatggctgcatacctgaaaactgtttaggcaccaagactttgctgttaacttgacattgtgtttgtctgtccaatttgtctccttaatatgcttggattcaagtatgctcccatcaatttgttgcaccccatctgttactaattgtttggcagcctcaaattgtttaactggcttcattacatgcccaagttaacagaatgaaagtcatgttgtaggtgtatatgcttacaaatttgatggccaaagttgtaactggcaacttccttcaaaactgtccttttctttatccttgttctgcttaagatcgttagcatggagaatatgctgatgcagtgacgctgtatttggtggtgctcattattttgtgacctctcacactattccttgtttctaatgcaggcagaggagaaatttggctaccttttagaatgcttcgacatgggtgctcctccacatggtatggctgttcaatcacaataaactccatgagtacttgagtcttagtacctatagctagtttgctgaactatcttttttggtgtttctcttcttcactaaactgctactcaaattataaaagctcttttagagcaattccatatatttctcatcatacaccttccgatagtgaattgattctaagatagtgtaacactggttcccaatattatagagctatttatatcttatactgttatgcatagtatttgctgttttttcttattttctgggtatgtcattgcaggaggcattgcttatggattggatcggttggtgatgcttttggctggtgagagctcgatccgagatgtgattgctttccccaagacgacgactgctcagtgtgcactcaccaaagcaccatcagctgtagacccacagcaactgaaggatctcgccttccccaactctacttcgtgagacagcagttcaagtgttcatgacaaaagctctgggttctcaagggatagctatagttttttagtattgcagcattctatttttgcatggtatagaatatgcaatatttggaccctgataaatttatacgagatgcataacacgccaaagttgtggaagagtattgttttaatagctgcgcttatgtgtttgtgcttgtgcacatcagtatcttgtaaattgtttcttgatggtactacttgctagtccccatttatttaacgcccataaattgttagtacatgtgagattgctgcaaaacgacgcgtctggtttgtgatcgacgtttgtccggatgtttttttttcccttgagcgcgtcctcaagattgcttgtatcgtagcgctacttatgagcttatcagccgaatctattagttattgagcagtgtttttctctcataataaatcagtcaacaatatttttatcatggcttatcagccaaacgaacgaacaaggtgcgactatcagatgattatagacgggcttgtcttgcaaactaaacgcccttggtcaatgcttagtactagcaactttaataaatattacgtaggttgtgaaattatgatggtactttccatgttggctacgtgacagcttcgataaatgtcatgttggctacgtgacagcttcgataaatgtcatgttggctacgtgacagcttcgataaatgtctggttacattgtggcagtttgaacagaagttaagggaacaacttgtggataaaacag

SEQ ID NO: 4252 - DNA, 4869 bp, Sorghum bicolor
agaaatattataggaaaaaactgtgcgcctaattctcccgctcggtctgagcgtccagcgccagaaataaaatttcaaacctaacggactagtatttctctgttgatgtcctactgataggagaactttaaaatcggtaggaaaattataaacccgacagaaaatgtctattttactatcgaactagtcgtgtcggaattttcataaaattgtttaactgttttgctaggttttagcctttctctgttggggttttttaccgacaaaaaatttttagtttccagtagtgaaactcactaaccctaacctttgtcatctccatggtataaaagaacactatatataggaccaaccgtcacaatgcataaggcatggaaccggcatcacaaactccctagccatacaaggctttgaaggccccaaaatccacttgtcactggcaacgagatctagaatccctgaaagaacatcaacaaaagaaagaggtcaaaatcgccatgaagagagccaactggctgcttccctcgataaacataccaactgacaccaagatctgaagagaattaacacatctgactgaccaaactctcgcctctcttgattggagatgggactgtctgcaagcaggagtaaatctacgttgagcttcctggtgcccatacatcagggtgaaaacaaaattaccactaattagataaattttcaccacgtattgctatcaaattatgtattttttcttagcactgcaccaccgtaaaattatagttggtttcgcccctatctgcaagtgtaccgctactgttctactattggccgggcccacgccgcggtagagttacgagctgttagagcaagtttaataatacaactcatttgctggctataaggtttcttgcagccttctcctagcccacccatacaatagttagctattcactattaatacatggcccacttgtctcacaaagttttttggttcgtgtgcctaggctggctgtaagcttacagcccgcttctcctctctctcctcccttctttcctccacctcagcatttagccagcttagagcatctccaagagttttgcaaacaaactttgcattgccctatttgtaaaaaagagtagaaaatacccctccaatggttttgcaaataaggtttgcaatttggttaactttgcaaatagaggttgaggatttgcatatatgcaaaccttcccatcactttgcatctacaatttcggccttccacatcggactccatccccccggccacgtctggacgacgtacgcggccacggcgcgggaacggaggtggaccttcactcacggggaccttccctcggaggtggacggagccgaactgacgcgaacgacgacgacggcgacgaacgacgaacgcggcctgggctgggtggcgacgggtgcgaagacctgggctgggcggcaactggcggcgacttggcctgggcggcgactggcacgcacgacgtacgtcaaaatggcacgaagggaaaaaacgcgcgggcgcgatcggtgaaaaaaaaattcagaggtggcgtccacactttgggtttgccaagtctaaatgcaaagtcccttggagttagactatttttagactttgcaaatgagtttgagactttacaaacaacatcaaatgtaaaattcatttgcaaaatcccttggagatgctcttacagcccactataatagtttgctcttactgctgtagcgcgatgccgccgccgcggctcgagtccgctatcctcgccgccccggtggttgaagaggatttggcgggagagcaggtgaccggtggcactggcacttgcctgctccaagtcaggctacgtgggcctcccccaccttggtgggctgtgtacgtcacagttcagttcagcatgcgagctcgcctgccgcgggccggcccatcaatactggaaccgaggcccgaggcccatccttcttctcctctgcgatgcggtgactgccgactgcgcgccgtcccccgccccccacccctcgccctcgccgtcgcccagtggccagcgccgtccgcccgctcgacaactgagaccgcacgcgccgacggcacgctgcccgcgcggcggtgtggcctgctctagtctgcggaaaagtgccacgccaagccgggaactctattcctcgaggccgccacctccgccggcacccgtgcctcccgcctccatcgatttgactgtctggaagtgtgttcctctactgttcaattggccctcgccgcggcggtaccgttgctactcctgtagcgcgatgccgccgccgcggctcgagtccgcgatcctcgccgccgcctgcaggttcagcaagcctctctccggtacgcatcgtgtccacctcctttcctcttctcaattgcccgaagaaactatactctccaacgacttcatcgttcacgcgatgggatcctctatccaagacgttgattagcacttgccgatgctggtgtttcatgcgcagctctcaggaggcttggcgttcttgcctggcactgtccaccaaccgttcgacgcaatgctgcagaggggtccgtgccttcgctgggcttgccttcaccgtttcaccaggttgtcgttcggagtggaaaccttgttgggtcaccaaggttctgccacgccactgctggcatgtcagatcatctcacagacgtctacgccagtgaagtactgaaggttctcaagtccaccagtgccgacaacgctgatctcagcgatgctcttcgtcggttcgcggtccacatggatgaggatattatcctcacggtcctccagaagcagcggtccaactggcaggtcgccctggcgttcttcaactgggcggcgaccctgccggggtatgcccacgggtcgagggcctacaccgagatgctggacattcttgggcggatgaagaaggtcaggcacatgaggcagctgtttgacgagatccccgaggagcggcgtgtggtggtcgtgacgaataagatgttcgccgtgctgctgaaccggtacgcgggtgcgcacaaggtgcaggaggcgatagaggtgttctacctgaggaaggattacgggtttgagctcgacttggtcgggttccagatactcctgatgtcgctgtgccggtataagcatgtcgaggaggcggaggccctgttccgtgagaagaaagatgagttcccgcatgtcacaaagagctggaacattatactaaacggttggtgtgtcaagggaagcctgagagatgctcaaaggatttggaatgatatcattgcatccaaggttgaacgagacctgttcacatatggtacattcataaacgcactggccaaaaatggcaggattagtgctgcagtgaagctgttcaaaaagatgtgggagacagggattaatcctgatgtcgcgatttgcaattgtatcattgaccagctgtgcttcaagaataggattccagaagcacttgagatttttggtgagatgaatgaccggctttgtcaagccgatgtggctacctacaacactttgataaaatacttatgtaagaaaaaaaggatggagaaagtttatgaacttttggatgacatggaagcaaagggctgctctccaaacaataggacatactcctacgttctgaagacgactgagaaacctaaagatgtcatcgctttgatgcagaggatggagcaaaccggctgtgaattggattctgatacatataacttaatattgaacctttataccaactggaaatatgagaagggggtgcaacaggtatgggatgagatggagaggaatgggtcaggcccagatcaacggtcatttactattatggttcatggccttcattcccaaggcaagctcgatgaagctctgcagtactacacaacaatgaagtctagaggtatgattccagaacctaggaccaagatactggtgaaagctatgcatatgaagaaagatggggctgccactgaagatgactcaacaagtatggcagggaagcatctaaaattggatcgtcgatcaagactattcaatgttcatagatagttttgctgtcaggtcttagttctataacctgagcagaggatgctggggacataagttttatggactgaaagaaagaaaaaattcttgtctatgggtgtccatatcacaatggccgcaccttgggctaaaaagaatcatcagtaaagagtcattgacattataatttctcagaaagtcctgctcggacttacagtaccagggtatgttttttttattttagatatctgatatgaaccaattgcaagtactgttttttacatgctgtattatatgaagtacatatacggataatatgtgcaaatgtttgtttgttcatctgttatgtgtggttgtgtctaattgttgcttacaataagttttgttttgtttgtttgtttgttttttttcttttttttttgtgataactcggttgagaagcccaaatatttccgacatgccttgctaattcagaagagacgtgaactaggcagctaggatatgagttagagagtttttcaaaaaaaaagaagagatgacttatagtggccatcctttgtatcgccaccgcccactggcacccttcgtgaatttgcagaacaaacttctgctgtatgcattcctcggtctgttcgaacatgacaatcactcatcaaattgacactgatacccttgcataaacgtgagataatcaaggcatgcatatacatttgacacatcatacactttctgtagtgcttaacattcaagcgccatggcgccacgagcatatacacgggtggcattcgccgttggcggaggagcggctaccatcgcgccccgctccgg

SEQ ID NO: 4253 - DNA, 4396 bp, Sorghum bicolor
ctacttcctccgttccagatcataaatcactttgatttttttatatattcactaagtcaaagcgacttataatttaaaacagaggaactacatcacgctgaaattaatttatggtgctatgacaatcacacgttgttcatgcatctgagacgtcgccctaccctgagcataatgctactagttgctaaggacacccttggtagggagtttgtttttgaaagagacgctagagtactgcccaatcacttaaacgtcttgtttaggacacatattctagatcgattctggtgaaaaaaaaaaatcatatgaaccctccaaacgtcgtgcttttgcactgggcttcctcccctcaattctctccacggcatcatttgcacaacaacatggaacgggctaggagagggttgtgggaaaaatcactttagctcttctcttccctcggcctgtgccttttcctccatcatgcatggttgcccctactcaccttgtgctctcctatggtggccgttcctgtggagctcctcctttggcgccctccttcttcatccccgttgtggccaaatctgctggcgagggtgcaccaatggagatgagtacctttgcttcttcgtgccgtcagattctcctccgtatgctcagattcccgacggccaagctcacctctatcctctacaccgtccaattcctcctccccacacaccttgttgagcttcggtagctataccatctcgtgcctccccaaggtcccgggtggcctaagggagtgcgtctagtgctctatttttttttttttttttgtgctttgtgcttaataagacaaccttttgtcccttattttgtacgagtcaacttggtagttgagcatctccattggatatcgtatccaatctcctatacctgaacatagtattttacaagatgaaggtacgtggcacaatagatctcttatcttatctcctttgctataatctttaagtggtatcctaaaaaaaaagcatctctctatctctgttttttaattaaaattttgtgcactggtagggatctcccccacagtattttttgtaaaaaaaaaataaaaataaatcaggtggaaatgctctaagtatctgatcaaaggggacgtgtggggtcgttgtttcgtatccgttttcaaggcgcatgatgaaatggtttggtttcattttgttttcaaggcacgagtaaacataccttatatctaggtgagatccactcattcccttatggccttgtttaattccaaagactttgtaagatttctcatcacatcgaatcttgcggcacatgcatgatgcattaaaaatatatgaaaacaaaaactagcgcgagacgaatctttgaagcctagttattccatgattgaacaatattttgttaaataaaaacaaaaatgctacagtgtcaaaatttaaatttttttgcgaaccggaccatagtctcttacgcaagtcttgtagtcatctgaaatcaaatcaattcagtcgtcgaaacgtgagcgaacaactgaggatagatgctggccttagaaaattaacatattggtcccagcaaatctagtctagaatagtagtgtgtgagatacactaggtgtaatttatgagtgcttaattaaaaaaaaacaacagcaataatagtaaccaaaaaaagaaaagaaatcagaaattgcagtaggtggaggaggactctggccggcagtaacgggcatgcatgcaaacgcaaggcgtggacgccgccgcaccgaaatcccggatcacaccgcccgcagtaacggctctggccgcataggacgactgctgaaccgcatttgtccgcgtctcatggcatcatcatggacggctacggccagagccgtgcactcgacggcgaccgcaagcggggcagaagcgtaactccgcgcacccaggcggcccccacgtcacgaggtgcatccaggccccgcgccgcgtggatggccagatggccctgcctgcgccatgggcctataaaagggaggatcggagtcggagcagggcaagattgcatctccatcctgatcgatcgtttgattattggcgagcttcattccattccatcagttcctttggcggaggatgtcgtgctgcggaggcaactgcgggtgcggctccggctgcaagtgcggcagcggctgcggagggtaataagcctgcctgtgcctgcacttcttcccttcccttattcctctctctctttctctctctctctctctctctcggagtcagatctgatgatgaaatggtgggttccctgctgatctggctctgttttcgccttgcggcttcatcagacctgtgcttcgatccggcaggctgtgcttccgtagaaatgttctctctcttttttaataacatacataaaaacaaaaaacttttggggggggtatacaagtaatagaatatgtcatgattttattagcctgtgtgtatggatctttgatgctggagggaggattatgtgcagagataggagatcgttctctccctccctcccacggctgcgggcggcttgattttcttatgaaagttcttgttttttcaaggtcgtatatgatgatttttctggccgggttgttcgtcgtgctcatcgtcatcctatcgatctgtctgtgtgtatgcaggtgcaagatgtacccggacatggctgagcagcaggtgaccaccaccgccaagactctcgtcatgggtgtcgcaccatcgtccaaggggtatgtatatatgcatgctccctcatccctctctcgttttctgtacagttctgctttcttggctccatcgatatgacgggctcctagctaataattaatagccagcaacacatgtggtgatctctactctactatttttgtcctatttgccatcgatttttgtactgctagcagcactggagtaacgtgtagtgaaagtttcatcagcaaccgtaaaaaggtgacgacaccgaaatcacacgctgcgatgtcatgtgccatcgtcaaggaattaattaaacactgagatagacatgcatgcttctgctgcttttctctgcgccagcaaagaaaaccttgaaaaacaacactgatatgacgatagtctttttttttttttgttggcacttgtcatgtactgaaaagtcttgacacggcatacgttctggtagggaacatgacaaagatcgatctctggtcactcgtctgctccccctacctgcacgttgtatcatgtaaatccacagtatatatgctgctgtgtattgttatacatgtatgtatgtagctagtactcctgtgagagcacgcatgcgcacgtactgactgtgtttgcctggtacgtgacgatggatgcaggcacgccgagggcgggttcgaggcggcggccggcgccggagctgagaacgacgggtgcaagtgcggccccaactgcagctgcaacccctgcacctgcaagtgagctgtataataaccccctgcactgcactgcagcccggaggaaggacggattcccttagctgtagtatagcagtgtcgtcactgtgtgtgtgtttgagtcagccagtcagtcgagtgccatggcaccatatgctagtggttctggtactgatgggaaccaataataattgtactgggatgttggcgtcgtgtcgtccttcccgtgctcctccgggggctcatctactagcagtcggtgttgtgttgtgtgtttgtgggtgcagtgcagcacagcagcaggccatgccccctgctctgtgggcacgtcgatcgtgtgcgactttgtttgtgctctgtcaccatccatctattacctataatatcccccgtctttgtgtactgtgcgtacccttcttatcttgtttgcgaatgtgtttacctttcttctgtcaatcatcctgctcactgcttcagtaatatttttttcataataaatcagcatcaatcgtcttactattttaattatactatttttttataacaaatcagcatatgtaatgtgagtattagcactacaacattctccaaaaatctctagaaattctgaaaacaaaaaggagcccaatgcggcctgcattatctgcaacctctagtatatcgcttgatgggccatggccgctgcattcactaacattctaccttagatgggccacgtttgggctacctattttccccatcctttcccgacagaaaaggagcccttgggaagtgcacgatggcctcgatacagcccagtaaatacttcggcccgcaaagtttgggctctgccaattcccctcggctccgccttccccgtcttgtcgctgccgggtgccggcggcggcgctcctccgagttctgctgccactgcaatggtcgccgctactccggccaggcataggcagcagtgcagcg

SEQ ID NO: 4254 - DNA, 9371 bp, Sorghum bicolor
gggtgaggcttgagaatggaataatggatgggctcatcctgttgggcttgcgttgggctctaaaatgaggtactatttggctgtcacgaatgggtatgggcacagcgtatctcgccgtatcgcgagctaaaccagacgattttttatctagttttttttctgattcttggtgatatgtgtgtcatgccatatcgctgtacagctacaggtatggtcccttcctggtgaatcagtaatacatagaactgcataacaataaactatagttgaaacaaaattcaacagtcgataggtcgtaagtacagaaggatgataaaacagctttgtacaaggtaataactaataagtaatgtttgtgtggctttctggtttctgctaactctctttcaattattttatgtcatgaagcacaccaaacaccttatacaactactcatactttattatagacttcaagttaacttaaatctatcctaaacaaatatttaatcttcggatgcgatagattcagttactgtgaaatgcgagcaataaaaaaaaattctggacaggcatgaaactagaaatatttttatgccatgaacacatcatacgtgttatgcaactatattttatattccagatttcatttaaaacttatatattcacctactgtgaaatattgagcaataaaaaagtgtatggcacaggcatgaaacgagaaacctatgcaatgctggtcaggaaaatgaccggaatagataacgtttctccaagaagaacaaaacatcaaaaagaaaaaaaaaagctgataaatatacctgttgaccttaatattcccatcaaatatgctatttccagtgccacaagcaatgcatttgtggagctgtcgtgaaaaacctctagggtgatcaagtatcagtctgctgtgcagatcatgtatctgcttattctgagatgttaagtgaagtgttgatagttctgtctctgtctcaggacctaactgctcgatgtggagattgtgtctattcaattttgctccagtgctgacctcaacaaactcatatttactagttgtatcctgcaaaaagaaaaaaataaagtttcacaacaaataagactgatttcccctgttcaactaagattcattgattaatcccagcccaaacacactagagcaagcacaactcccctaacacccacaatgactattaacactagcaaattggaggcaactgtcttgagtcatgactcatgagatagatcaaacaatgacaccctggaatgacaaatgtccccagcttagaatcaatctgagtaactccaacaatctctcttccataatttgatcagagttgggttctcttatcatcgctatcccatttcatgagcatataacactcattcataactacagttacaagtatcttacaacatttatttatctaaaatccagactcacctgcttgacgactgtccatttggtgtgtgctgcagcaaatgattgctgttgcacgtatgaatgaaccactcttgcgccctcgtcgatgataatctctgccactggattggcccaatagcaaccaccttcttctccagccccaaaatgctcctccactatggccacctctgctgccttctcggccacgaccagaacccttggattggacatcagcatactcccagcaccgctattggtataggcgaacaagatgtggattgggtcgtcggccatcttgaccccctcaggcacgtgcacaacaacgacgtccctcgccccaacggcgttgaagtcgtagaagaggtccttgtgggcgaattcagcggaggcggcgagcgcggcggcggcgcggtcccgggcgcggccagggggaagatcggcgagggtgctgacatgggcaccagaggaggataggaggattccatccgagaagaggacgtgtgaagagaaaggggaggacggtagcgcgaggtcgggctcccgggaggggagggagatggggagggagcggagataggagatgtcagtgaagcggaaggcctcgctggagcggcgggtcggccagggcgtggagaggagggagagcgcggaggcggagcggagggggtcgaggagcggggaggtggaggtcaccgagtcctcgagctgctcggcgatgcggaggacgaggtcgtcggagacggcgggcgccgcgcgcgccacggaggcggataccggagcggaagagcgacggaagcgaaggagaggcggcggcgcgcggagagcggtggagcaggaggcggcgcacagcggcgacggcgaggacatggcgtccgcgaagcttctcctcgtctgcccagtggctacggtgctggtgccggactgcggagggccctcgtggccgtcggggttggccaaatccgagatcctgacaggtgggaccaggaatgagaactgacagcccagcccactcaaggaaaaatatggaccgtgttgggccggctcatgtgggcctagccctgatcctgtggagctgcgcgtagccttatccgctttcgttcccgcagctgtcgttcgcttcgctttgccttgccccggcaaagcaatggcgctccggctctctgctccgttcctcacctcgcgctttacgccgtcgcaggcgtcggccccgcgcaggcgcacccgggcccgctgtttctctccgtccgccgatgcgcgggccgcgtgtttcaggagaccctacacgtccgttctgattgtccccacgggcgtcggcgcggccgtcgggggcttcgccggcgacgcccttccggttgcgcgagccctcgccggcgtcgccgactgcgtcatatcccacccaaacgtaacttcatggagcccgtcgtaaacattatgctgctgtacttgtgttgctgtttctccatttgaatttggttgctcacttagagatggaaatttcacgttgtaggtgttgaacgctgcgatgctgtactggccgatgccgaatacactttacgtggaagggtacgcccttgacaggtttgcagaaggatcctgggcactccaacctgttcaccagaacaaggttagtgttgattgactcgcgctgtggggattactcccacttaggacccatactaccactaacatccagattggttatagttctgctatgcactattgttaccgaaagagatagccaatgacacattgtaactgatcatacctaggtaggcttggtgttggattctggaatcgaggaagatctccggctgcgccacttgcaggttgcagatgccacgagggcttctcttggccttcctgtagtggagtacattgtcacagatgctcctctggaggtgcacatcgtgttctgaattctgatactattgctgatagttgagcataataaactgcttgcatagtcttgatgtttattttagggcatgcccttgtttgatgtagatcaagacatggtttgatcccaggtgtgggaagtcgacggggagtgttggtaactctgattctcttctgagagcagttgacgcactagtcacacattcagacgtgaatgctgtggcagttgttgcacgctttccggatgacgacccagaagattcagattgttaccgggaaggaaaggttaactcttgtctgctcaagtagtttgttttatttttatttgtatgatgtcttgcatgtaccattgacatttgcatcaaagcattttttatagagaattgagttgagaatgtatcttctcaagtttcaagacattcaattttagaagtctgacagctacacgtattctggatttctggtctaaagtttagtgaatagagagctagtgctatcattcccctagaatatggaggtcattgcccctttatgacactggatctgtatattgaggggtctgagttctattgagttgatgacaattaacagtatgctgaggttatcatttgttggcaagcgtatctttcattttctgcatttcgtaggtagtgaatgttttttttttatttttcatcatttatgttcttgactgatattttattgcagggtgttgatctattggcaggagttgaagcaattatcagtcatctaattgtgaaagaattcaaaatcccttgtgcacatgctcctgcagtgttacccccatcactcagcccatcagtatgccctagatctgctgctgaagaggtatatgtccatgtgtactcgtgcataacttagttaagtaattatcaatttactagtgatatgtttcacaatcacactaccattacaaggcttatattacactagtgctatgtgttcagtttttagttacaacgttttcagccacctttttgcctctttggtcatatatatagatatatacctgtcctatgtcaacctctccaatacttttttcttttctttttaatctgattgcttattacttctatatgttgtttgtttattcataatatgtctttatcaaatagattggatatacatttctgccttgtgtgcttgctgggttaagcaatgctccacagtatgtcatgaggaagggaagcttggacaatggttgcatagtggctggtgctgtcgacagtgttattcttcccaaagactcttgtggaggagatggtacacttgctttcgctcgagctgcaagaaagaacaaggtataatgtccatactaattaatgatgaaagatggaaatatgtatccactttgaccgcacagtgtgttagataagttcatcaatgcaagttatgttagcatcatgattggagctaattgcaaaaggtgttagtcataattaactaggtcagctaaattactcatttcttcttcttctttgcagcccttaatcattactgtacaggaaaatgagacagtgcttgatgatactccagacaagttcggcatagaagcggtacacaacatatatctataatcttctttcacattctctctgattctttctgacaagctcatagatctaagcaattactggtaacttcgaatgttttctcagctgaatgtccggaactactgggaagcaattggagtcattgctgctcacaaggcaggtgtcaatccaaatgctcttagaagacaagggattgatcatcttaagagctctagacgattatactctgctcactcttcaagtcctaagccatctgcccatcctccggtgcacgataaagtacatatacagcagctagttagacaaatttagtactaaaaagagcaccagcattagtagaatcactttagataggtcacgattaggagcttccaaaattttgaagcataggtacatattttccagaccgtgctggagtggatcctacacatagcatctacaccgaattttgttgtgtcatccagtctggacttggctggcggcatgcatgaatctttctccactgccttacatttctccagtctctagtaggtttgtcaatcatttacatcattatttcgccaaggaaaacacagcgcttgtaatcatttttctccgacaatattttagtaagttgggtagaagcagtgtagtactgttttgtttccagctgaacatgagagtttatgctgaaatgccaagctgttatggcctggtttatcacatcaatgcgcatttgcatctactttagacatattgtcaatcagagttgcattaggatggcctggcttatacttcctttgttccaaacttttaagtaattttagatctgtccttactcctatatatatgtcaaacaacgcaaacttatctacaacataaaacaagattgattggacacaacatgaaatatatttgatagtgcatttacttgatattgtatatgtttatattttttctataaacttggtcaaagtttagacaaagtttgatttaggacaacactaaaacaatttactatttcaaaaatgggagcataagcaaaggaattgtggattcaatttgtttgtctcagacactattactaaaaatctttactatatgtttccaatgtacctctagttcttctctcctcacagctgcccccgttgccaaagctgtgaggtggcctggcattggcatgccaggttcgggcaccttaagctccatggactcaaggtgctctctaggggaagctgctgcttccatgtggtgttcgaaagagggaaggcgtgagattgcagcaaagccggaggtgagcccaagctccgtaggctcggagtcggagccattccatggcgagttcatgacagtgtgcgactgatcatgaggcatcggtcagacagtcacaccgtagggaggcaaaacaaacgccacgccccatacatgaccactagaactcaacaaaacgagaaagaaaaggagagtgcatgaacatttgcatgtgcgtctcaatttaggctaagacagaggcaccgagcctaacttattaactgagccgaagtagatgatcacgagccaacggagccagaattatatccaagtctttcttacttttgctacgtccagatggtctccaaaaacttatctgatgaatcatttgccattcaaccactcaatccgcggcccgacaagtggaacagtaagagattgtgtacaccaaaggccaccacggattcaggaaccagccggacccataactacagagcacgcaagcaagatcagaagcagctagcacgggcgatcgagatacgccagccaggtagaacagtgatcaacactgaggaggaacagtgtctgtctacgagcctaacgactgcgccacacgaccaaccatttgctgatcccagcttcttcagatcatgcatgatgggctgggctgatggcatgatgctcccccctagctagtaaccggccggaattcagggacggcgctgctccagatgccctaccgcttggtgccctaagctaagctagccgagcttgtcttcatgggcaattcaggggctgtaccaggctactggtactgagcaactggctgacatatatcagtcacctgaatttacactacaccagccaaccattaagatgacattcttttctgactgcaaagatgttgctactgacatcgatgcaaagctaggccaaatcatttttgcatgcattacagttgcagcgcacaataattcgcgcagtccattgatctggtccagcgttgcagaaaagcgaaggaaggcacgtatggatgaataattgagcgcgtgtccacgaggcagcaactatgatgtgctgcgcattttcacgacacgtcacattcagaacaaaaaagatgaagagcctctgttacacaagtagtagtagtagcagcagctcctccattgatttcatcagaatcgtccttgctgagttctcgatctcattctcacccgttttcggtgcgccttttcgatattccagttaaagattgctccacttgcgcattgctatcttttttcgcctatggaaggaattgaagggaaatgggtagagcttcctttctggatcttctcgcatgctgccatggctgtatgtctgacgaagtaccatgatttggagggaggtcctgatccgaatgttcatgagagagattgagccgaaacatggggctccctttcccatccccccgtgttttcgctctggtcccctcccatcatattctgctcccaactacagtagtgcttaactcggaatccctgtcgacgtctcgccatacagcgtaaacagtggtatactggtatatatgaaagaagtctgattatctgacacaatcctctgttctttcttttttcagctcaaaagaactgttgcttccaagccaactgagctctgtacggtggcgataacatcacatccatcgccgttgcgtacttcaagcagttgatctgatgaggtcgccaattaaaaagatttcgatcgatcgaattcttgatcttgagattagccaaaaaggatttagctactctctaaaatagatgacaaaatgatattagagtacttcaacagactctataaaggatggctagtgaggtaggctatccaaaagtagagagcgaataaggtgggatggagagctgctaaatttgaagagtcatttacagagtctgttggagacgttttttcttcaacaatagctaaatttatctttaaaaaataatttgactaatctcttggagatgctctaacagtacgattgcatacatactcccacacatgcatacatgtatgtgggcagtgagacaattaggccttgtttagatctgaaattttttttggatttcgacactttcatttttatttgacaaacattgtccaatcatagagtaactaggcttaaaagatttaactcgcgatttacagataaactatacaattagtttttgtttctatctatatttaatgctctatgcatgtcctgtaaaatttgatgtgacggagaatcttgaaaagtttttggtttttaggtgaactaaacaaggccttactgacgagtggctacacgcctgcaccgtaaagcaagccggcccagaggattggacgttggacacgagaaatgtgagtatggaatggaggaatcaaaaacaaaggaatggaaaaaactacaggaataggatagatgtgtaatggtaaaacagaggaaagaaaaactgcaggaaatgactagttagaggtttttggaacacaggattcataacacaagaatcttaaaacatatatgattataagtgtcattattagtgctaaacgatggggcccaataaaaaaatccagcagccttctctctcctttatcatttcctagaaacaaggctcgagcggatgcgatcaggcgctggtgaggcaaaaggacggtgcagcggggtgctggcggcgcggtgaagcgttcaagcgcgagcgtcgcaggaaggcctggtgcagcgaggcttaaagcagcatgagcgagccaaacatcagcgagatctggagtggcacagcggggcggcaccgcaggcaagcactcctccgcgctccacgctagcgcgcgtgctctctctctctctctctctctagcgcgcgcgagagccctcggtcttgcacgaaaactttggccaagagtggattttaaaattcctacgttttgacgagcgaaggaaacctttccaaacggtaggtgacgtcagcaaaatacagatttggcaatcctttaaaatttctttaaaaatacttcattccaaacaggccaatggttgatcgctaaagtttcacgtctggaacgaggaggactggacgagaaaacggcaaaggaagctgccattcgcgtagcgtaggttggtgaccgaccaagggaccgggcacgagtgcgatcgaatcaacctcgcgaattcgggtgcgaaatttgtaccccacggaccacggtcccaacctgtcactctgggaccgccggggctc

SEQ ID NO: 4255 - DNA, 3836 bp, Sorghum bicolor
tcacattgtgaagtgccttagagggtatgatgtcaaaatgagcaacacatttatattactttaggcatttcctactgtgaatgcacagccaaagcatactagtttgaccaaggcaggcaatattattaaacacatcatatacctagacattcatgtgttttaaacttctattaatttgtacatttgttggtttctatggcagaatgaggcagcgctggagtcagcaacagatgctggaaagcaggcatctatcaaagaagcagacaagcattgcaaggtgatccttggaaagctgactcgtggtgccacctgcctgaagagcagcctggtggtcattgggctcgctgttgctgctggtttcgtgctatatcctgacatggacctcccagtcgagtgggagaaggtccaggcgatggtctcatcccacctgtccttctaaacatacctgtccagaatctccagatgtggatctaagttatacaagccatccaaaggggatggcttactcagcagtgaagagagctcagggggtgagaataagaggggaataggtggtagaactgaaggggtatagtttcgtgagttgccgtttttttccagcatctccaggagcagcagtgcctgggaggagatgcagtcgactttgcagagagttgggttaatcggtagactgatgggtgcaaacaaggttaagtcaaatggctgaaccagaggattaacacctttgcttttccgttctgcatctgagatgatgatagcaaacatttttggttttaaaaaatctagaatcttgaatcgtattccgtgctgtgcgtattggtaaatgtatctgttgcgtcgatcaggataacctgcgtgtgatgttgtgcccatgcctgtgtgcttttgtgatctcccttttagcaggtgtgatgtctgatgttggagcgtgaagccattttgtaatttgtttcattttcggatggttttggactgagggagatgctcgttaatttttgggtttttttatttatttgaagatttgaggaatcggtctgaatctcaagggcctgtatttgcatgtgtgatgtctgatattggagcatgaagacttttttttttggaaatctgttgcattttcagattgtttttggaggagggagattcaggtttttttatttgaggaatcgatctgaaatcttaagggcctgtatgtaatctattgtatgtaatatactgtttcttcgaggtgtagatgagaaggttttcccctttcccttgtgtcggattattatctgcagtttatatgggacttgatcagatgtcaaagattgtctatgagctagcacatcttggtgatgactaggcaaggtgaacagctagctcatcacttttgtccatgatataccgtcatgggaattgtcccgttgaaccatacggacaaaagtttggactcagataccatgaatccagacattctttccgtgtgggaaatcattcgtgggtagcaacgtgtcgagttggaagcgccgggccggctgcgaggaacgggggcggattggacaggggggtctcgtttcgccgcctgtacatacgcacatggctgtgcgttgcttttcttgactcgcgatagaatgtagtcagcgccagcacgatgctggtgattggtgcggacggtgcgcccgcccacgcgtcgagcgccaccgccccccggccgacctcctccggcgggcccagccaccgacccagcatggcaaggcaaggcagccgcacgagcgagcgagtggtcaggtcgaggtttgagtgctgttggcactatttgctgctagcctgagcagctgctccggaggccggccggcctgagtgtgctcgccactgttgcagagtgcccagtggtgtgccgcctgccctgtacaaactgctacaaagaggagtccacctgcgcccgactcgaatggcatcccgtcccctctcccacctgtcctcccccgcgccgcgtctgcttccctcgtcctcgagacatggcgccctgcgcgtccccgtccgccctcgcgctcaccgccagcacgcgggtaagtcgccggcccccaacaacggcgagaattcgccgctatcccgtagggagtatactcttcctctcgcgtcagctgtgctgtgcagctggttgatttgctgtgctctgcctctgccttgccgccgcaggtcagcagcagcctccaactgacgctggcctcgccgcggccgcggccggaggcgcgtgtgccgcgcgcgcccggcgcccagctccgcccgttgaccgcgtgctcttggccgcgccgccccttgctgcccgagctcgcggcggccggcggcggcgcccgtggtaccggcagggcgcagccgctgttccggcctcgcgcatgtacgcacccaccttcagcagttcgattttgctcgttcgaatcgaattatctgtttgaattcccctggctgaaattgaattgttggcttccaacgacagtgatgacgacgtctcagattgccagctgtgccttcaccctgggcaccgtcgccgtcctccccttctacaccctcatggtcgtcgcccccaacgccgacatcgtaagtcatcttcctccttcacacacagcttaacaacacaagacatacatggcgctctctcgtcacctcatgtcctcgtctccctgctcctgcgcgcagaccaagcgcaccgtggagagcagcgctccctacgtcgccttaggcctcctctacgcctacctgctctacctgtcctggacccccgacaccctgcgcgccatgttcgccagcaagtactggctccctgaggtactgccgctgctgttgctgcagcatcactgctaaaacagttacgcgctgtctgaatgttctgctgctgttaagatttcatacaaacgggacgatttcatctcttatccactatgcagttgccgggcatcgttaggatgtttgcgagcgagatgaccgtcgcctctgcctggatccacctcctagcagtcgacctctttgcggcaaggtcagtcaccactgaaccaaaccaagcatcagttctgcactgctgggggtgggagtgcgagggataacaaacgtgtttggatttgtaatgcaggcaggtgtaccacgacggcctcaagaacaacatcgagacgaggcattcggtctcgctgtgcctgctcttctgcccggttgggatcctggctcatgtggtgaccaaggtattgacaggggcagttggccgctcacattgatgattggaattgggtggttgtatctaggattccattgtttagctggtggattttatttgatctggatatgaataaaattggttcaaggcaccgattctttccatgtgggctcatttattccggcaactgaattcacttattgtcaggggattcctagtatctggttcatgataatcaaaccaaaccatctaaatagccgccactgaagaaaaatagagtaaatccttatgttctcagacaagccaaatattcaggcaccaacaagtgaggaaaagaattacataaaactgcactttaacttcgaggagcagcactagtttactagtgtaagtgtgtaacacctacctgtacaaattaaaatgataaaacaaagaggtttataattacaaacgcagagagaaatgaataacctctctggattctgtgcttcatcattacaaattcatgctaaatttattgaagtataggaatggaccaatccttgtaatagctatgcttctttttcattacaactgttactgtactcgtagtggtatatcatctgctttatccccatcaaagatccgattaagtatcaacgccagtctg

SEQ ID NO: 4256 - DNA, 5962 bp, Sorghum bicolor
catgatactgtgcaccatttctgttaatatagaaggaacttttcggcagaatcttagggggtgtttggtttggggtgttaaaggttaacaggtactgcagttttgtcttatttgacaattattatccaatcatggactaattaggtttaaaagattcgtctctcaaattactctccagttgtgtttttagtttcgtaaatagtctatatttagtactccatgcatgtgtccaaacattcgatgtgatgggcggtaaactttaacagggcaacccaaacggggcattactaactaaacaaaggtaaattgctgtacaccgtgctgattaagaaacccaagcagtctacgcaaaagtttaggacagcttatgtccagtgaacaagaaaattagtgctaagtgcatgttcctcacttccatcttaatactagtgcatagcatattcaggcatcatacatggtgagagcaatatgaatattgtactattttttataaagaactatattaatttaattgtttattagagcaagagatggtctctaaatgtggagacgtctgagttgagaatgtcactgttgttgcattcagaagtatattgtgaaagagcactcaacagtggtggaagtcttgcagtgaggtgctgtttctggaaagcactcttctgccactagctatgcacatttattaattgagtaatgacaactttggagagtaatactaaaaccaatttacttgaatcattaaagttctgtgtaacaaaaaaattgttatgcacacaggacatgtaactgtgtgctacttaacccatggattgtcatgccaaaatcaacatagaattgcaataagtaatatcataacatataaaatgctgtttgagataagttcattgttgcatgagtgatttagaaacttactttgtttcttactcttacagaatgcttgcctagtttctgacttaaatccacagagccttccttcatcttcacagttttggcaaacattggtaatgttaggaactgaccatcttaacattgtctcaccaaatgcaatggttcgttttacagtttcgttgaagtccatgtttatagaacggtaaggtactgaaatgctatttgaaagaaccatgcagtccaatggaagaaaatccattgattgaaaagaagataccaagtaagtgaactggctagtattgttaaggcaaaagatgggaccggcaatgttggccttatcacttggtatgaactctgctgaacaactcactaaggttgcacgttccccataaggtctatatacatcggttgatagattggtggagatgatcttctgaaaagggcacttggattctgcaagtgggacaatgattatagtaccgacactatactcgatggcaattaccttgcataagccaagatttgggtgaaccaggatggtatctgctttcgagcacactaactccataccaggtgcaccacatgatagagggctggttacaaggcggaatggaaatcggatctctggtcctccttcgctgcaactggatgctaggcacttttggaagaagctttcatcactgcttgcggtggccatggtgattccatagtagagagatgagagcaccaaagctacagcaaacaaattagacatttgtgtggcagaagaatgccagcagccagcaggcaaagcaaggttgcacctacaagatttagaaacttgttggaatcaatgaccctcaattgtttgtcgtgatggtcccacaactgtggtggaagaattctagctttgcgtcttggtgaagtgggctttcttggatatttcttgtgtagtgctgcactatagtcatcctttccacgctacagccattgactggaatggattagtcaacatatagttctattttgcctagttgggacttatctcatacaccttgatattttctatctaccactaccacccacctgtgtagataagtaaagcgtcagacttgtacttatcccacatttactacttatttgacaagacaaccatgttagacaaattaggaagccaattgaaagctggagctttggtgggctgcaaaaggactcatcccaaagcatcggccggccaactcatataactgtaagttgcctcagcaacatgagttccttacatctaggaaggaaaaaggaaaaactcaaggagaactgagatgagcagaggttgaagcatgttttcaacgaatgaaggtataaggcaaagatacgatatatgcctgcaaaagtgagttcccttgtaattatagaagaaagtcgttgataaatcttctatgatcataaaatattgacacgatttacacattacgtaggtggaaaaatctaaattttcttccttgcatcgtgtgcatcagcttgactaacagataggatgccaggcttgacttctcttcctcttccctcctgtattggtcgagccacagataattaacctcctcctttactcttgcttcaactttcttgtctgatcttgcctttgctaagcttcaatgattagctctcatgcatttcttctctccctgcatggattagccatggtttccacacttataacaaacactgaagggcaagctttttgcccttctttctcctgtgggcatcttcaagacatacgatctcctttccgtatgcaaggtgatccacaaggttgtggttttccagagtatgagctggtttgcattgatagcaaggctataattcacatcaacagtggaagatactttgtgactaacatctcctacactgactctactttctgggttgttgatgccaatttggataatagcagctgtcccattcctgcgagcaaccaacatccctatataaatggtttgcaatccgaaggcagcaccttgctggatcctgatacagtaacttgggctgcctttatcacttgttcagagatgctaagtgatgttacttccttgttcagcagttgctgtagtggtatttacaggcctgtcaattgccgaagtacgaagaattcttttgtttatgtcttcactaccacattcttcccaatggttggatacatcaagccgtcatgtagatacttgtccatgattcctttgggcagtcgacatgtcaagcgaccagataatgcaagttatgaagatattgtaaaatttatgaggaatggcttttctgttgattttccttatagcagtggatggacatatcattggatcattaacttatgcctgaaagaggcaaaggggtgagtatgagctccgtgaactgctgatttctctgtgttttaatttcctttcaaaatttaattttattgggggtgctccggtgctcaccccaattaattctgtttgatgtgctgtgacaaaacctgcagttactacaatgataaaatatctaactcaagcattgtggatcagacttttgccaccgcttttgggatcgaccttcatttcttaagatgtgtaaatgattattcataccgaactaaattattttgggctgtggtcgccatgatatctgctgtggacattgtgaagttcgtgataggtaatgagagaatttcatcattttagatcattatagctgcatccttgcatgcatcttacttaatcctgcaatcttttatctgcagtgtttggaatgctatcgaggtttgtgtttgcaccattagctgtattgaccttcctcgcctacaaatactggaaaacaaggatatctattgatgcagttgagaagtttctccaaatgcaacaagctcttagcccaacaaggtatgcctataccgacatcactgcaatcacagggcacttcagagagaagcttggccaaggaggctatggatccgtgtacaaaggcatgcttccaggtgatgtcaatgttgctgtcaaaatgttgggcaattcattgtgcaatggagacgaatttatcagtgaagtgtccaccatcggaagtatccaccatgtcaatgtagtgcgtctcgtgggattttgttcagaagaaatgaagagggctctcgtctatgagtacatgcctcgtggatctcttgataagtacatcttttcttctgagcaaagattttcctgggataagctcaatgaaatagctttaggcattgccagaggaatcaactacttgcaccaaggatgtgaaatgcagatactgcactttgacatcaaaccacacaacatccttttagacaataacttcactcctaaagttgccgacttcgggctagccaaattgtacccgagggacaacagctttgtgccggtgagcgctgcatggggaactatcgggtacatagctcccgagatgatatcccgtaatttcggtgttgtttcatgcaagtcagatgtttacagcttcgggatgctattgctggagatggctggggggcgaagaaacttagaccaacatgcagaaaggagaagccagatgtactacccagcttgggtgtataatcatctaactcggcaagaggtaggcgagatttgcgaagcttttgatatccatgaggtggagaggaagctgtgtgttgttgggttatggtgcattcagatgaaatcacatgatcgaccaacgatgagtgaggtcattgggatgcttgaagctggcgttgatggtcttcagatgcctcccgagccattcttctgtggggatgagcagaattccgtaactggtactttccgtttgtcctcggagttgagtgcaatctcagagaatgaatgaggttactaattccacaagatgaaccgccaatgtgttacaggtagctagaatctgaaaatctatattcacggttgtacttggatgatgctcaatattcttttagttgtgtggtggctagtcagatgtgggctatgctatctgatgtactaggtgttcagctaggtagttctgttgattcagttggaaagtattggcttagtaataagaaaaatggggtgatcaatgcattctcttctgctaccttgtggtgcttatggaaattgaggaatgatctttgttttcagaggatggagtggaagagtatggagatactctatcacagtatttctggcacggagcaaaactggagtatactttacacggaggacaaacgagcagctatcatggagaaaactggggatctcagatcgatggcgtggagatggttctggctgacaccatgatgttccagatggcaagtgggcggccagttatgaagctgttgatggatgatcttaattcggtgtctgctgtttagattccttttgcaatagtcctgtagagttttttgcttcagttctgttaaactcttttagctgttgtcgaggttgctctggagtttggtctttaatctcggatggtatgggaatttgtacttccatatgctgcgatcctggttgccatccaaacggaattcataagttttgggaggaatcagaacggccttgtgctgctttgctctgttcgaagttgattcacactctctgcccggcttttatgtgatgtctccaaataggtgttcttataatcattcgattagtcaagaatatagtagcaattttttgtctttcctttttactttttcataataatttacggatagtccacatgttcctcatacacaagttcatattttgtgttttaacccattcattgatgccagcaactatctgatctcaataatttacagatagtattagtgatcatcgttggggtgcaggtgcagttagccgcgtcattgatgaccaattttttctgctaccaaaagcattactccaatccaactctttgtttttttggggtgggggtggggggtataagtactccaatccactttgactgccagcacccgcagggccatatgtttcaagcaggcagttcacacttcacacagtcctacagatggtccaaagcttgtggccttgtttagttcgaaaaaaaaattgagttcggttaatatagtactttcgtt

SEQ ID NO: 4257 - DNA, 7242 bp, Sorghum bicolor
tggcatatggttccaccaaaccgtcaccctccactaccaagcagaagcgaggcccaccaatcatcgcaccatcgtcctcctcctaaccactagctttctccatcgtggacattgcaaacttgaatcctcaactaggcattcaccttccttgccatgacgttggtcgccgctgcaggctgaccaagcatgagcttccaaaacaacacctacaaggagggatgtgacaccaccggtgccaccatcgccattcctaaaggtcaaggtttttacccaaggaaaacacaacacaaaggggagagggtgtccgattgacgcttacaaggaagaaaatggtgcccgaaggtatcagtgtcatcgacccaagacggaaaaagctttcaccatcatgcctcaacctcgtgcatagtaatgcccatggcatgtccgctgcgctagccgccacctcgtttgactgagccacctagtattgttaatgccgccaatcgtagtcacgaaactcgccacaacgatgccaccaccactatggtcatagatcccaagttggtcgccaaaacagcccctccatcgccgggtagagccaccatcgaaaggagaggagagaaaggatggaggaaggccccgttgctagcatcctctcaactgtgcggcctctggcagcatgctctcgtaggagcaagaatgcacggggagggatggaggaggggctggggaaggcagcgatgccgctcatgttacccaggtggagcgacacgaggattgagaggggccgtgtaaaatgattgtttcctacatatatatgctagtgttgaaccacatgtcatgattagttagattcctcagtttttagtttctttgttttttcaaaattatttgctgaggtgggcgtcttactgtgtctttttgtactaagccatacacggactcgtatccgaaaatcactaagtactagtgctgtgtatgaaagggcattgcacaaaaaggacatgtagcttagtggttacaagagcatcagtagcaacttaggttctaggtttgactccccatgggagtgaatattctaggatttatcggtgttgtgctttaagtggtagacgacgtttctatcacaacgatacgaatgtggtaactttatcaatctcgaagattatcgatccaatctttgaagatacttatagagataagatttgtatgagtaggtttataggagtgagtgtacatacgttaaattaaaaaagggcatttaatttttgggatgagccacacgaccatagaacaaaaggtggaagtaggtggataaatggctcctactttctgccaccatgttcccggtagagtacttgtgctctacacctatacatatacccaagtaatggtgtctggaccaaaatgataggattgttgagcaccatgcaattagcatgaagggggcccacccaccactagctaaactattcatctctgctgtgctataccacctttaatttgtccactcgctcaccacatactctctcttgccaccatatatgcagttgcagtcgatctctcttctctacatacaagagcacgcagtttcatcgtcgtccttctctccatagaaacacacacctgcttcttgttcaactcgatcatctccctcccttccacgccgtactaccaccctcggcctggattattacctccatccatatatagctttgatatctctcgccgatcgattccctcctggaatccaatccgatgcggcggccaccaccaccaccaccattgccaacccaagtggcgtcctcgtgagaggttggcagcgagctacatcagcgagaagcctaggacgcgcagtatatctcggaatgtgctgtcttccaacatccgcgaagctattctccctcaccctgcccgcctatataaccatcgccatggctccccctcccaacccccaccagagctagctaatactgctacatcactactgttatcgagctcggtcgatcatcagtctagccatggtgaagttctccaagcagtttgaggggcagcttgtcccggagtggaagcatgccttcgtggactattgcctgctcaaaaaggatctgaagaggatgcagcacgcccggctgttgcttggccggcatcatgctgctgaccgttgcgaagcaggcctaaccgacacacaagaaacagccggtcatcacgcggaacgggcctctctctccctgtcccactggctcttggacaggctccctgctgctgctctcttcttcggctccaatgctcgcaacaacgatcatggggtcatacacgtacgtacgattaccaactaccaccacttgctatctagctagctgcaccatgcatgcgcccatactgtgaaccacctcacgtgaaaattaaagaatctttacttgttcgcgttgaataattaattcgtcacacacatatactactgcaggtgcaccgccggaagctgctggcggggtcggcgagcagaggcggcggcggcggcggcgacgacgagtacgagacggagctgctagagccgacgccgttggccgacgcggacgcggcagcggcgcgggagttcttcgcgcggctggacgcgcagctcaacaaggtgaaccagttctacaagagcaaggagcaggagttcttggagcgaggccggtccctgcggcggcagatggacattctcgccgacctcagcgcggccagggccagcagggacgaccccttcgtcgcctcagcctccgcctccgcctcctccggtgagtagtgtgcatgaacgcaaacctctgatcgacatcgacccgacgacgacgacgacgacgacggccatagctagctagcgtacgtgcgtgcgagcgagcgtcgtcgtgtcgcatggatggcgagagcgagagggatacgtgggacgacatgtcacgcaagcacaacgcggcgaacgggggcgcggggggtttgagtggtgaggtgactgctgactggtgaggtcaggtccaccgtccatgtcgaatgctttgcctttgcttgctttgcttgaggcgtgtgagcaaggaatcactaagcgctgcccaggaatatatggcacctctcccctttttatcgtctcgtcgtgtggggggggtgtctttagttagttgtgtctgcatttggcgcgaccacattgttgcattgttttatttcatttcatcacgactttatttagtgttgctgccttagctttttaattagaacctctttaattgagtcttttgccagtctgggcataaaatttaaaaagaaaatcatgcatggacctgatgcattcacaagtaggagtagcgaacatgagcaaaaaaaaaaaaaaactagataatagtatttacggagtataagatagataataagatctggatgcctccgtgattctacaaagataagaagcatcaaacaaaattccatgcattatttgtgctagtagatcatgactccttaaaaaggcagaattccttcctttcaataataccagtactagtagtacagagcatctatagtttatcatcgtggttcctcagtgattaaataatgatcttgagatttttttctattgaaaaatgtataatcttgagataattcctttatttcatatacatcatcctttttttttttgttcccatactactcaaaacagaagacgagtccacaaggtatgcgatgacgtcagcatcagacacggaccagctccagctgaacgagcaagaaggaaccacaccgaccaacgacaacgaccccggcgtcacggctcttgctcaagaggaccaccagcagcaggatctagaaggctctggaactttcgcggggaggccgttgagcgggtgcgggaggaagagcctgaagatcaccatccccctgaccaccccctccaggacgatctccgcgctgacggacatcctctgggacgagctcgccagcagccagtcctccaagaaatgcaaccccgacggtggcgtcgggaaacagagcgtcaacaagaccaagctccggcacgcggagaagatgatcaagcgcgccttcgtcgagctctacaagggcctgggctacctcgccacctaccggtactaagcgccgccgctcgcgcattccttcatcgttctcctgcagtcagatcatcctgggaagtgaaaacactgaatgtttgtgttttggcaatgtgcaggaacctgaacatgatggcattcgtgaagattttgaagaagttcgagaagattactgggaaacaggtcctgtccgtatatctcaaggtggtcgagacctcctacttcaacagctccgacgaggcacgtgtcctaacatacattttgttctgtcactctgtcagtctaagggtatctgctggagcactgaaactgacgactctgctcttctatccgagttcactgcaggcgctgaagctgatggacgaggtcgaggacatcttcgtccggcacttcgccggcgacaaccggcgcaaggccatgaagtacctgaggcccgcgcagcggagggactcgcacgccgccaccttcttcacggggctcacggccggctgcttcgccgcgctgttcgtgggctactgcgtcatggcgcacatggccgggatgtactactactactccaccccggcgccacggccacggccaccgcgcgcgcgcggtgtcaccgccggcggcggctttggcgactccgtgtcggtgtacatggagaccgcgtacccggtgctgagcatgttcgcgctgctgttcctgcacctgctcctctacgggtgcaacatggcggcgtggcgcaggtgccgcgtcaactacggcttcatcttcgagtcgtcgccgcggcctgccggcggcggcggggagctcgggccccgggacgtgttcctcgtctgcgccgcatccatggccgccgtcgccggcgtcatgttcgcgcacctagccctcgtgctcaggtcgggctaccaccacgcgtcgccgcacgtccaggccatccccggattcttgctcctggtgagcctctctccgtctactgcccactgctacaattattgctttccggatgctcccctcgtgtcctggctgctggagaatccaagaacatgcttccgcatatgctcctgctgcagctgctcatgatcgagaatgagaatcatgcatggaatgtgttcgatgcattgtaggtgtttctgctcctgctgttctgcccgatcaacgtcgtgtaccggtccagtcggtttcagttcctcaggatactgaggaacattgtgttgtcaccgctctacaaggtacagcatcagcagcacttgcccttgttctgttctgaccagttattctctgatacgagtccttgcatgatcttcttgggaccagactggaccaatgcacagccacagcctgattgtttctgaatatttgcaggttgtgatggtagacttcttcatggccgatcagctttgcagccaggtattacaactagtaatcggtgctataaatttcctgaatttctgtcgatcgcttgaacgaatctatagaagatgaacatctgacaacggagatggcaaaatgggcaggtgcctatgctacgaagcctggagtacctggcgtgctattacatcagtgggagctactggacgcaggagtacggctactgtaccaacaccaagcacatcagagacctggcctacgccgtctccttcctgccttactactggagagccatgcaggtaaagagttctttcatgctgcatccaagtgcctgaactcatcagtctatggactgtctgtactctgaatgtctgaaatgtgatgatatgtattgttgggtgtgcagtgcgcacggaggtggttcgacgagggggacacgagccacctggtgaacctgggcaagtacgtctccgccatgctcgccgccggcgccaaggtggcgtacgagaaggacaagagcctggcgtcgctgtcgctcctcgtcgccgtgtccagcggcgcgacggtgtaccagctgtactgggacttcgtcaaggactggggcctgctccagcccaactccaagaacccctggctcaggaacgacctcatcctcaggaggaaatccatatactacttgtcaatggtacgtccctcagctaatcacccgctgaggaaggatcatttgcagtgtcttgcagaacaaagtgcttgctcgttcagagtttcagtctgtctgtccgaccgagcgatatcaaggatcaaaacagaactctgaacacgcacgaagattagaaaaaaaaaatacagtttcaactcggtaaccaatattaaaattttcgaccataatctctagatggacgagcgtgctgtttgttctgcactagtgaagcatcacgttccagaagaaccaatggctcgagtgaaatgttctgattcctgtctgaaccttttttttgcagggactgaacctggtgctgaggcttgcttggctgcagaccgtcatccatccaaattttgggagtttggattctagggtcacttccttctttctagcggccctcgaggtgatcaggcgagggcattggaacttctacaggtaaaaaacttataatgctacaacaatctcattaattcttgaacaacaaacacatttgagagtcgaggctgaaccacatattgaaaatttcaggttggagaatgagcatctgaacaacgcaggcaagtttcgggcggtaaagacggttccactgccttttcatgaagtggacgaggactaatgcacaactactgaaccatctgaccatcgctgctagatcaaacactttgttccttcaacattctgctggatttttttcaaactcaagaggtggagaattgttcaggtccttagctgttcatgcgtgtaattcattccttcagggaatggaatggcatctctatataacccaagatgctgaaatcatttgttcgttcctagatgcgtcaaggtgtaaataagaggcaccgaatttcgcagtattctgtcggagcaagtgtgagtctttattccaaaattaaccaaaaaaaatggatacagaacatgtcaaaaaattaccacaagccacaatcaatggttcctataacaaatcccgcagataaacctcaccggcctatgatggtacagcatgaacagaaacagaggaaataattacaccatgagctggtacgctgacatatggatctctcatccctctctgcgatttaccacgctagcgatagcaaaagcgccgccatggcg

SEQ ID NO: 4258 - DNA, 6247 bp, Sorghum bicolor
gagggtgcccgtgcttctgggaccacagacgtcattgtgtgcattcgtagctgaatagttgggtgtgttagactgttagtggctgattgcaagaatgtccatgtatatttgataactaaggattgcttttttccgctgttgtacatgtttcgcctttgatgcagacagaagaagtctttctagtcattagtcaagacctaaagctactctgtgtttttaactttcctcctcccttgccactgtagacttagttggataaatttaaaaaatgattgtactaagagctacatatctttgtacccaaagggcaaaaattttggtatcttttcaacatcaatttttagtaatgaatctaatgtttacattatgctgactatctggtactgttttgtatttcttttattgtagaaaaactttgttaccatatatatagtgtagtgaaatttgaacacacattgacaagcactgttgtgcaggcaagcttctgctgatctgcatgcaattatgaactgatgattattgttgataacaggtaagtcttctttttgccatgttacagctattataagcttgcatgcgtgctctttattctcttctaatttgttatcaccctgtccttgaagtaagcatttggcaccttacaccccccccccctcctccctccgcacacagcgcacaaactcaatgaccttgtagtctgtgaacctgaactttgctttccatcctgttaatagcaccaggacatgctcaaaattgtttaggacaaatgaggcagtgattttcagatttaaatgaggaccaaaaaaaggaaacaaaaaccgggcaaaaaacgaggtgttttgggatgcaaggaatccacaaaaaaaagtgaaaatgagttctacaaactttaaataaatgatccaataaatcacgaaaataaaagagatttctgttgcatgcacacctctagaatgtgaatttctggatagccatcacggatgatgatatgtcgcatcattggtaaaaaggtttttattttattttttgttttcggaattttctacacccccctcccccccaatttttagacttattgaatccttttttttgagcttaaacatgtttcttaagctccagttatttttgtggggttccttgtgtcccaaaacatctcaggtgttctctccaaaaaaaaatgggggcgtttgagtatttgttttcctcacttgaattcaaaaatcactgccgtgtcagcccaaaactactattactgggcttaggggccaaagttaaacggaattaaaagttgggatactcaaactaaacttattagagttagggtcaaaattagagaaacaaagttgggatactcaaactaaacttattacagttaggctcaaaattagagaaactgagaaacatgaggagcggaatatggacttattcattttcttaaacctttcctcatgctcttgttgaaactaaagttactgctaatggacagatgctgtgcaagcattttagtttgaaacaaagagtattggaatatgtcaagtggtgaatatatgattctttctccttaattcatgtacatatacttctttgttgttggatcacccatgccaaatgcatctaggttctgtcaatttgaatacaccaatggcattttatactgcctttttacagtttagatttagaatatagctttgccgttgtgtctgttgtgtttcattgcttggtagaatatcacaatggcaatatccctcctttcttttccagggagtttaattgacctactggtagaagttttgctggcatgtttgttttattgactgcattatttattttgttgcagaaatgtgctgttggattttgttcacatatgaccatgggcagtcaaagatttctgcaacctgcattgcacatcttattcttactgcagtggttactaatatactgtgctagccactacatagtataacatttctgcaacgataccaacttcttttcttgtttacatggagtgcaacagagatgaggctgctagagtgaaagctcttgcagaaagaaaaatgctggacaaggattttgttggtgcaaaaaagatgattatcaaggtgcagcaactcgtcaaagaagtggatgaagttgacatttcaaaaatgttaactgtttgtgatgttcattgtgctgctggagctaaggtaaataacgaggttgattggtatggaatactgcaagtacctgtaaatgctgatgacacactgataaagaagcagtattgtaagctttcccttttgctacatccttacaagaacaagtttggaggtgcagaggcagcattcaagttagttggagaagcaaacataactcttacagaccggtcaaaacgttctgtgcatgacatgaaaagaaacaccttcagaagcattataacgagacccaatcatcagtcaccaaaaagacttgcgcggcgcctgctagatctagttctactcctgtgaatctccacaatatgcctcagcaacatcagcatcaaacctcaaatcctaaagggctgcaaacagcattttggactatttgtcctgcttgtggcatgagatatcagtactacctctcgatcttgaagaaggctttctgctgtcagaattgtttgaagccatttagtgcacatgatttgaaggaccaaggtattccttctgggacaaatcagcgatctgctggggtttggaaaaatgcaggtgcaccacagaattttacaggccctcaatcaaatggcactggtcagaaaggttggtctgccactctaggagttcatgttaatatcggttcttatcatgctaatgtaaatacaaagagggaaactgatggtaatgcaggtgggctgaaaaacaaaatgaaatctgcccgggccaccaggaatccttcaaaagctccaactgctggattgaaaaggggcaggagggtggcatttgaatctagtgagtctagcatatcagaaaccagcagcgacagtgaggaagaagttctaaaacatggtctttctgaaaatagtacagggccagctcaacaaactcgcagatctagcaggcagaagcaagaagttaggtgtaatgaggatagtgatgatggcgatgttgaagatgatgataacacggttgaggatgattttgttggctctcctgctttgaagaggttaagaagtggcctggttcacggtgattactgtactaaaacagcaaagctgaatgaaggcaccgctggccgtaatggtctgagtaactgcagtaacataaaagatacaaagaacagtggtacaccatgtgaagagaaaacttctgatggagttgagcacatgaagagagaaacaatgcatgctcgagaaaatagtgatggcaaagaagaggcttttccttctgctaatccagaatgcagttctgttagaagtcaggaccgtgactccaaacatgctggtttgtccagtggagatcgcaaaggatccatgaatgtggggcaggggcaacatacaaaatccgtgaatgcagggatccctgcaaagacaccagaggaagagaaaatcaagcataacactcatctgcctgaagttacagatgtcgatgccgatgatgataacatttgccaaacagtgtatgtatgtgctgagtcagaattctttgatttttcagaaataagattgctccaaaggttttcacatgggcagatctgggctctctacagtgatatagataaatttcccaaatattatgcattcatacagaaagtagatctcaagaatgatgaagtacaagttagatggctggatgtctgtcctcatggagaagtggtgaaaagattgtcccaagaagaacggaccattggcattggagcctttaggctttccaatgtccatgagatgatgacttacactggtacagatgccttttctcatcgtgttgaggccagatatgctggcagaaaaggcgaatatgaaatacttcctcgtcttggtgagatatgggcggtttacaaaaactggggagctggatggactgcacaggattttgaaaattgtgaatatgaactggtggagatactttgccgtactgattcctccatacaagttcagcttctgaggaaggtggatggttataagatggtatttatgtcatacagagcagagggttctgtgatgacaataaggaaggatgagtaccccaagttctctcaccagattccctgctttcgtttcacacatgaaaaaggtggcaagcttcgaggctatttggagcttgatccattatcactaccagagaaatttctctactgattcgatctgagataaaccttatcaacaacgaatctggagccttcttgtgatgaagtttctggaactgaggctcagtgaatgttaagttccacaattcaatattttttcaagtgacaatgacataagatgtctggatttaagtattagtagcactaacgttgttacggtggactcaatctgcacaacgaaggcattgtgacttttggactctttgctggatggctgtcctgcagctgcaattcacaagactagtaatttttttgtagttagcattagctgtacctatatggttttagttctggtgtaaaaactgctactttttttcctcctgtagtgtactctaaattgtagtactgtgtttgaactgtgaggtaccagcctgattaattatctgaagagttcaactggccacccctccctggaactgaaacatgaaatcgagctgtactttttagccgttcaattatctgaagagttcaattggtcatgcttgtgttgctgtgcggggacatagatgacttcctcctgcggcttatcagagcttatttctattcgcatctccctatgtataaatgttacacgtcctaattttgatatgtccatgtcttttcttgaactatgtttatttgctactacaagtattagatgagtctctgtcaaaccctttttgaattgtgttacagaattgttatgagcaggcatattagttgaatttagggttaattggatctgtgccattataactaaaccgtttttgaagcacaccattactattcgcgaaactatgccactgccattataattctttcaaaagctgaaatatgccattatatatgcctgcaacgtctatgggcccacgtgaaagtgtatggacaactttgtattttcgtatagaccaaaataatcctctcactctatctcacatacatgtgggcccaatgtgtcatcctcttcctctatcctcttcctagttcttttcatgaacgcacacacagaaccttcgtcgatttggcatggagttggaggacctgcggcctacagatccatggctggcgagtcgcctcgtcctctatcggcggcgccatcgcctcctccatcgacggcagcgccctcgcctccaccatccacggtggagccgcgcatgcccctaggctgactggtgagtcagggagccgcaccctcgacatgctgccttgggccagtagctgcatcagggacccgcgaccagagaggagggaggctcgacgcggacgcccgcctgcgcactcgatcggcggcggcgcagctagctggacgcggatgctcgcctgcgtgctcggccgacggtggcgtggcagtccgcttgcacactcgctcgctccacgtcagagatggagaagacaggatgctcgacggggagcacgcccgcgctcggctagctgcgacacggatggcttgacgcggacacccccacgcgctcggtgcagcagcacgcctgcgcgcttgctagctcccggagatggagaagacaagaggaaggttgtggggaagaaagctgacgagtgggccccttgtgtcggtgagtgtgagagagaagagaaaggaggtaattttgtctatattgttatatatggtgccctctgtacctctaagactaggcccaaatcgtctccaggtgtatataatggcgtatctcaaacatatgaaaagttccaatggcagtggcatagtttcgcaaatagtaatggtacacttcaaaaatggtaaagttacagtggcacagatccactgaaacatgaagaaacgaccaagctaaatacagaaatgttagaagaagacaaagatgctttcgtgactagtgttaacaccatgttgaggattgtgatgaatttggtgaccaagaagcagaagactgatgaccaaaagtggctggaaggcaatgatggaagtaatagtaca

SEQ ID NO: 4259 - DNA, 5114 bp, Sorghum bicolor
actttaaagtagtcgtcgtattttggattctggattctttgggaactaaacgctcgctaagtgcctcacatcgagcaagcattgcaacggctaccggagggggacctcgtctaaaatggtttcttatcctatggtgcattaggtgcaaaccgtgcatctatcttgcaccaaaactaacattgtctccaaacagaccgaagcgagattccatatgacacatgtcatctaggagttccattggatgcgtccaaattaatttcttaacatatggtacgttccgttccatgtaaactgtgcaactatcttgcatcaagattagcactatatccgaacagaccaaatcgagcctccacttgatcctcttcaactacgagtaccatcgggtgcgtctaaaatggtttcttagcctatggtgcattaggcgtaaaccatgcatatatcttctaccaaaactaacactgtctctaaacgaaccgaagcaagattccatatgacacacgttatcaaggagttatatcaggtgcgtcctaattaatttctgagcatatcatatgttccatgcaaaccatgcatctatcttgcatcatgattagcactatctccaaacagaccaaaccgagctgtcacatcggtcgggtgcgtccaaaatggtatggtgcattactccgggggcgcacattgctttcaaaaacattttttttcccgatcaggttgtgaaaggatgaactgatccgatttccgatccggagaggcctcggttccgattccgctggaaatccgtttactgtcgatcgggcacgccacgcacatcaagggaacagaccaagttcgagatgaacccatcgtcagacacgaccgtcgacgactacctcaacaggttgctctgaatgcatgtaaaccgtgcgcggacttttagagatgtatggagtgcacaaagatcacgcatcagcaagtcccggtgacgctttccttggatgtggtgagcgtgtgtgtgatcgtgggtgatgatcgatgccagcaaagctatttgaactgctttcttcccatgtttggggctgcagcgtagctagagtatatttatttaatgtttactcttattaaataaggttgcagtatcccttactctctctatccctaagggtgtccccaatagtttccaaatagctagagaagaattctattagctatcaaaaaaagagatcaaatagctagtctagcacgatctcttaaaaatactctctcacagctcacatagctctcgttttttttttcattttagccttatttagctagctatttttaaattgccattgagagcgccctaaatatccgttgttgttgatatgtgtgctataaatttgacttgacttataaaaaatatatataacatttgtatctctaaaaactttttagccctatttaataaggacaaaaagacaaaattatactctaattaatcacttttttgttacacactaaatattgtcctaaatgactttcttctttactagtgagcgagcaaggaaggacccatgcgtgcgtgcgagcaagtaaggaaaggaagggatgggaatggccgatacgtggagggtaaccgaagagtttaggggcattcatgtccaaaacgtagttaacggatctaaaacgatcttaattgtgcaaatgatatgagcacatagaaagtcacgattaaaattatagttcgctaatttattatgagagaaaaataatgttagtacggcttaaaaaaataagtgaacagactcgtacaagatgtttattcattgaaaaaataacaatatcggaggtgaccgataaatgggtttagcggaaagtttatcggtcaaagtaaaaataaataaatagttcaatttctctagaaaattgcataaacggtcaaggcatttaatatcaagaactggcacataaaagtattgatacaagagaatagcacactttcatgtggatcagctgcatgtctgcacggtgtttctgtgcggatggtccacccgagggatgccgggaacatcattgtcaaagggaccggcctcagtcctatctcctcgctgggccacgtcccggggctgccgtcagccagtgcagctcacgagtcatctaggatggcgtcggagaagagcaagatcctagtggtcggcgccacaggccacctcggcaggcacgtcgtggcggcgagcgcgcggcagggccaccccaccttggcgctggtcagggacaccgccccctccgacgcggccaaggcggcgctgctccagagcttccaggacgccggcgtgacgctcgtgaagggcgacctccacgaccaggctagcctgctcagcgccgtcgggctgcggacgtggtctggtcatctccacggtcggggcgccgcagatcgctgaccagaccaggctcatcgacgccatcaaggaggccggcaacgtcaaggtacaagtacaacactgtagtttttcccccaaattgacagagaatttcgcgaattcaacgttttcgttggtgatgaagaaaagccagccagtagctaagcttggtagatcatagtttgttctttgactgacctacggatgcattgttatacaaacgcagaggttcatcccgtcggagttcggccttgacgccgaccgctcggccgccgtggagccgacgaggtccatgttcgtcacggccaaggcggcgatccgccgcgccgtcgaggcagcgggcgtcccctacacgtacgtgtggacgggctacttcttcggctacgggctgcccggcatcgggcaggtgctggcccaagcaccacccgtcgacaaggccgtcgtcctcggcgacggcgacaccgatgtgtcgttcgtcgacgagggggacatcggaacctacacggtgctggccgccgacgacccgcgcgcggtgaacaggacgctgtacgtcaagccgccggccaacacgctgtcgcacaacgagctactggcgctctgggagaagaagaccggcaaaacgttccagcgggtgcatctcgccgaggacgccgtcctcaagcagatccaaggtcagacactctgactctgacacctttgatcaatatgaaataaattcgatatgtacaatttttaaacctgcaagttggattttcaacgttaaagtacgaaaccgaataacatgcagcctctgtctgctaaaaccaaacaaatttggttccatggttagtttcaaaagagtttttttgtttttttaataataaaattcttgtttatgtctaaaaatttataattaatttgttttagtctgagaaatacaaaagtagtataagttttatctaaaaaatgttagatatctattggtgctctatttagagttatttagatcgtactagttttaaataaataataaacatgagtacgtacgagcaataaatcaatagaacttgaaataaatcagttccaaataattatatatagatcataaacatgtagataatatttttagaaagtagtacttattttatgttttatgatttcaaaattattgatgaattttgatatagtagattagattattattattattggaaaatataaaaccaccttaaaactagtaagaggaccaaaattttctagttttaaccacgggaggatgtccgttacatggtttcttagttcaaggttgaaaatcagactaccatgcaagttaaaggttaaaaaatgtattttaccttaataaattatattctctctatttcaaaccataaatcgtacatttaagtttatactaagctaaatttctttatctttaaaaaacttaatttcatattattgaaaataaatacactatcataatatatttaattaataaatcatgtttataatgttgtaaccgaacgtcttgctggtcttctcaccatatgtaaccaagcaacagtcatttgttgttcctgatcaatgaatttggtggggaagtgctcctcccgcccgtttatgtcaaaaagaaaatgtgtattttttttataaacttgatcaaatcttgagaaacttactgataacaaaattaaaactatttatagtttagaacagggagtacgtattttaattaacttatggactttgtcgatcgatagcttttaaaatctcagttttgtaagcattaaaagcatacatgtaaatctattttgaaaaataatttcacaattccatacattcacgagacattatcctatattctaactacaacatgtcaatcacgtatatatatgtcctactgataaatcctcaaacatctatctaaatactggtggacaccgatcattccatctatcatctatgggccaacccaacgattttcatcagcagactggttctagctgtgaactgatcactgaactgatatgataactgataaccaatatactgaactgatatgataactgataaccaagaggttaacaattctgcagaacttccgatcccgctggacattctactgtcaattgggcatgcggtgtacatcaagggggaacataagttcaagatcgaccaatcgtcggcggcggacgccggcgagctgtacccggacgtgaagtacaccacggtcgacgattacctcaacaggttactctgaacgtgacctgcaggggtctccatcgagtgcgcaccaatcaccaattggaaagacatttggtggatcttctaaagagatcacatttttgaaacccaagctcatcactttctgctttgcaaacaagatcctcaccgtaactacaagcaaccatggaggaggacgatggatcaggggactcagggtgtactgtgtacactaagcttcattcatttgcttattcaaatttctgtgacgtgcaagtacttgggcgttgcattgtccacttacaagctaagacgtagtagtgacgactgacgagcagttccttattgatgtcgtgggcagaaggattccgggatggaaagagaaccttcttaatttggcggggagaacgacgctcgtcagatcgacgttgttgtctgcaatctcgatacacctatctatcgtggtttgcctttcggctgggtacacctaagtcccctcttttctgtcaaatctgcatatgaatttgcggtaaaaaa

SEQ ID NO: 4260 - DNA, 8042 bp, Sorghum bicolor
ttagtaattatgatggcaagatcaatgttgataagtgttaattgattagttcatattttgcatgccaattaggataatagtaattaacatattttatttgctattagcgactatcatgacagaattagtgttagtgcatattattagtgtataattagccgatatttttaaataatataaatattagtcaaatattctcattctatccactctcatccatctaaccaaacagaaaaatggcttgccctatccattgaaccaacaagaagcatggatatccatcccaaaaacatattccacccaccccttgtttctgtcatgatccgatgtagcttgtgattacttctcacacatatcatgtttgtttgtcgatatggaatttcaaatataaaagatgagtatatttgataaaaaaatctttacttgtcattatgagttttatgaccatgttctaatatgctaatgcgtagaataacatagaatggttatatagtgtacatttcatatttaatcacaacacctaaaaaaggatcaaatgtttaaaaacaataaaacaaagttaaatgttgatggaggctatttcatgcccataatcttaaactgattaaagtgtaaggtcttgtttgatgccgttttggcttcggcttcgccagtagctctaatgttgtagctggaggagccacaccaaacatgcacacaagaaaaacgtgttttggtgtcgagtagaggagccacatggacacgagaaaaaacatttttctaggtgttaagtagagataccaaagctatttagatgtacgagtgtggagctatattttggtgattcggccttggacaagttaggctccaatgtgccaaacaggctctaacacggtcacgtctttgaaaacaaaaataagggattttactaaattttaggtgctaaattttagttttatttcaagcgatgttattgcataaagttatagtttttagtttgttacatttcccgaacacaatctatattctttttggttccgagaataaaaaaacccgttagacaaaatcataagcccgataaaatctatatgcgttggcacaaagataatttaacaatgaacaattatttctatagtcagactatgccaaaaaatttgatatggtatgacacaaaaacaaacaataaattacaaaagtaacaatttacttatactaattagtaatattgttaccaaaggctatcttaaaatttagacacggagtacacgagaagtgcagaaataaaccttaccgacagcgacaagtccccagcgagaatggcaagtgaaccacgcgctcggacggaccagccaaaccaaactcgccgaaccgtaccatacgtgctgcgtggtggatctgctcgtcatgcggtattgcattagggacaaaaccggaattctgcaagtccgaggggactcagtcgacttgacgcgagagggttttcccctcctcctcctccgtcttctctctcctcccgcgattctattagtactatactacgccgctaataatcagtcgtgcggcatcgtcggcgaccttgccgccggcgacgcggttacacaactaacccggggcttttgagctacagccttctctcgtggcttgtgggggagggcatatccccttcctccctccctcttcgtcgtcgctgccctctgctgcgactggactggcgtggagtggagatccatccacccgcacttgccacgatctcttccttcccgtgccggtaaccgctccccgaggttacttggacggattgctctgggggactggctttctttctggcagcctaatttaaatcttcctctctcaccattcagttggtcgcggatttgcttgctctggtgcgtgcgccgcccggcaacccaatcctggttgggttcgatttgcttcgccttcgttcgtcttcagcgcttgagatcagtttaaccggcgcggtttggttgtccgaaggcttctagagtccaagtgggacccccatgccccaagtgaagtccggctacgatggcgccggcggggactacattaagtggatgtgcggcgccgccggcgggcgtccgggcggcgccatgacccacctccagcgcggcgtcggctccctcgttcgtgacatcggcgacccctgcctcaacccctccccagttaaggttgctattggcccttatagtaaatcacttctgctgtttaatactactagtatactacgactactacctattgtttgataggtattgatactccatgccggtgccgatgcgaatgtatctcttgctcccttgtcagtggctgcttgtgtgatgatcattcttataaaggaatggattgatgacattcccataatggcactaatcacattttgcatagtgatagctcaatgttactatttggtaatcactgtcaacaggggcgaagccacgttgtgttaccgtggtgcactggcaccagggtgcaccaaaaatttgttagtaaattcactaatactcaccatgtaatatgagaaaaattcatttgttgcttgagtggtgcaccaccataacattgatgatagcctcgcccctgtctgtcaatgttatagatgcgcctagagtagtagagtttgcagtcttctttttgttgttgagttaatgcgtgtattgcctatatttagtattttccgatgacactattgagacagcatgccttgtttactatagcatttgtgctgcttgtagagccaccggtcacttacaaagtttattgtggcataagatctgtggcagtgtaaaatcttccctaaattctcattgctatttaggatgctgtaaatgttctcccattcatctgtaaccccaaatggactctgttgtgggaacaacgttgcactcccattgtccctttattaaataacatatttgaatatgaattccaatttttcaaggagggcacatcctgaacacaactactaatcttgaatcagaaagctgaggatggcaacactatccaccatccaattaaattacaacctagtgaactacaaccataataaaagaatggtcacatcaatttggctacaagagtacatgaaactattagcaagtagcaacacatgtcacttcatattaacttctctcctgcactactgacaaccttttcttctatctgcaactgtacagggaaacagaatgctcaaaccagaaagatggcacgcatgttttgacagtgatgggaaggctatatgtttccgtaaagcccttaaattcattgtcttaggagtgagttaactatatacttgttatttcaggaacttaccttttcatgttctttttgttgttttcggccttcaagctttagactcgcacatactagtatcagctctatagctagggtcattttttgctttctctgggtcatttggtcaactcaactaatttaattgaactaatctggatttaaaggcaaggaaatgggaatatgggataaaattgaactaataaattgactcaaatctaccaattggtgttgccatttgcatcagcggatttttgttatcagcaaaaggatgaattatgaaaatgcatgaagatggccgtgtaataagttctatctccattaatgatgtgcagggcgtggatccttctattcgagcagaagtttgggaatttcttattggctgctatgccttaagtagcacgtcggagtataggggaaaactaagagctgctcgaaggtttgaagtttttcttttcttttttcgtaatacgattttctaattttgttttctaaaaagaatcctgtggtaggcatcagtctggttacttttttattggtaaataaactgctgtagctaaagttccctagcctcttcatttttatgttcacctatatatgaaatataagctttagtgccaaattagtgttcgccttacatttacagttaacgcagaacataggaaactgtagtaaaaaaaatgagttaccatgcttgcatggtctctggattatgtcttgaccctttgaactggtttccaagatagtcccattttgcacatatttctccttccattttccttaatactacctcatgtgcacactctttaggggataaagtggttttttatcaatccaccctgtttgttttcttgaaactgtagattgtccttctgacttctgtgacccttttgatgtaactctctcaactctattttattcatattctttgctattgtcctaatgttttcggaacacttccctttctctcggccccacttttgattagtattattgattttaaccttgggggctagtgttttcctttgtggttctacacctgtgtgcattattggaaatcttgaaggctctaactttatgccttctttcctttctatctagggagaaatatcgttatttaattaagcaatgccagagcatgcatacaagcatcggtacaggtgagcttgcatactctgttggatcaaagctgatggatgtcaggaccttgcccaaagaaactgaagctggagaagtcagcacaagtcagcaagctgaacatcaagtgccttgcagttcagcagaaaattcgaattcgatttatgggtctggtggcacaactcagcctcagaaaaggaaaatttgtagtaaatcagctgaaacagttggtttcaatgaacataatgatagctctagatgttctggagattatgatgacattggtgaaccaaggtatgacagtgaggccttcatcgattttccttccctaactggtacaaacttgttcgcaaatggtgatggggatagcaatggagttgaagaaaatcattgcagtttcttggttcctgaagataggataaggcctcgtgatgaacgcatgcacagcttccagatcaataataacatagatctcataatagagtcaaatacattatccagtgatatatttcgacctagcagcagtgactcagccatctttcactcggatgcgtataagcatgatagatggttagacaatactagctatagtaaagaaattacagattccttgaggatatctgatgcaccagaagcagatttagttgatggaaccaaatcaaatggttcaatagctgacaaagatagagtctctgaatggctttggacactgcatcgaattggtatgtttatattcttttcacacaattgcagtggtctcttctgattgtattttaattagggataaaaaaaacttttgatgcagtggttgatgtggtgagaacagatagccaccttgatttctatggagaatcaaggaatatggctagaatgtctgatatacttgctgtttatgcatgggttgatccttccactgggtactgtcaaggtttgcatatttcaaggagccttattttgtactatcatttgattattcttgatgtatctaaaattctaattctaaatacataaatgaattataggtatgagtgatctgctgtcaccttttgttgtcatatacgaggatgatgcggatgccttttggtgctttgagatgctactgagaaggatggtaacttgcatctgacatgaattacagtataatgtccatttatttggtcttcacattagtataatcatgatggattatgtaaatctctgctgctcagcgtgaaaatttccagatggaggggccaacaggagttatgaagcaattgcaagcattgtggaagatcatggaactgacagatgttgaattatttgaacatttgtcagcaattggtgctgaaagccttcattttgcttttcggatgctgctagtgctttttcgtcgagagctgtcttttgaggaatcacttttgatgtgggaggtctggatcttcaagatatctgtcttattttggacattttgtggtgaactagttgtcgcatggagtagatgaaatatggtgaatctttaattgtagttttgtacttaaaatcttcaaaaggcctaaatagttcactaagaagatagctttgtagcaatatagctacagtaatttacttgaactacataacgtgaagatattgtatgtgagtaatatatttggtaccacacatagccacaatgaaatggccttttaaaatggctattttatttcaatgcttatattattgaatcagaatcttgttatgttagacaactggtgttcttgtcttcagatgatgtgggctgctgattttgatgaagaagcagtcaggcgtttagaagagaactgtctagaaccattgctagtagatctgagcaatggcttgtcatgtgaagtcaaagaagtgcatcggaccaacagttccacaagaagaaaacccaagaccaggaaatcccatcttagaaatggtgaaatatgtggagcttgccaccctggaatgaaatccagtacaagaaatcatctctgtggcttgtcaggtgctacaatatgggcaaggcctcagatgccacatccaagtgcaaatgtgctaccaaagagtggagattacgaactgcctatattctgtgtggcggcaatcttgataatcaatcgccacaagataataagagggactcgctcaatagatgatgcaatcaaggcaagttccaactgctaattactccattttatttaagttattgcctttgtgtaatggctagttatagttatttattttcatgggtttcctttagatgttcaatgataatgtgctcaaaataaatgtaaaaagatgcgtacgcttggccatcaagctgaggaagaagtacttgtacaaggtaatttctttttttattatatatatacatacatttagtagcttttcattcgtttagttctttcttccaaacatctgtgctgtccgctttaaggttggtttctgagtgttctacctccatcttttaagtgcagtcattgaaaggaggctctagtgatgataaagaaagttgaagagcctgcatttcccatgtagggaaaaaaaaactagatatttctccatcatgcattgctatctaggtgtggtggagcagtattgacctgaagtctggtacatctccaagatccggcagtattcaggattgcaaggtatgctgtgcatcctctcaccttgtcagactggctggccaggcaatggttccgctataggtgggactgggagtatatgggatggcagatggttgacgtatctgttttgccttgtttcaggaaatctgtacatattatacttgaaaacaacagatgaagctgtggaagtaaagaaaagagatcaattccaccgaatgtctgtatttctggtgttgtcattgtttttactgttcccatttggcagggtcccatactcccatgtcctctatgattttgtatttatcgatctcgaggtttgagtggggtgtagcctgttcatggcatgccaaccacgcctaataagaatgaaaagaaagaggtagatttgtacacaatatgagcggagcaatgcattctttggagcaagacacgtgttgaaacggtgatgtttttccaacctttgtatataaacccaaatgagccattttcttctggcatgcgatcctatcgatgttttaaacagaactaccttccctttggtgttggtgtcagtccagtgagatgtgcacagaatgatgccgcaaaattagttgagcatacacgaagtgtttttttttttgttttttgaggggagattttttgagcatcgcgaagtgagtgtgccatccacagaatttgtttcgcgcggtctttcggcaaggcccaaagccttctattgttcaaaggaaaaagtccattttttcctttttcaacttatacgaaagtccatttttcttcatgaattctaaaatcggtaaatcatcttccttaatttttaaaaccatgtgttttacttccctagcctggttgtaagcggttttcaaggtggttttgtcttttgtttttttatttattttggctatatctttgaaaaatcatagtaaatcacaaaaaaattataaaatagacaattcaattttgttgaactccacatgagtagatctatatggtgtacatataacatag

SEQ ID NO: 4261 - DNA, 6089 bp, Sorghum bicolor
tgagaatggagagaaaatgaatgtgattggctaaaaatttattctgtaggaactatcaattgggaccatggtttctatatatagtatctataaaaattaataggtgtataaactgcatgtagtttgactaagggaagctccccggctttcctcccatcggtggcgcagggccagtgggctggcgacgcggggcctcctcccatgggcagcgtaaaggacgagcgagcgacgcggggcgaggtgtggtgtcaagcgacacagagaaggaagaagaagaagatgatgatgggctgacagatggtccccatgtgacatttctcatcatttgctcttgaaccaaacaaggtactggattggatctaccctatcaaccaaacagaagataggttcaacccaatcttaaaaaaactaggtcaggtctaacctatcctacatggtcccagaactaaacacatgcttataaaaccgtcagcgctctctaattccacagttgtgcatgatggagtgtgatgactatcgttttgaattgatcgaaaatggagtgctccttaagctattgtagcccatggtaaaccttaagtccttgacaaaaggaaaattaagctcctaattctgagcaaagttgttctcttgtgtgatgtatattataatcaattaatcattattgtctctaactcgtatgagaagtaaaatccagaaatttatgctgaatcccattataaactccctttcaaaaaaacacttcttttgtcaatgctagccgaacaataaaaatggatgaatctaaggcaattgcatcctaccaaagaaggtttcatctagtcacagtgtgttgtatgaacaaaattcatataatggtttggtcgatattaattttttagtctttttaccaatgtcagaataagaacaaacttatctatatatacactatgtacctagaaaagccaaaacaacttacaatttgaaattaagcgaatatcttaatttttctctgtcttatcatcaaattggtgtcaagtttcagcatagcaatcaatttgtgtaattggtaatgcttccaaacaatttatgcattttttttggttctcgttggattttcagtaacaattgcgattacatatgattctgtcatctgatagccgagtgccgaaggtccagggagtcagcatccgagaaatacgaaatgaattatacacccgttgtccgttgatgcttttatgcaaatgcatgtatgtaccgaacttgacaacgatatcatgtcctcatccttctctctttccttgaacgatgtcacggctgctccttgcaagtgggatggatctttgtttgcaaatattagaaattatcaaaaaaaaaaaaaaggtttggatcaaagatttccagtgtacgtgtgcaagtgggatggacctttgttttcataggagcgaggacccagggcgagggttgtcacttgtgtgggctaagaaatcaccgtccgaatacaatgaaccttcgagaagcggatcgggaaaaaatattaaaaaaatcgccaaaaaatagcttaacgtatgaggacttgtgaaagaaacgcagaaaggtacccctgatgaagaaaggggaagtaataaaagatgaaaacaggagcaactgaaacagacaaataaatgagacttttttttaacaaagaaaaggttcgaacggcaggcaaattatccttttgcgaaaatatgtgcagcgcgatggggctatgaaagagccatggatggatttagtctggatcaagtttgttatacagtacaacgattacaaaaagctgaataatttcaattctgaaacggccatgaatttgcgcttttcttttgtgttgagcagaggccatgaatttgctgacaaacagtcgtctcctccccaattttttttcggttccaacttccaagaaagatacgagctggaatggggcccaccggcgcgtgctagggatatttgtgctcggccggtcgctagcccaaagggcagggccattttgacttgtgaccccataacgaaacgctgcagccactccactcggcccacacccactccgccagccactctaccagcggatccaccccatgtgcagcggcgagcctctaccagccagcctactcgggacctcgtagtcgcagtagcccccgaatcacgcgcacctttaccgcacgccgagaaggatgtcgtcgtggtcgtcgccctcagccgccgccgccgccaacacgggcgcccgattcggccccttcccttgccgagcgctgcggctcgcgccgtatccgtcgctcgcccggggagcccccgcctcgccgccgctcgtcctcaggtcccacccccacccgggcggccgtggccatggcctcctcgcgcgcaccggcggctcctctccctcctcgcggtgccgcgccgtcgccgccgaggtcgagggcctcaacatcgccgacaacgtcacccaggtcacacacacacagccttgggcgcgtgcctaccgtaccgtttggttcatggtccattccttcgtttccgtagcatattgggtagctgcttaggtggtgggattacatatgttaggacttattaagtaagagcaggcagtgggactgcgaggatcctgttttcttgctgatggcgctgctttgatcaatagacgccacacacgtagtagcaataagaagggtactacatcaacatttttttttttgttctgacgattgactgtccaatcgcagctcatcggcaagacaccaatggtgtatctcaacaacgtcgtcaagggctcggtcgccaatgttgctgctaagctcgagattatggagccctgttgtagtgtcaaggacaggtatcctttgtcttcctctccttcaattggcaaggagataggagattggccttttggttatagctaaacacttccaaaccccgtttggtttcaggatagggtacagtatgataaatgatgctgaagagaggggcttgattactcctggaaaggtgatttgtaagcatagacacattttggcttcattcacatatttccttgcttagttatactgatatgagtataattgtcaaagtaatttaataatttatactcataactgaaacaagagtactgaccaaatttgaggacacgtgcccaatgtggaattggtgcatagagctagccgcaggtgccttagtgatgtttctgaccagtgttgaagataaaatcatgacaaacagcgtctcattctgcctttccttgtaccctggatgacttgtttccctgtcccatgtttctgcgcagagtgttttggtggaagcaacaagtggaaatacaggcatcggtcttgcctttattgctgcatccaaaggatataagttgatattaacaatgccttcatcaatgagcatggagagaagagtcctactcagagcatttggtgccgaacttgtccttactgatgctgcaaaagggatgaaaggggccgtagataaggctacagagattttaaataagacacctaactcttacatgcttcaacagtttgataaccctgccaaccctaaggtaatggagagaaccaaaccgtgtggctctacctatatgtgcactctgtttctaacctacctgcccattgtctgtcttcatatttttttcaaacaggtacattatgagactaccggtccagagatctgggaggattcaaaggggaaggtagatatattcattggtggaattggaacaggggggacaatatctggtgctggccgtttcttaaaggagaaaaatcctggaattaaggtttctttacatttcgctcaacaaaatctcctctgttatatgtgctttgtagtccttatcactatatatggtcacctgtatttaggttattggtattgagccttctgaaagtaacatactctccggtggaaaacctggtatgtttgtgagtccttttgtacctgtcaaacttttggtcctttccttacaagttgtaactgttatccacttttgtaggtccacataagattcagggaattggcgcagggtttgttccaaggaacttggatagcgatattcttgatgaagtaattgaggtatgagcttaaaccagtgttatatttgttgagtataatctgacatttttaacacaaaagaatgaaacaaagtcaattgtcttgtcaaaatgaacttacctgtttctgctattgcactgtatctgcatatgccatagaacagtatttattaaagtatattcacctaagctacataactacattggtatggttctttccttggagtagggtaacaatcctatcatttcactctgccttgtacagaaaagttgtgtggattgttacagttacagggttatgtttgttcctctttatttctactagtttgtgccttattgtttatgttgcagatatcaagtgatgaagctgttgagacagcaaaacagctggctgttcaggaaggattactggtatcataatttgaaattttgcttctctttgtattgtgcctaggacattgttttgacatatcattgttttttgagacatcgtccctgatttgcaagcattcatatttttagtgctggcaggtcatgaggcaagacaagcctgctaatgtcctccttttcccccttgtgtttctatttaagtgcatgcactcagcttctcaaatatgtggatagaatcaatttgggggcaccattttttagccttaccttatgtatttattaaaaaatagtatttttagtggctaacttgttcaaacctgatattttgttcttaagaccagagggttttcctgtcatttttcactgttatattaaaagtaaacacaagtagaacagtgggaattagctagcaagatctgtgacagtatatgaacttaggaactaacaaagccatcttcaaggaatgttgcgcttggtagttttgtttgatgtacagccaagagcatcgatttttcttttgaaatgaaactgagaattcttgtgccgtataaagatgagtgaatactgtgtaggtgggaatctcctctggagcagctgccgccgctgccataaaggttgccaaaagaccagaaaatgctggaaagctgatagtggcaagtgcagaaatgccctctcttctataacccttttgtgaatactgttacattacatgaaatatggatgttgagtgcacccagattattgatttatattctcatatcattttggttcaggttgtgtttccgagctttggcgagaggtacctttcaactgtcctctatcagtccataagagaagaatgcgaaaacatgcagcctgagccatgaggaagccgtcactttaaacagcataataaatgtttctaaaataagatgtgtggccagcatcggtgtgctccacttgatatcatttggccatgcccacgctatccttttggctctatgaccggaactatacaggcgtgtgagaaatatccatgactctcccaactgctttccacacttcttaattgtctatacgattcaagctgatttgattggtatttgtaaacaatttgtccttgaatctttgaagtcaaacaaagtcagttggccgaatcagctggatttgttatacacgttattttttttttctggggggggggggggggggggggggtgcgtgtcgctatcacagcattatgcatctcaaacaagtgtcaaatgatgcaataaggatgatgtatctcagcgttatgcatctgatttttttttttgacaagtttgcatctgaatgttggcatatggcaagcacgacaaagcgtgacggaaggtaacagctagtgtgcaatcgtgtgcatgtccatttctgcgcatttttcccccttgtgataatggtgacatggaggctgaactgctgctgaagtgtcgtttcttctgttgaatgatgtaacgtggaaaaaaaatccagaatgttatgggtatgcctttacctggctgagatgcaacacatgtgaagtcttttatgtgagcttggaaatatgtacgatccggatactcatgtcatggtgcttggatttctgttgttttcccatgtatgtactaatatatatgtatataa

SEQ ID NO: 4262 - DNA, 3421 bp, Sorghum bicolor
aggtttagaccttgtttggatgtagtcggattcgcatcactccacatgtattggagtggattggagtgaaacttgaactaaatttcaccccaatacactccaacacatgtggattgagatgaatccgacaacatccaaacaaagccttaaggtttgcacgctgctcaaagctggtctgatgttacttatacacagctaatacgttggatttggtcgcattagataatgcaagtttattgcccaagctgatgcgcacatacaaaaaaaaatatgtttattatctcatgtacttctactagaaatatgagatcttaactaaaagatgaaggtacatgaatcaaaatataaattaccaaatataattttattaaatatggtttgtctgtgcagaacaaccaaataccaagagattacatatgcttatactagctagcttaggttatactgcgcaagaacctaatacaggctaaagctaatacaagcaaccaatcagacttagaaagaacctcgttttcctctgtgtcagtcggggtgcacataagagaagactcctggctagcaaataaaccctactatacacatactatgtaacgacgctaaccatactcaacaccacttctcacattgccactgcctaagtacgtcatctggaagcctaactagctccaaggacggcgacagccagacaatcctcctacacaccactatgcatggcattttttctactcatcaccaccttcattgcttcttgctccagagtgacaaaatcagtgttgcattcagttgaatccatgcgtgggtgcctcgcgtacaactacgatcatggatggtaccgttcttgatgatcgacttggtggcggtgctttcctctccacctccgtgcaatgtgttggttgcagcggcttaattgggcttctctttgtgtagtgtaggtagtccctggcgccttcatccatatgcttgtccctgcagggcttgtccttgtatcgtgtggttatctttgccagaagcgcaatccggtgacccagtcatgcgtgacatgactagcaataggcgcttatggcctcgatgtttggcaatggtgtggtatggagcgcccttccattgttttcgagctttggatgttatgtccctagtgtgtggtgatgacatggtataggacatgctttgtcaaccctataggctttggctgttatgtccctagtgtgtggtgatgacctggtattggatttgtctctcatatctacattatggaacaagccacaaaaggacgattactcaagctacgatttaaagattttgaatttcttactttagtttgattgatgcatgttttcctttggtacatcaaattttttgatgtcctagctatactatatgttttattgttgagacatgtggtatcacttttataataattactactgcagaaataattcatagcaacgccttattttttttagtagtggcgactcacgagccgtcattaatacagtgtctacaaaataatttctagaggcggcttaaatcaccagtcgtcctacaaacgatttctaggaatggcttagatcatcagccgtcttgtacaaatctttatatagagacattatgatttgtagcgcttgtttgttaggggcggctagcccagccgcctctatagtgccggcgttgttcgatgcatctttaattagaagaaagtacacatgtacaagaaagtccgttagctcttgcaacaattatctttccttggtcaaacccaaccatggacaaactgacttagttgacgattctggtccaagatccaaaaaggtcattatcattatcaggtcggcatgtggccaccaacaattcaagcctgacctagttgacttcaaattcggaaaagtgtgcatttcaacgtagacgctggagcacacagcagtattcccagagagatggccagtagcagttccctatataaagagaccgccagccggcagcttgcattggcgaagacaccaccatttcacattgccgtggtcatcgagatcagatcgatcgagtcagctcaaggggtgaagcaggcatggctgcatccagattctacgtcacctgcgccctcctcctgatcggtaaatccgcgcaatcctgtatgatagaactactcagattaaaggcatagatagatagatagatagatagatagatagatagatagatagatagatagatagatagatagatagatagatagatagatagatagatagatagatagatagatagactaatgagcggggaaaccatgtctttaactttaatttcaattgaaactacgatgtgcgtgtgtgaccgcaggtgtcgtgctgctggggcagcaggggatagagggcgccgttgcctgcccccagtactgcctcgaagtggactacgtgacctgcccgtcgtccggctccgagaagctcccggcgaggtgcaactgctgcctggcgcccaaaggctgcacgctccatctctccgacgggacgcagcagacttgctcttagctgggatggctgatctggaccaaagaccaacctgctgctttgcctgcgggttttggcaaataaggccttgtttagttcccaaaaaaatttgcaaaattttccagattcttcgtcacatcgaatctttagacacatgcatgaagtattaaatatagacaaaaataaaaactaattgcacagtttggtcgaaactgacgagatgaatcttttgaacctaattagtccatgattggacaatatttattaaatacaaacgaaagagctacagtgtcgattttgcaaaatattttgaaactaaacaaggcctaagctatatatggcgtgtatggccgtcccagtaatgtgcaatcgtccatcgatttgcacgcacatccataaactagtccttttttcgttaaagattggtgtgcagtgcatatttattccttttgacggctcttttcgaaggctaggaggttggatgtttaggtcttcgagcatcttcaagagtattctatttttttttctaaaaatatgtagtttagaaacttctaaaaagatattgggaagagaaaacaaggttttctttgaatgaatggagaaaacaaggtcatctccaattgagtacctaataaatggcttctaaaatatcaaattggccacacaaagatattttttttggcaacatagtcgtggtctccttccatgccgtggccggctcgcactcaagctctccctggagaggatcctgcaagcgtcgcctgcggaggtccaggaaacctgccgcgaacggatccacgcgacgccggtgcgcgtaaagttgcgcaacagggtagtttttacgaagttctaaaattttaagagattggattatgagttgttggagaggggttttttcccatcttgctaaaaaacaa

SEQ ID NO: 4263 - DNA, 3458 bp, Sorghum bicolor
atcacttggtgatcttgttcatcacttggtaaagcatcaaactgaccaaacaaactccacagaaaaactcaaacctagcacgaatcatggaagtgaaaaacaggtgaacagtactcgcgaaaataaagaacatgaacgcaaacaaactctactcagatctctacgtccagaggacaaaaagaggttagggtctccattcccaacgtaaaaaaaaactctgaaaacaactatgaatctttgctcaagtgatctctttcatgaactaaggagaagggggaaaactaactctaggtggagataacacaaatgagagagagaggtgggagaaggaggtgagggagatggagaactcctccggtttatttatcagtcacattatatatttcccaaatgtctttaaatattttttgagcgaactagctagccttaggggcattctagtccaactcgacatgacttaaatccgacggccaccgcctcctcaccggtagcctcactccgaagcgatctcactgatgccgccacgtgccatccgtccgcatcgggacctctacccgggttttgaggtccaaacccgcgaaacccgctgcgagtagcgtactccatacgcttctccgccactcgacacgtgtcaccgccgtcctcgactggtcggcccgctaagtcctcctgagcctcgatcgactcgcgtccgccgtcttgacttggtcaacacggtcactcctatgtacacttgcacttgtcgatgtcccagatgtcagccactacggctggtcacccggcctcctggtccgtcagtccaagcctcacgtccgtccttcaccgctccaggtctatcagcacggcacgtctctacttgaccttcacctcgccgtcgaccaccgcctccgaactccacagctgaacaccacaaggcaagagacatgtcgcacacatagctttcgtcatggtaatattagtcaccaactcaacctattcgtggatcacgttgacaatcactcatcacaaaacgtactacaagggtacttctcgaccttatgttcgcacgttaaatctatttttatagtaaacttatctgagatataaatattgctaatattttttacaaccttagttgataggcatggatttacctattagggactgagggagtagatcgtagatgtagatatcggtacacaagtatttgcaggaccgcatgacatgatcattacgtagttgctgatgattctattttcatcacactgcatagaagacacgtactgcatgcaagagttgcgcgacaagctagcacatggccgctggcgttgcacaccgtcctgagagcaagtttaataatacagccccacttgctggctgtaaggttccttacagccttctcccagcccatccatacaatagttatctattcactattaatacatggcccacttatctctctcataaagtttcttggttcttgtgtctaagctggctgtaaccttacaacctacttttcctctctctcctcccttacctcctccacatcagcatttagccagcttacagcctaccataatacttgctctgatgagcgtgcgaatcacaaatttcagcgctagcccagatttacatttcgccctgcgcgccgcaccaaagtgttatccaagtgttgtaatccaatcattaacgtgaacatgcggaattgcggatgctcgcaaaaagtcaatcgcggccaaaccatccacgcgctggacatcatgcaaatatatacgatcgcccggtactcgccctgaccggtctactcgatcggccggtgtagcaaccaaccgatcctattgatgatcgatgattgcctgattggcgcttgcttgccaagaacaacgggcacgtaccagcagtccagtacgtactatatacgggtcctatatgtgaccctacctcagcacaagtactggctctcagcctcgatcgaccagcaagtactcgctagtgagtgtgagcagtgaccgctgacgacgatggacatggcgaagtcgctcgcgctcctggccctgtccgccttcttcttcttcctcctcggaggctcagtggccgcagctcagtggacacccgccttcgccacgttctacggcggcagcgacgcgtcgggcaccatgggtaattgttccatctgctccatcattcatgacaggtttcgcattaacgaacaacgctaacgacgaaattaatcaaatgttcaggcggcgcgtgcgggtacggcaacctgtacaacgccgggtacggcacgtacgcggacgacggcgctgagcacggcgctgttcaacgacggcgccatgtgcggcgcgtgcttcgccatcgcctgcgacgcgcgccggtcgcggtggtgcaagccgggaaccggaggcgcccgccgccgctccatcacggtgacggcccaccaacctgtgcccgcccaactgggcgctgccgggcgcgcggcgacgcgggggcgggtggtgcaacccgccgcggcgccacttcgacatgtcccagccggcttttgaggccatcgccgtgtaccgcgccgggatcgtgcccgtaagctaccgcgccgcgtgccgtgccgcggcaggtccggcggcgtcaggttcaccgtgcggggagacacagctacttcgagctcgtcaccgtcgccaacgtcggcggcagcggcgtcgtggcgcaggcctggatcaggggcggcgccgccacggactggatgcccatgacccgcaactggggcgccaactggcagagcaacgcgtacctcaacgggcagagcctctcgttccgcctcaggtccgacgacacggccgcgtcgtcacggcgtacaacgtcgcgcccgccggatggtggttcggcgccacctacacgtccaatgccccagttctagctattgacctgaccaccgtcctttttgcccggagcggccggcgtgcgttccatcgccgtctctaattctctatgctactatatgctagtggtaatttgttctgctctttcatcaatcaaagaagaaaaaaaaaagtaggagttgcgtaccagttgttcacaagtttattaggtagagttgacgtggattcatgtattaccttgtgttatactttattgtaccgttatttatttgatataccgttcagtttacattttaaattcataatactattaggatcattcccatgtgttgcaacgtgaaaaaacataataccacaatggttttgttgagtttaaacatgtactttattgtactattgaaaaaagatactttaaacgtgatgtttgcaacattaaagttttaatgtgaatttgaaataatctagttcatattgtaaacaaaaacaaccaagttcatcacgactatttatcgtcacgtctttgtaccatatactacgctgacaactataaagtctcccctataaattaacataattattatctttttttagcatatgaggcat

SEQ ID NO: 4264 - DNA, 7111 bp, Sorghum bicolor
ccaacaaacagtaagtggtataattttgtgcaaagtatcgttggtatttagatactaagctattttaagtatgtgtcgggtaccataacctggggtacccaaagcgaaaaactaaaaatctcatccactccccttataagaaactaaaccgacaaaaacagccattctccaccccgcccgagacccaacgatgaagcctcgaacagagccgagaccagtccactttctatgcctcgcccgagacccaacatcaaggccttagacgaggatgagacccggcaacctctgactcgcccaaccccagggctcggacacctttctcccatcagtgcgctcgagacctctagtgacatcagccacgatcccacaacggggcaatagtgcagccgagtaagacaggagtcaaacatccatcatgcccacgcctaggcagagcaggcatggcactcactgtgctatctactctcatcactgtgctatctactcccatcactgtgcgtacggccgagaccggcatagaccatcaaacatccatcccagtccatgtgtccacgaactcattaggttctagggtatgggctccgactcagggggtctcatgtccctacgccaatcgatgaccaagggtcaacacgtccgctataggtacagacatccttttctcaaggcaggcatggttcaatgacagggaagccttgcacctgaaggacaaggggccatccctccacgggattacgccataccgtcggtggcctcggattcattaagaagagcacagtagcacacgcacatgtaatccttgcctccccttgaggctataaaaggaggaggcaaggtcccatgcagggcgacacaaactcacctttagcaacacactagacatcacaacaacctacactcaagaactccacacatggggccgagacctgggttccattccctctctcacgctaagcttgtaacctctactacaagcacttagatgcaagatacaagatcttcacttccactggacgtagggcattctcggtctgaaccagtagaaatcgcttgtgtccttgcatcaccatccgaatccaagacacgtagacacaaaatcactaaccggtgggaggaccacgtgtccaagcaccgacattatgttttaaagtttattacttactttaaaaatattgataaggatttttaagtatatttttcttatattttaattaattatatatttgtatgataacatgctacatttacctatgtttggtgaaggcgcgaccaacttcggcttcggtttttgttccttcattcactagagcagggagtcatttttaggactaatttggcagaccccccaaagcagcttgtagattaaatccaggagaagctctaccaaacgatcttttagtaagaaataattctttacttattctggaaagcaattctttaaaataaactaggaggttggaagttaaaaaaaaaatagcttctccttattcactctacagatacaatcaccgtatgcatacagactatcctatagcagtcaaataattatttctcacggagaatcggtttctagagagagctctgctgaactgaagatgtgtgttagtggacgtgttaaacgagactttttgtattattaaaaaaatatattgaatcggatagtgtcatggtagctagagcctagaggtcaacgcaacagagaatatcaagattttcatacgtctttcgggagcatgcatgacgcagcttctgaccgaattctaatttggcctctgactaatatttgcctgcttctcttggagtctttctctttacacgagtaaatctacggcgagctagtagtaactaaaccaggcgtagtccacctactcgcgtctatataaggctttggagttttggtgaattaaagcaaaaccttggcataagcacgccggagaagacatatggttaccagccatcatagaggaaactaacactactcctaccaattgaaaaccaagatgagcaagatgcttcccatggcagcagccctctttttcttctacgccgccgtggccctgctccgagctgcaggcagccaagcggcggtggtcgagcacacctttgttgtgagtagaaatgcatgcatgccttctgatcgggcaaccgagatatgtttttcattttcaagattaatattcaggaatgaaaatcaggaacaattattcagtaccttattttttgcacttctctacataatttttcttattatttttcattgttatatatcatgcaatgtggagaaaacagagcaatttgtatttgtttctttgtgcacatgctatgaataggcaaaacaagttagaaaaatctgcaggtgcaaataatactgttttctttttgggtaggttatctttcaacctctttaaaccactgtcgaataaaattttaaaaacagatgttcttttttgaagaatggatactatagtttatttttgtgaagcacaacctcactgttaatggatgccctctatcactgaaagaacaacgtcgttagttaattcttcgaataaatctagaaatagatgctatagttatctacttcttggcgttgatatatatacacagttctgttccatccaatcaagatattactttagcatgatcccataaaagagttgttcacatcttttcaactgcaagcctgatagatttgtttgtttctttttttttaacctggaaaggtcataacccggtgcaactgcttaatcacaggtaaagcaagtgtatatgcgacacctttgcaatgatacgctggccaccgtggtcaacggccagtttccaggaccaccggtagaggctacggaaggggacacagtgattgtacacctcgtcaacgagtcaccctttgaaataacaattcactggtacgtatatacatatccccaagattgtaacctcctctaaattttaaaaaaaaatattgtaaacgttaatgcgtatcatcaatttggaatggtaaataaaacaactgatttcaggtaacatcaataagagcagaattcggttttgctaacgcacagctagcagctatgaatccctattgcataggagtattagtttcttttagtatatgttttcggagcaaatacataagttatctgacgattacgggcgctgccccgaaatggagaaaaagatcacttaattaaaatcacagtacaatacactaggattcgagctaattaagccgcctcctggatgtgctagctcttcttcattctaatctaattaaccctaacatatcctcctatgatgatacacaggcatggcgtaaagcagcgactaacgtgctgggcggatggcgccggaatggtaacacagtgcccaatccagccaaattccacattcacctaccgtttcaaggtggacggccaggagggtacgctgtggtggcactctcacgtctccatcctccgggcaaccctgcatggcatcatcatcatccgcccaaagtccggctcctaccctttcaagaatcagcctcacatggatgttcctatcatcataagtacgtaactaattaacatacctactccctcaatctctttttatttgtcgtttgggtatatgtgccggtcaaattttgactagattccctcaaaaaaaatttgactagatttgtaaaagaatagtagcaatatttatattttcaaataagtttattataaaaatagattcaacaatgtatctatttatattgattatgtaatataaatattaatattttttatatatttagtaaaattaaatacgtttcacctctcgagaaatggaaacaagaaacaattataaagggaaacaattataaagggacgaagggagtatgtaaatgacacttacaatacagactctatcatagagtctaaagttatttattacctcgaacaatatggacttagagtctaaataagacttggagtcttattttttatacttttttcttcaataaatatgttgacacatcagtaaaaattaattgtcttggactctgtgatagagtctcgcattgtgagggcagtcccaacggtggaaaccatacacaatgtccaagagtaccacgtcatcaaaatttaatcaatagaaactacaccacacaatgggggtgtctttatgtaataaatattgtgcttctgtctctttcttcatttgatagtctctctcctctcgcatctctctcaacatcaatctgaagaggagcgaaggcaacatgagaagtagagcagcgagcagaaagcctagctgtgtactacatcaccagcagcctgggctctcggccgcttgcatgtgcgccgccaccatagacctccaccggacaacgccgcccgcatgcgactcttctcccaatattgtgtgccaacacgcgagctacagcaaggccacacacaaagatcctgcttgcccgcataagagagctcgcggcgcccggcgagcactcacaacagcacggtcgagtgcacgtagcggccggcgaacgtggcagtgcgagcaagcactcgcgggatgcaagcgagcatggctagcgcgggagagcgcgacgttgcgtgccggggcgcgagcgagcacgggcggcaagcgagggcagcggcgcgcgcgagcgagctccgcactgcggctctggctactccccgtgttccagcgcggcagggcacgcgagcgaggcggctccggcgagttccgtggacaggtcgacggtgcgcgcaagcgaggcgacgtcgacagacagcgcagctgcgaacgaggcagctccaacgatttctagcggcggtacgcgcctgcgcgggtcaacgcggcagctccggcgagctcccgtggtggcgcacgagcgagcgcggctagcatgctgtagaaaccggtagtttctccccaacgccgagatcgtgatttctatgcgcatcggctcaagtgtagacgtcgtttccctcctaagaaacggtttcctttttttttcatctctcctcattaatcaagctgtcatgtcagtattttgtttaggtgtcatcttatttaatacagattgaaactatcattaataaccattgggagtgccctgaattagacttggagttagatgcatgcatcattgtcaagtccaatacatccattaatatctccagatatctcttagattaattgcttgttggatcgaccttgcttgcttgcatgcaggtgaatggtggcagagagatttgatgaaagtggacaagaacttctccaatgggggctcattcagtgataaccccgctggggccaccatcaatggaaaacttggtgatcaatacaactgctccggtacataatatatatatacatatatactttcgtagtccaacaaagtccttgtgaaaaataattatttgccagacatataataacgtatgcatgccttgtgttctgctgcaggcgtcgtagaagacaacttcgttctgaacgtggagcgtggcaagacgtacctgctccggctagtgaacggggcgctcttctccgagtactacttcaaggtcgccgggcacaagttcacggtggtcggcgccgacgccaactacatcacgccgtacaccaccgacgtggtcgccatcgcgcccggcgagacgttcgacgtcctcatggtcgccgacgccccgccctgccgctactacatggccgcgctggccaaccagccgccggccccggacccccagatcccggtgttcgcgtccagaggcatagtgcagtacacggacatggacaggtgcagaacccaggcgccgcctccgatgccggagatgcccgaccagcacgacacgacgacgacgttctacttccacggcaacctgtccgggctccccacccacccgctgctgccgcagctccgtggccgcatcgacgagcacctcttcgtcacgctcggcaagggcaccgtctgccgagacgacaagccgtcctgcaagaggggaggcagcgacgaggccgtcgaggtggcctacatgaacaacgtctccttccggctccccgacaagatgtcgctgctggaggcgcggcagtacgagtacggcggcggcggcaacgacgtggcggcggtggtggtggaggagctgccgaccaggccgccgagcgtgttcaacttcaccgacccggcgctgatcccggtcggccccggcgcgccgctggagaagctggaggcgacgcggaaggcgacgacggtgcggcggttcaggcacaacgccacggtggaggtggtgttccagagcacggcgacgatgcagagcgactccaacccgatgcacctccacgggcacgacttcttcgtgctggcgcagggccacggcaactacgaccgggccaggcacgtgaggacctacaacctggtggacccgctgctcaagaacacggtgcaggtgccgaggcttggatgggcggccgtccgcttcgtcgccgacaacccgggggcgtggttcatgcactgccacttcgagttccacatcgccatgggcatggcaacggtgtttgaggtggccaacggagccacgccggaagacactctgcccccgccgccgtcagatcttccaaagtgcatacacaagaaggaataagctagctagaaaatacaggaagtgtgatacagtattactagtatctttgtattcgaggaggtttgcagaagatggacattatatttatatttatatttatatttaaccacgctacacggctggttaaggcatcttgcattttggagtaataatgctattgtattaattaccttagttttgagtaattcttgtaacgacaccaggcagtctaattttgaataaattgattactgcttgtattattatgttcttatttctaatgaacacgtgaaatctaaaagaataaggacagttgtatttagagcatctttaacaatttgccatccggctttcgcatccttaattttttggcaaaataagaaaaaacttctctccaataatttggcattttcttttcccatcttttccaaccttgtaaaaatttatcccgggtgtgtatatatgcgcgcagcttacaagcgaccttttggagtttcttgacccgtctagtaaaaagaaag

SEQ ID NO: 4265 - DNA, 3264 bp, Sorghum bicolor
taactgatcaatcatgtctgtgaccaattactgctaatataaaattattgccttctcttggagctatgtagaatacagtgagtaaagctgatctcataggcaggaaatgctggactacaactatattttgaaccgtcacacaccaaactataacgaaagagcgagttttcaactgccacactccagcgttctaatctcaagtcatgagtatgcttagttgcatcgtcattcacgctgacaacatcaatcaccaatgttgccgaatgctgaaatcagagaagaagaggcctcagccaagaacccagtttatgaagtttttttttcttttcttttttccgcgaccgtgtctaagcaggttttttattataagaagaaaaaagttcttcgtatgtatggctcaacaattgacaaagttttgtcattccttatctacgggagtgtacagagtaggtggatttgaacgttcggtcactgtctcactttcagcgacacagatggatttgaactttcgcttgccatgcatgcctcatacatgattttatttcacttcgattgaacattgttttcaatttcatatatgcttgtcacttgattaattgtgtgttctagtcattactttgttgttgaatattgattttcttcaagcaaattcaccgcatgttgtcataagcatattgtgtggaccgtggtccttttacgaaatcttaactagagttgaacgacaagaatgctatacgtcagtcttgccacattccacaagtaaactaatgagtaatgcgttagtatccatatgaatactatatattcaaattaacacggttgccagtgaagtttcaccaccatctaccaatcattgatgctgggcaaaggtgtgcttaggtaagggcctgtttggaactattgtgctccatgtttttctaccacaagcaggtgtagttccacacaactctgttctaggaaaaaaaaagatgaagttgtgagagcaataaaggatgctttagaaacttcagtttttttttaatttgtggagctacttcacagagaagtttatggagttgtctcaaacaagtcctaaatcacataaaagatctgccgatatgataggggcaggggtgtgctttgttagatcttatttcttatatgctctccactggatgcaaccattttagttgcgtagatttcttaccaaaaaatcatgtcaagctctttgtctttgagattttattgagttatatacatacatatcctgaaagagaaataatagaaaatagcttagtttggttttggagtatagttacctcttctagggaataattactatttattagtcttttagaaacaagtgtgtgactgtgaccaagcgaacaaatttagaaattattcctagtctttgcaagtatgcttccacggaaggtgcgatccggatcacgtacatattagttagtaaactgtaggatacgcgtgtccaatccctcaactttctcataactaaaaacgtttgttggggtgctgttgggtgaactcaaactaaaacaaccctttgcattgggctgacatttcaacgaacaagaaacagcgtgtagacagttgcaatctaccaatccttttgagctaagtcagtgacatctcagagcaaaggaattgactaaccagtcagcagacagttgcaacctcctgcattcagaaacaggactatgataattcctggctctgcaagtgtggatcacaagtgtgtgtatattcattcctacaatcctacgaccaggtccccggccaatggcgtgttgacagtagctgctgtctcgccgagttgacttcctggattgccgcctataaacagcttaggattggacatagattccagcattccccagagaacattcagtactatctacgtcctaccagcagagccgtacgtctcctccctacacacacgcagtagatcttctatctcccttccaatccaggggtctggtgtgggtgtcatcatctcgatcacaatgtctaaggttcagttcttgtgataataatgtctttattttctgctgcagatcaactgaatgtttttttgttgttgttgctggttgctcgttatattgcagaagatagttctcaaagctgacctcattggcgaaaaatgccagagtgagatcctagcaattgtttccaagaaccaaggtatctatctttctatctaattaattaatgaacaatgtatatatacctatcaacggattaatgacagaagagcaaagctagctaggctgatgccatgtatgacatgatcatccccattcatccaggaatcaagtccatggagatcgacgccgagaagtgcacgctgacggtggtcgggacggtcgacccggtgcgcatggtgcagaggctcaagaagaagtgcttcgaggcgaccatcgtgagcgtggaggacgacaagcccaaggagaagaaggacccctgcaaggaggcgtgcgagaagctgtgcaaggagaagtgcgacaagatcacctgctgcaaggagtgtaaggacaagtgcgagaaggagtgcaaggacaagtgcgagaaggcctgcgaggcgtggctcggcaagggctgctgctcctgcagccgctgcaagcccagcccggccggctgctactacgacccctgcgccgtgcgtagctacccctacggctactactacaacgggtgccccagcgggtaccccccctactacggctgctacgaagagaggtcacatgaaggagcgtgcaccatccagtagtgttttgttcagcatgcaactactgcattccaaatgtgcgtggagttgtcttcctacggcacgtttgtatggttataagatctcaacatgtatctttagtttgtgttataattgtgtttttcattgaactcctactatatatatatgcaaagatgcttgagattttggatggctttctctcactaaacgaaagattttagaaaaggaaaattttattctagcctctgcaagactgttgtacccaatcgtgttgttgtggctttgttttatatatatatatatatatatatatatatatatatatatatatatatatatatatatatatatgtgtgtgtgtgtgtgtgtgtgtagtgtgagagagagagagagagagagagagagagagagagagagagagagagatatatatatatatatatatatatatatatatatatatatatatatatatatatatatatatatatatatatatatatatatatatatcatatata

SEQ ID NO: 4266 - DNA, 3980 bp, Sorghum bicolor
ctcaccatgtaactgtacaaccgaaccgactctgagatttatcaatccatgagctagctagcatagcatgtgccaagttaggtcccatttcagaagccgtttgcagtctttttttgtcaaacgatgtaaataaaatggcttcatccagaaaacttcttaaattgtgcttccaaagagatatgaagcagggcttcacctcgtcctagtgggttctatatggagtttatgtgagagcatgttttaattacaagatctacatgtgtaaaatggtttatcaaagcagctctagctccatcaagacaaaactgtttatggacctgaaggaaaaaataaagaagaattttacaggtgaagtaaagttgtgccaaatgatcttaatattcacgggaattataggtagccaacaaatgtgccatcacttacgtaggcaccaggggaaactaagataagccaaaatctctctttgcggatgctccaagcttgcctacagcaattgcatcccgcattattcctgccgtacaccaaaatatatacttgacaatgagcgaggatcaattttgttcccggccgataaaaggcgagattgatctcgatgatcgatcaaattccctttcgctaaaaaaaagaatttgctctaaggatgaggacgtacagcccaaattctcttgtgcgatggctaagtaaaggagtaaactatagcgagtgaatcgtattcccttgatcttgagtagtgagaatttggccccccgatcctttttgttttcttttcggggaaaaggttggtaggattccgcacacaacgtctatattttttctctcgacaagcgatcgaatacttatctaacttccacagaattaactttatttataaacaatgcattcatgaacatttcgtaaaggtagtatagtaggatcgcccccatttgcaattaagcaaacattttcattccaaaacatccccatcaaaagatgcaaaaatttggcgatatttctctgcctttgctacgtgccgtgacggtgctgcgacacgtggtgaaatcgcgcgattctcaaactgatctatcacctgaattcggcctgaacataaaatatatggcagtaggttccagtatatatgaaacgatttaggcattgtttggatgttgtcggattgatctcaatccacatgtgttagagtggattggggtggaatttagttcaagttccactccaatccactccaacacatgtggattaatgcgaatccgactacatccaaacaaggccttactacttttccggagactacacattctacagtgcgtgcaattatatatggatgatgtcggatgcactgcactatccacaccacacacttttgtacaatccgtgcagtgcacctgtgcgtggatctttcatttctgtcttttcgcaaaaaaagaaaatatattccaggtagcttatcaagcacattgaggatcggagcagagagaatccttaactaacactgttacaatatatataggtagatacatgtatacacatatattctctctgatccggtgtacacgcactcaagtatataatcttcttccgttcctcttccctagctctctaatttaatttcgatgttcagaatatataaacagcatctttgccgtgacctaaccaagctaactgcgaatccacacctgcaaaccaagatatatgttctcctgatctcttgctagctggcttacttttcccttaatatttgccttcttcattcattcattatctagcatcatgatatatctagtacgtgccctgtatgtagctataatctatagtggtagagtatatattcacatacgtgtactataacatctatatatgtatgtgttgtatgtctcctacatccatgtcacatctaccccacatcatcaaaaaatacctttggcactttttggctttcttcatgctctaccctgccttcatgctctatatatacacccttgatcggcctcccttgcttcatcaaacatccatccatccaccacacaatcctagctcccggccagcagcagcagcagcaacactagctaagctataaccatctctctgctctgaagcagtactcaaagctatcatcaccatcctctcagctcaattaatcaatcatgtctggcgtttgggtgttcaagaacggcgtggtccggctggtggagaacggcgcggcggctggcggcgaggcggtgcggcggcggaaggcgctggtgcacacgccgagcgggcaggtggtgcggtcgtacgcggagctggagtcggagctgcgggcgctggggtgggagcgctactacgaggacccggcgctgtaccagttccacaagcgcggctccctcgacctcatctccctccccgccgacttcaacaggttctcctccgtccacatgtacgacatcgtcatcaagaaccgcgactccttcagggtcgtcgacgtctgatatgatccatccatgcatctgcttgatgctagctacctacctacctacctcttgttagcatctcgatcagtctcatcagtatcatcgatcgtcgtctatggtggagagcttgctcttgttaattaattagtggtgactttgtgaggagtacgtgcacagcagctagatatatagctagctagtgtttgacagtcgccgtacgtgagtttgctagctactagctactatgcatgcatgtctcgctaaatttgatttcgaagcagtgtgtgtgtgagtgtggagctgatctgaatcagtagcttacgtgtgtagtgtgtacgtgccagcagtgtgtgtgcgtgctgtcgtcgtctgggagtgatgatgtgtaagttgctcgagacgatggatcacgcatgcgtgtgacgactgtacatttatcgtttgtgtgccagtgaccaccaccattattgatatatgcgtgcattttcactatagtacacacattatagtttcaagaagaattagggcacgatgcaggagctagctctgccaaatcaatggagctgagaccgagagccgctgccatgtgccaagtatgaaatgcagaacaagcaggcagcagggtgtgcgctgctgtggcaaaaatggcccaacgatgccaaggaacactctcccaaaaggccctttaacgaacggacgcgcactttgtaattcggcccgtagttccatacgagccgccgcggaaacaaacatgcggttcccacttaaggcccatcatggtccacaaaggaatagagatagagcacgcacggcgccccctttctccgttttcattccttctttctttgggccctggtacctggtatagcgataaacccaaagtccaaaagcagctccaagagcattggtaaatatatatcagccactgcttttgagccaaaaaaaaagtattttttcctttcagaacatattagtatcagcatcagtatcagcatcagccatacagaaatgattagccgaacatggcgatagttgttttatttatctatatttaatgttctattcatgtgtcgtaagatttgatgtgacaaatttttttaaaaaaaatagcttttgagaggcgaaaactagacgtaaacgaggcctgagaaaaagataaaccgacaggacaagcaccaaagggctactagacgatgaggtgaggctcacagtcacagtcacaggtggaccgtggacggcgacgtgagaagggcttgcaggtgctactgtcccctaccgccgaagcagatccaactgaaacggacggacgcgcggtacacccgatgacccctcctccggctacactttgaccaccgcgccgcgccccgcgcatcgcatatacttatatttatataaggactataatgcaatatatatatatatatatatatatatatatatatatatatatatatatatataagctacgtagccgcctctaccaaagtgtagcttgtcatgattataatgcaaataaatataatatatacactgata

SEQ ID NO: 4267 - DNA, 4078 bp, Sorghum bicolor
gctcatggtcccaaagttcaagttcacgttcgatttcgaggcgcgcgaggagatgcagaggctgggtgtcatcagagcctttggaggtggcgacttctccggaatgttcgccggcggaggaggtggggctttcgtcgcgggagtgtaccataaggccaccgtcgaggtggacgaggagggcacagtggcagccgcggccacggccgtgtccttttgcttgagcgggagcgccatcccgccggtggatttcgtggcggaccggcccttcttgttcgccgtcgtggaggagaggagcagcgccgtgctcttctttggccatgtggtgaatccaatagcggagtgatccgcccacacgcaggccgcagctacagaggtcaccggaaggctagtgctgtaaattgttactccgttattccaaaaatcttgaaaaatcaaaacattttcaaatttgattaaaattataaagagaaatattaaaatttgtgagtatactatgaaaatataattaagaaaaaatctgatacttagttgatatcataataattattattttatcatataaatttggttaaatttaggatagtttgattctccaagattcgtagtgacttataatttgagatagagggagtatttgccattttcgatctacatatgaacttattcaaaactggtcatataactctgttaaacgattttggaaggtgattttgctatagtgacggtgattttgtctttttctttttatttattttttctgctaaatctttgaaaaaacattgtaaaacataaaataaaaaaaactaattttattagattccacatgagtagatctacatagtaaatatataatatagtatgacaacgaaatatttgtattaaaatatatcatattatatattcactatgtagatctactcgtgtagagtctaacataattagattttctattttatgatttttctataatttagtataatttttcaaagattcagcaaaaataaataaaaaagaaaatcacaaacaaaaaaaacatggtcaatgcaccgaaaccactgcccaatgtaggtttttttttttaaatttttgaagcaaattgttttgtcaatcatgaatgtgatacggttttgctgttgatccgtcggtcgaagtacccctcgttgttgctcacaagatgagaaactaattggtgcatcgttgctgctcttctattccaacaatttctaccctgaatttgttgatagttttctaaaatataataatcattatatgtagctgaatgatgtgtgaaagctgcgtgaagcggacgctgtgccatgagctccaatgagcagcattgctaccagagtacaagactcaaagctctacgacgtaaccacgctgtacgcgcttgccgaatgttttttcactcgttagtttactcagagcctccgttgacttggagcaagcttacttgtcgttgaagaaacaagaggctcaggccttgttttcttttacccgaaaagtatagcattttcgtttgtacgtaataattattgaccaattatggactagctaaactcaaaagattcatcttacaaattacagacaaactgtgtaattagatttttatatatatttaatgttttatacatgtgctgtaaaattcaatataatggaaaaccttaaaaagtttttggtttttacgtaaaaacaaggcctcaacacagccccgtttctccataaatggagcaccagacatgcaacattctcatcccatccagcctttcaatttgtgcaaccactgcgccactcggccgtctcggcgatccccagcgtgccggtgagtttccgtcgagagaacgcacggcacgcggcagggcagggcatcttggcgccaattttccgtaaaaaagttttttattttttttttctgcaaggaacatactctcaactactcagaccactctaccagtacgttcgttctgagctctgaggcctcgcagcagctcacgtccacgatgagcacaccgcgtcgcggcggccagcaccacggcgacgagcgcgccgggacacgagcaggggcagcctcccgagacaacggcggacaaggcgcgggcgacctgagcttcgggtccacggcggggccgtggatcgccttcgacccgccgcacccttgggcgccgcccgagcacgcgcgcgctcccgtcttcgcgcagcaggcacctgttgatccgttcccgtggagcacgcccacgtcgttcgcgaacccatttcatggtccatcgacgttgaacgtgccgtggggaccgcccggcgaggtgcccttcgccggcttccccgccgccgggccagcggctccggaaccggaatggcgacaccggcgacaggatgtgttcgctggcatcggccgccgttctgtccccgcggtggtgacggacccggacctcgacggcgcggacggcggcgcgtcgtgcctgccgctcgcgaggcaggccggcgtgcgtgcggcggcgcgcaacaacttcatcgtctcgccgctgtcgttccacgcggcgctcgcgctggtggccgcgggcgcacggggcgagacgcagcgggagctcctgggcttcctgggctccgccgagtcgctgagcgagctgcacggcgccgcggcgacggcgctggtcgccaggctcaacgacctcccgcagacgtccttcgcctgcggcgtctgggtggaccggcgccgggcgctcacgccggagttcagggacgccgccgcgtcgcgctacgcggcggtcgcggactccgtcgacttcgcctcggagcccgaggcggcgaggcggcgagtcaacgccttcgtgggcgaagcgacgagagggctcatcggcgacgtcctgcctcccggctccgtcaactcgtccacggtgctcgtcctcgccaacgctatctacttcaaggggacgtgggctcggcggttcgatcggtcgagaaccttcgccgcgccgttccatctccccggcggcgccaccgtgcgcgcgccgttcatgaccacgagcccgctttccgaggatcagcaggtcgccgtgttccccggcttcaaggcgctcaagctgccctacaagaacgacggcggcgccgcgtggttctacatgcttctactcctccccgacggtgaggctctaaccctcagcgatctctacgataaggccgtctcgacgccgggattcatcaggaggcacacgccggtggacggggtcccggtccggcggttcatggtgccaaagttcaagttcacgttcgagtttgaggcgtccggcgatatccagaagctgggagtcatgcgagcctttgaaggcggcgacttctccggcatggtgtccggtggaaacgggctcttcatctcaggagtgtaccacaaggccaccgtagaggtggacgaggccggcaccgtggccgccgcggccacggccgtgtgcatgcaacagtgtgcaaggatgggtccaccgccggtagatttcgtggcggaccggcccttcttgttcgccatcgtggaggagaggagtggcgccgtgctgttccttgggcatgtggtgaaccctctggttgggtgatgatgctgaaggaagagagaactcgtgcgtaacatgactgtgtgcaggaacaaaattaaatagactatcttatctttgtatatgtttgccatgtaatttgaagaatttgcgtgtgctatgtttgtataacgagaacttttgaataaaatgaattttatacaaccactcgctacaataaattgttcatctgcaggcagttggcactttgacgtttcaacaaaacagacacttcatagaactaaacacaatgaaacattctataagagaagtgcatttcttttcttttccccttttcatcctcttaccaatataaataacgaaaaaaaattacacttaacaattctgctatagtgccatggtacaactgtgtttacaacttccgtgaactgtcagtggttcactagttcagaacccatgtttacaactctacaaaccacatagtaacattgtgagagcacaagaacaaaaatatgtcaaaacaccgtcaggcaaaggcagca

SEQ ID NO: 4268 - DNA, 11091 bp, Sorghum bicolor
taaaaactagaatgacataattcagaacggaggaagtactattttgtttttatataaattttacacctaatgtggaccaaggagctagagccatgtctgctgaccaaaaataaagtagagaacgagtctaaacaggggcaggataagatatccactatggtgcaagccaaatggagattaatatggggcccccggaggacggggatgggctattaagcttgtattaaggttcctgacgaaggcaaacatgcatgctaaagttataaagcatgtctccaccggtggtcatttcaaaaattcaaaaaattgaagaggtcattggaaaattaaaaaaaggaattttaacatgtaagaaatcaaaatgaatatttacttctctaaacaatctcatacacagttatttcaaatgctaagttattgatcgcatttagagctacaactttggtataaacaatgttagcaactaaggtcgctttaaaatataattatcaaaatatgagagagtaaaaataattatttaggcttgcctcagatgagatatacaactttggtataggccatgtcaacatcctaagtcattgataatttaaaagaattaattaataaatttaaaatctaataacttaaaacatatatttaggcctttaaaagattttaataaaaaaactatcaactacaaaaatgtagagcaatcaagatctataatttttatataaaatttgcactcatctgacttaatataaaaattgaatctttaatatgatatggtcaaggggttattttgttcggttttgaaagttaaggaagtaatttatctgagaggtgagtttgatggtaccttttaaattcagcgacaagttttagggtttaaattggacattactcaatagaaatgtacgaaatctaccaaaagccaacacaaaccaactagcattgtattatcctttatttcgtgtgcacgtaacttaaaactatttaaatgggctagttactagttaagactaaaaaattagctaaggttatattgctcgtattagatggcgtttggttcaatgttctgtaacgtaatttgattataaaccagtacgaatccgatcacgcccgatttttttgcgggattgaatccctctgtcttttgagtacaatgttttctgattacatttgcatttccatttacatttccaaaccaaacaccttgttagattgatcagaactgattataagtaatttttaggccttgtttagttcacctcaaaaatcaatttttttttaagattctccgtcacttcgaatcttacgtcacatacataaagcattaaatataaataaaaaaataactctgtaatttgcgagaagaatcttttgagtctagttagtccatgattgaacaataattaccaaatacaaacgaaagtgctataacatcaaaattcaaaaatattttggatctaaataaggccttagctagctagcaattactgtagtatctcttaatataatatcagcaggtccttaacgttgtatgatgaaccgcggtgggactggggaactagtgacccaagggaggtcttgtattgtgtccgcgagcgctctctctctctcttcttttctagctgatccagccgggagcgcccaaaacgcacgataagcacgcgcgcgcgctaacgccaaatcgctaaggggacgacgacggcgacagcgaaccaggttcactcttcgtgtttcggatcggtggaggagtccggcggagccccgaccccgaccccggcggcgcgcgcgtcgccgtgagcgcagtcagacgagaggacacacaggcattccacggttgacggctccccgtgtttccacgaagcgcagggcgcaggcgcagccgcagccattgaatgagagccacgaggatgggccccacagcactgtcccacgcagccgcggacgttgcacgccatttgttttcttttttcttcgatgagcctacgtagaggacggcacacacgcaccatataaacaggcaggaggcgcggctccgccctcccgcagtccggagtgaacggacgagccccgcaggccgcagccacagcccacaacccaagcgcagcgcgggcgcttccctctgctccactcccgtccccgtgcctgcgtgcgctctgccgccgccgccgccgccgccgccttccattccaccgcgcggcgctgccgacgtccctcgccgcggccggagggagctggtctgggttggattggatctctcggagcgagatgggcggcggcaacggcgatggaaccaccccgctgggggagccgctgctggcgaagaaggggagggcgtaccggccgaggtgccccggatgccgggtggaccgcctgaacgcggagcgggagggggtgttccctctcaaggacctcttcctcatctggctcgtcaccatcacctgcagtaagctacccgctaccgcttctcccctcaccctgctacagctttattcgtcgtactgtacgtcctagtccgtttttttaaagctcttcgcaaagcactgtagcattttccggccatcgtcttcctccggctgcaaatggcacggcgacgtactggctgccgagcatttttttttggttgcctgctggctctgcagctaattagtggtgcgctgttctctgcgtgggccggtggggttttggttttggttttggttttggttttgggtgtgagtaatatacctaccttttgatttgctacgcgcatccagtttgctcaacaacaatatgcatgctgctcgattcaggatcttcgtcgccatggctagctgccgacaagcggttaacgattcagctctttgttcgttccagattcagtcagtctggctctgcccaggcacaggcaggagcttgctgttacgtgatcccaccatcgtgttatttcgcagtggaatccaatagatcggtaggctctggatcgctgtcaagatgcttagcgattcagtgctagtagtactagtatttaattgagattcgttgctacagtgctagtatttaattaattgagatttagtgctagtgacgccactaatttaatcagcacgctgacttgtaacactagaacaacttgtttttttggcttcaattggctgtctggtgttggaactgacgtactcctatctcgtcaagtcgccataccttttactttcaaaaagaaaaaaggttcgccatacttccatatacaaacgcatgctatgattggcttatatctcttggacttttggtgcagatcagtagagtaccgtatcgtttcgttacgactcgcgtgacgctcttagctcgtgatccggcggctaatataatgaacacaaggccttgtttagttcacccaaaaattaaaaagttttcaagattccttatcacatcgaatcttttggcacatgcatgaaacattaaatatagacgaaaataaaaattaattgtacagtttaactgtaaatcgcgagacaaatcttttgatcctagttagtctatgaatggataatatttttgccacaaataaacgaaagtgctacagtagcgaaatccaaaatcttttcgcatctaaacaagcctatagacgttcccctgccaggctgccacggccgggtcagctactggctacagattgggtgctgactggtcagaggccccttcaaacaatttgcttccctcctcaagctgtccacaatttctaagctaaaacaagcatggtcaaagcctggtgcgcgcctcctcaacctggaaacccaggatccataattttgacagcggggggctaattacacattttttcgcttgtactttatctcttttctctcctctattaatatatttgcctggcagaagttctgccagcaattttgggggggaaaaaaaatccggcagctgatgaaaacggtaaattaatctcgacgtccacagtcacctgattggttcgacgttttccagcgcgaggagagcaggaaatgtgattgtcgcttctcaataattggtggtgctgtcactgttgataatgaattattgtactctcaaggacttctccccctctttttttagtcattgtaaaactagttatgctggaactaagcacatgcatgcctctgaattactgttttcataccgtttgacatataacctctcttgattataaattagaaattcacttaactctgctgtatttttctatctgcagccttgccgatccagtctctgtttcccttcttgtattttatggtgagtaataagtttctctctctctctctctctctctctctctctttttgattttatcgaaaaatgggaattgctacaagtggcatccgtgttttccattttcaacatctgtttccaagacgtctctctctctctctctctgtgtgtgtgtgtgtgtgtagactaatatagtgaagatggtactattacaatcgatcctgccggtatttgagtagctggatctcaatactaaatgaggccaccagggtagagcacctgctttccgtccaaagaaatcctcagctggggttcctctgagtgagccaccttgtttccactttatactaaaattagacttcagacattttttttcaggcagtaaaactccagaattaacatggaccttagagctggagtcctacgtggcatgtttgggtaggacttaaaatgtaactatatagtgacacaattaaacagtttggacaaataattacaaacgagggttaacctcctgtgcgagagttgagtacccccaactacatatacacctcccaggctcccacggcactaaacttttcttgttgatgtaactaagttcagggatgcacgatgttgttgtttgtatggctccaaaagtataactagagccacaatataaagaaaagattagagtccgaattggcagaaagaaaggagaggataagttggctcctactgtcttctatgccgtgatgctatcaacactcaacagtcaagtcagcctttatgcattcctcttctgtttttttgctggaaaccttgttgcacttgcactcttccatatcatcttcaatgctagcccattttcggactaaaagtacacaccctaccgacaagacagtatgacaaattcctgccatcgtgacttgggacagtttgtgagggaacatagatgatgacagccttttccccctttggacaggaagttagatcctttaagttttggaataaatacctttggatctatagccctcttctaagtgaaacgctaacagtttttcataaacttattctcttttctgtaaggttcataaatatattatcgtctgttaacccttgacattttgcttgcagataagggatctgcatattgctaaacaaacacaagacattggattttacgctggttttgttggtgagtttcctgataaacactgttccacttctgtgtctatctgcccaaaagaatctgaacatagcagtgtatggatgtttactgtgaactatatatgcataagctttatctatcagtataaacttatggtgcattttctatcaatgaaggcgcttcatatatgtttgggagagcactctcctcaacaatatggggaatcgtggctgataagtatggaaggaaaccagttatcgtactgacccttgttgcaatgtaaggacctttttctttgaccaaacatagtcacctagtattcattaataaattgtaatgtgggcttttattttggttttagtttagctgatgcacccagaatttgggcttttttcttgtctatttcagagttatcttcaatactctctttggactaagcttaaactattggatggcattaatcacacgatgcctgcttggggtcatgtgtggttatctcgggccaattaaggtacctaagcatatggttactgggacccaccatcatctccatttacttctgttcactaactgctcagataataagttccaaaatcttctatttacattccacagcttgtttctaattatctactgttttctgaaacctttttgcaagagaacaataatccataaattcagtttatttcttacaaatttgcactgccattttgttgttagaatgccttaaatattatcctgaaattgaagcttggttggtttcactgcaataactttatgctattcctttttgtgtattcaggcttatgctacagaagttgtccgaaaagaatacaaccatctagctttagcagttgtaagatgctcaataataatatttttctttaattcttcattctgaaaccccaatgttcatgagtttctactgctgatccaccaggtttcttcctcacgaggcattggtctcattattggaccagctattggtggttaccttgcacaggtaaagttcgaatctatggtgaaaattaaactatgtataccaacttaatctgtatgatttgactattctttctcttctgaccatgaatttataaataaaaaatctgaatttatgtagcttttcaaagtctttcttgtttgtccttttcttttgccaatgatcctttgtaaactttgagtgcttgattagtctggtgtacattaatggttattcatcatgatctgaaaaaacaagatgttcctccactaatacatattatctcaaaccacattgatacatatcgatgcttccacagcccacaggttgattctgttcaatgttgtatagtaatgttttttggcagtcatgcacaaaaaaattacctatctgttagattattgtatgacatgcaatttagagaggaaaaaaaccatctacaatcctagtaaacttatgtgcttgttgattgcttttataacagcctgcagataaatatccaagcatattctctcagacatccatatttgggaggtatgcatccttgtgcatcttgttttttatatttttatgttcattgcttctattatattctaattatgttataacatgcaatgttttaggtttccatattttcttccctgcctgtgtatatcgatccttgcagttattgctctaattgcctgcatctggtttccggtgagtttgtcattcctatatgcctaccatgctcagtttatattggagaaaacatcatttaagcattttattcgtgttgtgcaccaagagtcagataagcaaagaaccctattgcagatccatactaatgtgtaactgaaccttaaatcatataatctatcgcaatatacttagaaccctattcttgttgtacttggttttgtgcttttagtaaagcacactaggcatcactatagttactctgtaataatttcctcgttcaatgttcacaacaaatgtagctgcacgcctgcacgcttcctatatatggcgaaagttgctatctctaagtggcacctgtagggtaccagtatgatgttttgatgtgtgggaacattcattcttgctttgatttaagacctgcaggatagatagatagattacaaataacaccatgtttactgaaacatgtatatcaaattttacatctttctgtcgttgtttagtactaaatgtaactgcagtgcaacagtatcgtcagcaggtcttttgtcgtttaatatacgaactttgatcgaaattgcttgtgcatttttacaggaaactttgcataaacacaatgaggataccgttgataattcagttgaaactgtagaagaatctcttgctggtacagacactgaagaaaatggaggtggtggatgtctaacattgtttaaaaactggccgttgatgtcatctattactttatattgtatcttctctcttcaggatgtggcttatgcagaggtaaaattgcaacttgtttgctgagttgctttttctgttgttgttacatctcatgctttctcctgtaaaagagcatccactgcacttgttattactttatctgaatcatgaaaaacttgcagacgttctctctttgggctgtcagtgacagatcatatggtggattaagctttactaccacagatgtgggcaatgtccttgcaatgtcaggtatgtcaaaataagcacaaaaacaaaatccactgtaatcggtgttgaattaggcccacatagccctttacaccttaccttgatcgctagcatttggtgtgaaaatagcctattatgatcaagcaagtggtcccatagagaggttttaagttttaacatctctgtctgagggaaacgggtgcttcaaagccctgctattttaggagcctaattataagtgaggatggtcattacctcactaccctttgttttggtttgagaaagctcggagttctgaatttatgggcaatggcttacagattttccatgggacttaaaagttcttcatatagaggataattgctttaggttggagatccaaaggacttaagcaactcgcagtaaactgctgcacatgactaatagtgcacatatgcctgtttgccgtaattagtaatatatgctaaaacgaagaattgagtctttcaagactatatctgaagcatatgaatggaaaacttggaactcagttatttgtatttcaagctttaatgctctattgtattgcagagaaagctgtttatacttaatatatatatatatttttgtcaggtctcttcctttttctgtatcaaatgttgatttatccattgcttgcaaaagcggtggaccacatcacattagttcgtgcagtggcggtaaggaaatagattacctgttctgtttaaccatattctgacacttcaattaactaaacactttgatgtgcagatattgactctaccacttcttgctagctatccattctttccttcattgaaagggttcgtgcttatgttggtagtaaattgtgcatcttttctgaagaatactttctcggtgagtgcaaattttatttcgtaacttttctgtttagaacaaatctgtacatttcaaacacaacattgtttcactttgtgatgcctaagcaagtcaggcttctaatacagaaacatgtttttcaaacaattttttttcttggtgtgtcaagaacttaacagagaagtttggtgcaaatgattaatgcttcatgcatgtcactatttatgtcaatgatagtttaacgtgtcatggacatatttcaacttgctgccggcgttgttagttcaaaaacttagttatgttcttctaaactgttttcaggtaactaccattaccgtgttcaacattttgatgaatgaagctgtggtaagttcttagtgatggtaatttggtttcttctatgaaattggttagatttctttcctaacatcagtatgccatatgacataaacagactcaggatgtaagagctgcagccaatggcatagctgtaacactaatgtccatctcaaaagctgttgctccagctgttgcaggaattatgtgagtattattcaccattcacgtctcagtattttccaaaccatgcattgcaatagagtcaagaaggtcagcagctttattataaaagaaatgatatctaaatctgattagccagaacagctttggggctgcctaatatttcatggcaaaaggaatctaggatccaacttgaaattactccctcctttgttttaaaaatgcagagagcacacggtaaaacatctagagcttatatttgaaaacggctattcagattgttcacatgtggtttgtagttaaaattattatgtaatatagttacttcacaatcttttaatattattttcaaatgaaaaatagtaacgaaggtgcacatcagaagcccaattgatttccaaaaccccatttcagagatgatgttattccagtttccaaacctaataatgatcatttcttattaatatttactgttgtttctttgctgaattatccccttattattttttcttcctctgtagattttcatgggcccagaggcgtcaaacagcttcgtttcttccaggtatcgcaccagaaaatctttctttactttatcctctactggcattcattgcgcacctctgttaaacatttggtctgaatcttgcaggcgaccacttggtgttcttcatactgaacatcttcacactcaccggtctcatcttcaccttcagaccgttttttgttcgaggcagcgcgaagcactgaaacatgaatgaagcagacccatggtaataggtatcctatccaggggcaatgaaatataaattttcttccggcgtggccgagggaggtgccgagcctgtacgactgaggcaagagcacaagcgtatggtacacagcaaggctgtgttgttgtaagttttgtaatttctgtttattcttctcggcttcgcagcatgcatcagttgctgtatatgatggaacaacgtctgttactgggcatgttgctcggttttcacgcgtgtaagtaatgtagaaatcgttatggtaggtatttccatactgtcattagtggagcattgattttttgtaaggaagttatcacaatgcctttttttccgggcatgaataagaaaagggaaatatgcttatatgcatactatgaataagtgagcaatggacttgtactgtattcgtgatctatttaaatcagattaagaaaaatggtgtcacttcaaaccatttagttcgcacaaaaaccttgcactatctttaacacgttctcatttgatttgatcatctaactctgtttggtgaaattcttttcagccttgcatcttatgttaggtttatttattgtaaaactacactatggcgaatcagttttgttaaattactcttatatatactagtaaatactatgtccatatattgtaacgggagaaaaataagttatcgaatatttatggaaaaggagaatagaaatgttatgtatctttttatgttttatgctcctataaatctttaaagctgtaatttatttatgatgaccatgacatccatattataagttaaagttcatactaatataacaatgtcctattaatcttgtattaaattaaaatacaactttgatggactttgttctcctcccgtgcaaaacaaatatttactcatatatgtaataatattttatttgttatactattactattca

SEQ ID NO: 4269 - DNA, 5020 bp, Sorghum bicolor
tttggtggctcattgcgttgaacaacagtttagataaacaacgcataggtgagttgatttttcgcttttcttattgttggtttgtcttgttagatttgttacctttgccggtggtcatccatgtctattttcttttctgacttcagactatggtcttgtttagttctaaaattttttgcaaaatggacattgtaacactttcgtttgtatttgataaatattatccaatcatggactaactaggctcaaaaaattcatcttgcaaattacagttaaactgtgtaattagtttttttcttttatctatatttagtgctccatgcatatgccgcaagattcgatatgacgggaaattttaaaaattttgcaaaatattttgggaactaaacaaggccatatatcgtctcatggtatagccctagttccctatgcccctaccaattttaactgccattttcactttttgataagtcaattatactcaattttaactaaatatatataaaaaatattaatatttatagtacattattagtaccattgagcagatcgttgagtttatttttaaaataaacttatttggatataaaaatattgctaatattttttataaacctagtcaaacctaagaaattttgactagcatgagtaccatagcgatacttaaaaacgtattttaaaaaaggacaaagagagtatacatcatgagtaccatagctatacttaaaaatgtatttaaaaaggacaaaaggagtacacatcaagaaatttagcctccaaaatagatatatcaatcttaagactctttgtccaaaaaccctggaggcaaaaagaaatccttacagagcactgtttcaatgtgaagtacaaatttaaatcacctgaatgaagtttctcaaatcctataaatcctaaaattcactaaataaaagtgcactctctccatctcaaaacaagtctccatctcatattttaaggataacgaatcttaattttaatgagatttatagaaaatagtaacacatttgtatctctagaaagatataatatgaaaatttataatgtgattaatctaatactccctccgttcaaatatatagtaaaatggatgaataaaaaaagttaaagtggcttataatttagaataaagaaaataatatttatcttaatatcataaatattagtattttaaaaatatgaaattaattgtttgatttctcatatgcgagataaagacttattttgggaggcagggtgagcaatttgatgtctggggccaggcgctcatccaggtctccgaaaacgatcaccttgctagaactagaacacgtaattctagaacaccttcttgcctaagctaatcgatacgataatatatttgaagtttttttggggtatgtcattataaaagttaataattatttcattagatttagctctaatagtgttaaatcatgagtgtaaaaagttaaaaatatcctcaagtgtaaatatgtaattaattttttcaaagcatcttaatggcttcaaataaaaaaaaaacttaaaactagaatgtagatctcgaaaatatctataattttttataaaaatatttttatttaggccttgtttagtttaaaaaatttaaacattttctatcatattgactatttagacatatgcatgaaacattaaatataaataaaaaataactaattgcatagtttacctgtaatttatgagacgaatcttttgagcttagttagtctatggttagacaataactactaaatacaaacaaaagtgttaaacccaaaaaatttcatgaactaaacaaagccttaatttcttaaaaaacatgattcgatatatgattaatatgtcttaaaaattcactttttttaatgtcttccaacgttccatggaagtgccgtgcctgcctgcctgccaatgccttatcccccgccgcggaacaagcaaaaccctctctttccaagcccgctgcagcccttcgaattatggcagctgccgccgccgcggccggagctgcatcggccgccgtcgccaaccaagaccctatgaacgcgctccgcacagccgtcctccgccgctccgcgccgcactggtccgcaggcgccgcttccttcttttccccgcccttccgcccccgccgctgccgctgccgccgcgagccagctcctgcagccaccgcgcgtaccccgcggtcccgcgcgagtgccaaggcccgggcgaagctcctggcggaggctgagccccgggacccctggctcgcctccctctcgctgctcccgaccgacgacgtcgccggtgctgacgccgcccccaacgggtgggcgattggggtggatcccgacactcgaggcgccatcgccgtcctctcgcctgacggctcctctcaggttcgactggcagccatgctcggataatcggaaaggctagcattgatatgtgttttgcacaagcgtgctttagtaaaagcaaattcgcatcatgcaggtgttcgacaacccgttcgtgcacattgtggtgtcagaggtcatccggaagcgcctggacaccaagtccattatacaactgctccgcggccttgatgtgcctcctggtaactgtccctggagagtggagaaaacttagtggcattatggacacccttataagactcagtagttgtagtaaattagtgaccgtattctctcttcattatacccgttatgtggaagatacacagctgtttacggtatttttgtcatttttgaaggaactacggcatacattgagaagtctagcccatttccaactgatggaaagctggtttgtcccttgtctcccaagcattatgccacttaatgctcgttcttcaagatgattttgtagttagtaaaccatttttttttgtgcgtcaattcttgaagaagttattctgtcaggtagtgcctatgagaataatttgaggatatagtgctatctatactttgtggaataggctgatcaccaatactactaaacaatgtccgtggcattatactcatgttttctaaactaattctcgcataagccgaagctagtcatgccactaagatagtgggatctagcttacacctggtccacgattttattgaacatggaacctagtcattccgactgaatattgaatttcatgtgttttgaattattccagaatttgccaataatctcccttctactgttttctggcgtatagggatggtggagcactggtttctcatatggcttgtggattgcttctctagtggcttctggattttcagttgttccgattgcatcccagacatggaaggctcactttgggctatcccgaagtgaaacaccaaaggtttgtcacccttgttatgtggcatatacaatagcttcatgcccctcatttagtagaaagtttgactgtttttgttaattaaaatatgccactaatgccaattccaggttgggttaggctagaaaaaaaatgactagtcaaaatctttggcctgagcctaacctgccagctatttctcgggttttcgtactttgggttggggttttttcaggttgggtcgggtcacttgggtttttttctgggtgagtcaggtcaagtgccccatgattaggtctactccacccctacctttcctttgctactctggttatatgtcagtaaggttgtgcagcaagatgtctacatatagggaaaatgaatgtttgttttaatcaaattctggtgtaacccattcgttatacattgatgtcagagtcagataaaaacaaacacatttgtagatttttgtttacttaggcatatgaacacgattttgtccttttgtctgaagtgtttgtcttgcgttcttgccagcatcgatcttatgttattctgctaattccagatctaacatggttctcttatatttgcactgtataattcttacaggatgatagcagacaagctgcttcaattttgttccctgacaaagctcagtccttgaagttgaaaaaacaccatggtatgcatcctcctaatgctaactgcctatcttcaagtagttttgatacctgagggctaacattattgtttgcttctctcttctgttaatgcttattctgcctgaccatctggaagaaatttgacgcaaatatgttgtataaatgttgcttttctgtgtgctgtcgtgcaaggtgccctgaaaaaataatcaaacaaaaattggtctggtttgcaatgcacattagctaatatttgtgacgaattgggatggagacatgctcttgttgatttagtgcacaatagccaggtagcgatggagttatatagtttttgactaatgggtaccaaatccattttattcaaagactcattgagagtagtttgcaatagattttgtatagtttgactgaggtcggttatgtgtttgtgtccttatgcagggcgagcagaggctcttctgttagcagcctatgggaagggccttgtgctgccatcaaggaagttcagcgaaaccccagtttgatgtctacggcgattgccgattggcttgccatttttaagggtgagcagaggctcttctgttagcagcctatgggaaaggccttgtgctgccatcagggaagttccgcaaaacccaagtttgatgtctatggtgattgccgattgacttggcattttccatattgatggtactgcaaacatttcagttcgcttaggaggtcccaatcaagtacataagatattgagggtgaatctgctgtaagtttgcaaaccgtaatagagatcgtagctaacccatcaactttcgtggaatgcattacagcattagacatttcccactgtttcgttgaaatcatcacagcattagacaattcccattgtgtccttagtgtgacaggctagcgtaaatgagatctagatgttgtagacatgtaatgattggaagctggaacaaactgatgctccattcccgtttgctgagaacatgtaacgattggaagctggaacgaattgatgctccat

SEQ ID NO: 4270 - DNA, 3001 bp, Sorghum bicolor
gctagccatagataggacgccgttctcactggctatatataaagactgttgtggaactctacactttgggtgcgttttttattttacacaataactaaattttgtattttagaatataattttacctagtcttgaagatgctcttacgtagccagacattattttgaatagagttaaccgtggtattttgtgagctaactatagtattttgtggcctaacgcattttctgaagtactgtatgtcacaatgccaatcaagtggacttatcttaatgttagaatgtaggagcagcaacacttgcaagcctttgtaagcacttgatttagttctgtcacttaattgattagttgctggattacctgatttatttataaaaatgtctgaacttctgtgttttattgtgctctgaaaatgcaatgaactgccaatctgccatgtgtgtttgaattgctgtaaaaaaacagctaagcctgaagtgctagatctgatttgaaccgttggatctgatttaaagggttggatgctaaaggtaagttatacggtgacttgctaagacaatactgaatctgtctcacggacccgtctcccgtctcccgctcgccatccccgctacccgcaccacccctccggccggccgcttcgtcgccgccgctcctcgcagcccggcccccttgcctcgccgtagccgtcgccgccgccctctcggcccggtccctcgcctcgccgtagcctccgttgcggcctgcctgccagcgagggtgaggaggcgccggaatctgggctgtcgccgagccgtttcgagccctgctcgatcatttctctgctcaacggaaaggagagtaggagacggattcgtgggtcgtcagcaggcgcggcggcgacttcatcgggtgttcggccgcttttggcgcgcaaagcggacgacgcgcgcgcccgccgccagggatgaccggcggtcgagatccggtccgagctcgcctcttcgtcttcctctccagctgcgtgccccagtcgtccacgattcgtttcaaagctcgcttcctagcgaagccagcttccaatcgaagcgtggccagataaatctactacaaacaggcctgcctcagcgcgctcttgcacggccgacagtggcacgggttcgcgatttggcggcagagcgctgcgacggcgggaggcagtgtgccgccagcacggtgaactgccgctcgttgctgcggtactctattgatccctagatttcccaacgaacatggcggaggcggctgccgactcctccaactcggccgtagacggcggcggcggcggtagcgtccaaaacgactatcccaccattgacccgacctcgttcgacgtggtgctctgcggcacgggcctcccggagtcagtcctcgccgcggcctgtgccgccgctgggaagacggtcctccacgtcgatcccagcccgttctacggctccctctactcttccatcccactctcctccctcgcctccttcctatcccccgaggcctccccgcccacctcgaccgcggcagccgccgcctccgattcgcataccgtcgtcgatctccaccgacggagcgtgtactccgatgtcgagacctcgggggcggcgccagagccggcgaggcggttcaccattgacctggtggggccccgggtgctgtactgcgccgatgaggcagtggatctcctcctgcggtcggggggtagccaccatgtggagttcaagagcgtggatgggggcagcctcctctactgggagggctgcctctacccggtgccagactcgaggcaggccatcttcaaggacaccacacttaagctcaaggagaagaacgtcctcttcaggttcttcaaatttgtgcaggcgcacatcgctgccgcctcagcttctgctgatgagacgggacagggggatgcatctgccaagatacctgaggaggacctggatctcccctttgttgagttcctcaagaaacaggggcttcctcccaagatgagagcgtaagggtgttatgaattggtcgagtatatgctatttttagcagcatgactaagattgggctctgtgtggtgtttgcagggttgtgctgtatgcgattgccatgggggattatgatcaagattgtgctgacccttgtgagaaattgattacaacaagggagggaatacagaccattgctttgtactcctcgtccattgggaggtgaattagcttgtctgaacttttccttgtccactttggaaaaccatatatatatcaattgtttgtttattaatccaatctttcatttagctttagagaagatatatgtaatctaacatgtaaaatcttaacataacgtagctttgggggtataattttacatcttatttttcaccacacaggttctctaatgcagaaggcgctttcatttatcctatgtatgggcatggtgagctgcctcaagctttctgtcgctgtgctgcggttaagggcaccctatatgtaagatgatcttcacaagtatgtgtgttaatgatttttgtgctctagctttggctattgttttttttttttttgtcatgtgattgtagcgtctttcatcccagttatctttatttggtacattgcaatttgattgcaacctcaacatttaggaacagtgatgtggtagtcatgggcttgacatctctctgctggaatggcatctgacaccttctttacttctttctttttaataacttgcgctggtttcctcatacttagccttaacagcatactttgttattcaggtgttgcggatgccagtttctgcacttcttatggatgaggtatgataataaactaaaatctatggtggccatattcctgcttttttttcctgatgtagttaccatacattggatccttttgaaatcttgcttcagctatgtttcacctttatgcacagcttctatttgagtaacttgaaataatttatactttattgatcaggaaaagaagcattttgtagg

SEQ ID NO: 4271 - DNA, 3790 bp, Sorghum bicolor
tgtgagtggtgaaaataaattgtgggtattgtgaaagggttaatgaacaagttatagatgtgattactatggagatggggcggatgggatctcttttggagatgccctggtgttgtggcttataccttgcggggttaagcgtgaagatatccgccttgtctcgattaaggactgagttgatgattcatcttgcctaactcatttatcgtacacccactcgccttgcatgggaaaggcttagtctaaatccctctagttagtatggcaatcacctggaggcaggtgtgcaacgggacactaagtgatgtatgtgaaattgtggaaatatatgaaaagagctttgtgaattattgtggtatcatgagatgtggccttagtgttcccgtggtgagcgccattacttagctatggagggtaatgactttgatggatctgtgcttgcacgacggtgtaagttatggtatcctacttgtgggaaaagtgtacaacctctgcagagtgtaaatctatcttgatagccgtgtccgcggtctcggacgggttatggtttggtttcaacaactagattggttgggatgagtgaaaacatgtgagagagtgtgattttggaaataaatgattgactgccattgtgttgtgggaacaagggttcaacaacacttaaaattgtgatcaaacccccattttagaaatactatcatatgtagaaaaagaggtcttttacaacagtatttgtgaaatgaaaccttgcatgtgtaaaatgatagctttatgcaaataaaactaagcctcaaccttgatttatccatatacatatatattgttatccccttccgtagggtaagtttggatttgctgagtactttgaccctgtttagtttcccacccaaaaaaatttcatctatcccattgaatctttgtacacatgcatgaaacattaaatgtagataaaaaaaactaattacacagtttggttgaaaatcgcgagacgaatgttttaagcctagttagtccatgattagccttaagtgctacagtaacccatatgtgctaatgacagattaattatacttaatagattcgtcttgcagtttcctgacgagttatgtaatttgtttttttgttagtttctaaaaacacctcccgacatccctccgacatatctgatgtgacacccaaaaaattttcatctccaatctaaacaggccctttgtactcacctttgctttattaaacagaggaagatccggacttcgatcctgaagtggcgttcgagtaaggtcgtgtctgcgcccaactaagcctgtggcattgggactcgtcagatgttcgattgtgatatcgtttgtttttgggtcctttggacctatgttgtattttggtgtcttattattatagcatgccttccttgtccacgcttaccgagactactgtgctgaaacttatctgatgtaataaatgtgttactagcctcctgagactagtattgtatcacatttgaatttctggtttaccaggagcgcttcagatcagtacttgtgtcttgtcacaataattatcccccgctttgcccaattgattccagccaatgccgagctccacatgtcagtattgggggtgtgttgcttcatgttggaagaatagaatcctgggccaaatttcaagatccaattccaaattattcaaacatgtggtactgaagatatatatgattccaattctctaattccaagctaaatacatatccaaacgtgatggcagaaattcatagaattgttgctaaccatgtatagcaactcaaatttatagagtaaagtacagtaatatatgatgcttgatgctataggtaaattcatcgttaaatggtgtcatacaacaacagcttttgtgcctgtcgccgtgcgccgccgcccacaacggtcactagagacgaggagagattcgcattcccatcccacccctcgcctttaaatcctgcgccccaccgctccgatctatcctccactcgatctctcgccgccgccgccgccgccgccgcctactcccactcaatcgccgccgacgagaaagcaccgactcgatcgtcagccatggcccggggagagaaccaggaggcgcagagcgggaacgtccccgacgcatcatccgcatccgcgccgaaaccggcgtcgtcgtcatcgtcggcgggggccgggaagggcttggagggccagtcggtggtgcggcggctgcagtcggagctgatggcgctgatgatgggcggcgacccgggcgtgtcggcgttcccggacccggacggggacagcatgctccactgggtgggcaccatcgcgggctccgcggggacgccctacgagggcacctcgtaccgcctcgcgctggccttcaccgccgagtacccctacaagccgccgcaggtgcggttcgataccccctgcttccaccccaacgtcgacgtccacggcaacatctgcctcgacatcctccaggacaagtggtcctccgcctacgacgtccgcaccgtcctcctctccatccagagcctgctcggaggtaacgcatcgtaacccatcgcgatctcgtgtacgatcctccttgttttgtctctgatcgccgacgggttatgtttatgtatgcagagccgaacaacgactcgccgctcaacacgcaggcggcggcgctctgggcgaaccaggaaggtacgcgattggacatctcgcttcgcgtctcatcaagaattccgcgatcgatcgatatatttcttgttctgacgaatctcgctttctcgtttcctcgtcctccgttgttcagagttcaggaagatggtgcagaagctctacaagcccgcagcgtaggggaggagccgaggaggacaaggacaagcccgctgcgggttcttcaagcactcatctcgcttgcgtcgataactcgatgtcgaattgtcgatggagaagacaagaaaatagatggatgcttttgttgggttgggtttcccagtctggtggtgtagcagaagacaagaaaacagtacgagtgttcttttgagttctgaatgtttagaggttcatttttacaggacttattttcgcccagattcagtgctgcttggcgatcaacgaaatttcagatgacctgcattcgcagtgttaatacccagatgaaaaccacatgtacttgatattgccgttcctcttctaacgcagtgttgttgctcggctgatgcatcaagaatccaagggtcaaatggaccctgtccaccaaagcgaattcatattttcagtaatgttgggatattattgtgttcttcaaacattcactccctccatcccaaattacaagacattctaagaattttagagagtcaaaacatattaagtttgaccaaaattatatgataagataataacatttattataccaactaagtattgttagattcttcatttattatattttcataatatatctatttgatgttataaatctttgcaattttctctataattttaatcaaacttgagatgctttaactctttaagattcttagaattatgaatgccgtggggatattttgtttcataaaaacaattagtagactatgcaaacaatttgtatgagaaaacaacaaaactaacggactagcagaaattcttactctgctgccatagcaatcatccaaagtgtcccgttttgggggtacattccacgtcattctacaatttcatttacatagtccaccaggaactatcacgtttcctgtgaccgttcaaaaaaaaaaaatcgtttcctg

SEQ ID NO: 4272 - DNA, 5499 bp, Sorghum bicolor
ggcgaccctaacttataagttgcccaaaaatagtttatttgaacttattttagtttatttgaacttgtctttcacatctataagttggattatctaatttggtatgtaaacaaataagtctatctacaatctatgtctatagatttaaagagcgaagtgattcttttgttcttacctcccaaagtgtatcgtgtctcttcttaggccttgtttagtttctaaaaaattttgtaaaatttttcagattctccgttacatcgaatctttagacgcatgcatggagtattaaatatagacgaaaagaaaaactaattgcacatattggtcggaattaacgagatgaatcttttgagcctagttagtttataattggacaatatttgtcaaatacaaacgaaagtgctacagtatcgatttcccaaaaaattttggaactaaacaaggccttattcatatttgatcaggactcataatccgtgcctatatataagttagaacaatgcaacaacaatggtacaaagtccggatacgtttgcaagttacaaataaaatagaaaggaaaacaattatgtgtatcaatgtatgaatctagaatttttcgtgcataatatctgttgcaaggccttgtatagtttctgaaggaaaaaatttcgggacactgtagcacttttgtttgtttgtgctaattattgtctaactatagactaactaggctcaaaagattcgtctcgtcaattttgaccaaactgtgtaattagtttttattttcatctatacttaatactctatgcatgcgtctaaagattcgatgtgacggagaatcttaaaaaatttaaggtttttgggtgaaactaaacaaggcccaactcgcaaggtactccctctgtttagaaaagaacacaattatgagatccgtacaagttaaagtaacttaaatttatccaaatttataacaaataatattaatattgatgtttccaaataaatttattataaaaatatattttacgactactctaatgatattaatttggtactaacaatattagtattttttatataattttgattaaaatttaaactgattgatttttcgtgaagtgagaatcgaattaggccttgtttagttataaaaaattacaaaattcctcgtcatatcgaatcttgcggcacatatatagagtattaaatatagacaagacaaaaactaattatatagtttacttataatttgtgacatgaattttttaaatctagtcagtttatagttaaataataattattaaatataaacgaaagtactattttatttaaaatccaaaatttttgacaactaaaacaagtccttaggccttgtttagttccgaaaatttttggaaaatcgacactatagtactttcgtttgtatttgataaatattgtccaatcatagactaactaggctcaaaagattcgtctcgtcaattccgaccaaactgtgtaattagtttttatttttgtctatatttaatactgcatgcatgattctaaagattcgatgtgacggggaatatgaaaaattttacaaaattttgtgggaactaaacaaggccttattctacacggaagagtaccaaccacttggagtctgcggcgtgagaaggcaaggcacacgtgcgatcgcgcagcagcgtcaacgctctgcccggttagctgccgttgacgagctggcttccatgccgggcccacgggccacctctcacgaacgggaccacctgcaagcgagcgtcgccgtcacccttccgccgcacttgtccgccattttctttgatcgactgaaggataccacgtcatttgttctaggaatcgccatttcctaattctcagtcagtcctcgcttccggcttccctcccaaccccaactcgcacgccaagaattctagaatctctctcctctcctctcctctcctctctttaagaggggatacagagtagggaagagagagagagggcagagagcgatgaacgcggcggcggcggcggcgcggaaggccgcgggcggcggcatggcgcgcgcgccggcgctggtgctagcgctggtggcggcgggggcgttcctgatctcctacaacttcttcgccatgctgtttcgcggcggcggcggcggaataggcggcgcggcggcgtcctcggggacgagggaccctgtggtggccatgccggcgtggatgcgcgaggcggcggacaccgaggcgcggcggcggccgttccatgtggcgctcacggccacggacgcgccctacagccggtggcagtgccgagtcatgtacttctggtacaagcggatgcaggcgcggccgggcggggaggccatgggcggcttcacgcgcgtgctgcactcgggaaagcccgacgggctcatggacgagatccccaccttcgtcgtcgacccgctgcccgctggcaaggaccatgtacgcaatcgaataaacaacaaaaccacctctttttatctccttcaggcttcagcctgtttgattgttttctcatcaacgcggggcaatgtggggggtacataagatttatatggttttattttcggattatgatttgtcaagaagcttgctcgctgaataaaaataataatgtagcatgtacagtactctgtaatctgttgatgtctcgtgattgaagtatctattcaactgatttgcttgtctgacatttagccttgatggtctgtaccctgacattccaatgttcttttgcagggatacgtggtcttgaatagaccgtgggcatttgtgcagtggcttcagaaagcaaagattgaagaagagtaagttcccttgtatctgtgttttttattttgctataccgtttctgttcagtttcaagttttaatcttccacccaaaccctgtgattcagcatacagtaaagcatgacttataaaatagcaaaaattgaatagtttccttcctcatgcttaaataaaaaggactatactaaattactaatctaatgtgtatatgaccgttctgctttggtgaaaatggcaggtatatactaatggcagaaccagatcatatatttgtgaaacctttaccaaatttggcccatgacgatgatccagcagcatttcccttcttttacattacaccatcagaacatgaacaaattatccggaaatactatgccaaagaaagaggtcctgtcacagatattgatcctattggaaattctcctgtaatcattaagaaggtaatttcttcttgcacaacacccttttacctaagcagtttattgattttctgaccatccatttggtgcattagcatttaaatcctttacttcacttgtttgctatttgggtttactaacttcgcgagacctcacttaacacagtctcttttcatgtgagaacttttcagacacttcttgagaagattgcccccacatggatgaatgtgtcaattcaaatgaaagaggatgaagagacagataaaatttttggatgggtgctggaaatgtaagaattactttatcctttatccaaattgtgcaaattcttatgttcacttgttacgttattatgattccagcctttttctttgacctttaggtatgcatacgctgttgctagcgcattgcatggggttcagcatatccttcgtaaagatttcatgatccaggtgctccatttgtttgtgtttttatcttgatagtattcctcacttcaaataatgtgtttgattgacatgatggtaaacaacaaatgcagccaccctttgatacaaagctcgggaatacatttataatccacttcacttatggatgtgactattcactaaaggtattagaatcccaaattgctgaatttcttctatatatctggttttcatatgaaatttaaaaaaattgagtgcataaaatagatattttactgctcctgttattttactgacagtatttgacaataaataatatttcagggtgaactgacctatgggaaagttggtgaatggcgatttgacaaaagatcattcccagatgggccaccaccaagaaattttacattgccccctcctggagtcccagaaagtgtggtacgtgtattagcagataaattgaaaaggcttggcatgtttttgttataatacaatgaacctattatggtatcaatgtgttttaaatgttcaccatccacacgattattttaaaatgctcatcatttacatgaacttttcttttgactgctaatgtacttgacaaacaacaaactaatctggcctttcctaatcttttctcaatgcaggttactctagtaaaaatggtcaatgaagctagtgcaaacctacctcggtgggatgatggaatataaactttggctgatgtcaattataccttaggttcctttgatttgccccttgtatatggggaatatcaaagtatcaggtgcagtcggctgtttggtttatgcccaaaatagctgcttgcactcgcacaccatacctgatagaagacgatacagaattatctcattgtactttttagaaaaagaaaagtaagttggcacccacagttttccatttaattatcttgtaactgttgctcaccgctgaaaatctcaatacaagtttttttatcctaataaagtttaagtcattttaaccttctcatttttttttgaaaaatctttgttttagatgttctaccttctatgtgtttcttacactttgttccttccctgctcctacttaataaatactatcaccctcatgaatgaaaaatcgtcttcccaataatacataaaaacaaaggtcactaagggcatgtacagcgcaaacggtttattttgcaaaaaaaacaccctcaccgccgcgagttcaatgaggagagagagtgaacccgtcgtctcgcgactcgcgaggccacgggctcagctcatgctccgagagtcccaggtctcgtcgtcagccgagggcagcgctgtacgggatgtgccgtctccaagctttggtgtgggatccggatgtggctcgcgccattttaattcttctgtgccaaaatcactcccatccacaccatacatgtggctcaaatccttcgtcggcacccaagatccagcgcacccacgcgatggcaccaaagagggttaccgcggaggtgagaaaggagtcgaagggctcagcagcgacagcggatcccaatggcgcagagtcgattcatccccaaaccatgcgagactgcacatctgaaaatagctaagtttcttaaaataaccaagtttctgaaaaatagccaattttctgtgatctggtatctagctgcacatctgtaacattttatatgatctggctgctaccgtgaagactgctgctgaggttctgaaaatagttgtttaagttctgaaaactatgggctgaaagtatggtgattgcagttttggcttcaagtttcaaaagttctgttcacccactattttgcaggtatgggatgattccatgttagttagcta

SEQ ID NO: 4273 - DNA, 3483 bp, Sorghum bicolor
cattagtaatctctagctttcatctctatttgcaggtgtggcacatgtagtcttgtatcatacctgatcttgctgatcttgtgatctgctcatattgattactttagcatgagaagagtaagatccgaaagagttcaatagtcatgctacttgtagcatcagcttcaattgtcaaaatccaccagtgctaaattaacatcagtaggtgaattttagctgttaatagcaagggtactgtactctgtgtaatggtgaatatctagtgcaaatatttattgaaatgcagtcatgcaaattccatgtttgaattatacatataatgactaattagaaaaacattttcagagtacacgatcccaatttcattctacaagtctagatcacagttcacatgtgttccgtgttcgcctcattggtttaataagaatttaccagacaaatttaaagtaaaaaatttccaaaatgaggcctttaatttagtctagagtcaaatcaggaggaacccgtagccatgtgccagagcatctgatccgcatctcgcaggctgtgcagtattgctaaacaagtgttcttttttggaaccagtaaacaagtgccttcttgaatcttgaacactgattcggcaccctagaataccaagctcctcctgtgagtttcgtgtacgtttacgttctggttattgtttttatgtagggtactttttgtttgtttaatattttttttcccttttggggataggggacaaattattatcaaaggaacacattattacacaggaaaaagggggttgagttgtgtaggctccttacttccaaacaactgctatgctaccacgagttcactgcaagaagctactccatttttttgtgaggtatcaggaatcaggatattgaatcaaataggtgagaaaaataccatgttgcttcatgtggattaaaggactgacttttcttagctcacatatttaattgaggagtgttttctttatcctttcagcgtagctagctagtgatccaactaatagctctgtttctctgcattaattttgcatctttgttttgtctatttttcttctctttagatcaggatatgcatatttattgtgatctctgtcatgtgcttatagttgtaggcctcttaatcgttgccattgacaccagaacaatattatacatatccttaaactctatatagtatcagcccaataagacaatgcaaaatataagcaataggcttttcatccatgttccacggtttaatgtgaatctgttactagctgtttaccttgcagacatgccgttcttaacggcagccgacatattatatcgtctaataataaaatggctaatggcctcgtgacaatcaaaatcaccacatgaaacactggcttcaaatccaagcgagttcaaagtcaaagcgaacttggaatttgcacccatgggcaaagtaaaaggacttatttttttttctaatcatgttaggttcagtctgattgcacattaaccatctgatctcgtcttcttgatagatgtgaagtcaaggtctactcacagtttgttatggatgcagtataggtgcccccagaccccaactgggcaatttgcccatgttaccagttaaactctgatcccaactatctcccactgaaaacaggcgaatcttttgtatgttcagtgttaacagcgacaagtgggccttcctcccactgctctatatatgtatgtccataataaggaaaaaaaagagattccttcatacacgtggcgcttgccttcagacgactttgcatgcagtgagcgcctatatatgtccaccccatcttcctcctaccatcctgtgtagtcaaaccacagcaagttgaactagcaacagcaagcctagtggtgctcatctgagctgcaagtacgtgactgcaaattcctaactagatctagctatcttagtttgtttcctttactaacgctcttttttactatgctttttagaaggatatactatacatggggtccttaggcttgctggttctagcgatcgctgcctttctggagctcaccagagccgactcctggcatggtggccgcgccacgttctacggcggcggtgacgcctctggtactatgggtgagcatcttctatctataaattgagcagttgaaggtatcgatcgatcgctcgttagctactggctgcattacgtgagtgcatgacatgttcttcgcgtctgacgtgcaggaggagcgtgtgggtatggcaacttgtacaatgccgggtacgggaagaacaccgcggcgctgagcaccgcgctgttcaacaacgggcagagctgcggcgcgtgctttgagatccggtgcacgggcagtggcagctgccggtctggttccgccactgtgacggccaccaacttctgcccgcccaactatgcgctcgccaacaacaatggtggatggtgcaacccaccacagccgcacttcgacctctccgagccggtcttcacccagatcgccattgccggtgccggcgtcgtgcctgtccaatacaggaggtacgtgacgccatccaaccagctagctgtagctgtagcatgctcaaaagctggtggcccgtgcgtatatatatatgatcacaccaccacgcctgactgatgatgcctatgcgatggtgatttgtgcttttgtgcagggtggcgtgcgtcaagcagggtggcatccggttcaccatcaacggccactcctacttcgtcctggtgctcatcacaaacgtgggcggcgctggcgacttgacggcggtgtcggtgaagggatcggggacgggctggcagacgatgagccacaactggggcgccaactggcagaacggcgccctgctcgacggccaggcgctgtcgttccaggtcaccggcagcgatggccgcaccctcacgtgcgacaacgccgcaccagttggctggagctacggccagacctacaccggcaaacagttttaaccggccggccgtctgtgctcggcggccggtcacgattagcatcgtgtgtgtgtgtgtgtgtacgtgtgcgtcgccggaggaggggctctgttttgaagcaactcgctcgagagcggcaaggtctctatggttaggggcttgtgacttaacgttgttgcgactgaagcaaggcatgtgcgtcgtcgccagacaccgaagatgggggctctgggcgcttttcacttttcagcaggcgtatgctttgcagggacgcttaatttgttattagggtcagggtgttgactttcgaggcatggaaattgatcaatggatggctgtggtgatgagcagaaattagcagctcgtcacccacgccgtgtaccacgtaattgcagctttgctggcttgaatcaatggaatttagcctagttgttctcgtctcgtttcttttcaattccaccagaattgttaagaacagttaaaagaatgaaaccggtacgggaaaaatctcatacgggccg

SEQ ID NO: 4274 - DNA, 6362 bp, Sorghum bicolor
attattttatgagcaaaatactttcagtggcaaaactgtaaatagctgaaaacgtaaactgactcaaaccgacaggaatacgccttcggaattgaaaagcgtaaaccagtgggtacgccttggaccgcaggttaaactatgaaagaatgcatggactctttaacaaaaaggggaacaaaacggtatcttgtgttttgaaccctagatctcgatcagacggttctcaggccaccagggagggaccaggcggtcggccggccggtttcatgttcccggcgcggtggtgcgccatagcagccgccgccaagctcgtcggagctcgcggctttggcgatatagaccacggttcgtcaaattaaaaacataggagcgaagagaaactccccgcgagctcacctagacgctcggtttgcgttgggaaggaggagggagcgctcggcgcggagaagagcgagaacggccacaatgagatccaaaagcgcgcgggcttgggcggctagggcttggtttcgcgatttagatgcaaaggggagttcgctgcggtgttagggagtcttataggacgcgattgagcaagaaatcccgggttcgaattggaaggtgcggctccccaaccgagtccttgccggttatggctgaaggtaggggacgagttgcggatgacgtgtgggcattggccgtcagcggaagggagaaggagggaggagcgcctgcgtggcagagctgggccgcagggctgctgggcctcgggagagttctaggccgcgcgcagggggaaaagagcaggccggggagaggggcgctgggcctcggcctggttcccaggaaggaggtttcttcttttctttttattctttttccaaaagagttttgagcaaaatagataatataaaatcaaaacaatcagcacaaaaacactatgctccagcatgaatgcataaccatgtttctaatcctatgatgaattttaatcaccataaaattatttatttgctagattcaaaatgctcaccaaaaatacttaaataaatcaatttaattcctattaattgaaatcaaaattttgggtgttacagttttctacctttcttgaagatttatgtaatatggttggtatcaacattgtaaataaaacactttgatatacatgttattgtggtatttagtattgccgttgcgggcacttatctagtatatctaaaagcttatgcaaccaaccaaacaagatgtaaggaaaaccagtataagtaaagccatgcaaccaaacaaacacacaatgtctgcatagaacaaggccaagtccaatctagttccaatcctagccagggtacgatttaacgaggcaaccaaacacgccctttgtttatacttaggcttcatctaaaaaaccaaaaacttttcaagattctctgtcacatcaaatcttgcggcacatgcatggagcactaaatatagataaaaataaaaatcaatttcacagtttacctgtaaatcgcgagatgaatcttttaagcctagttactttataattggacaatgtttgttaaataaaaacaaaattgctacagttttgaaaaccaaaatagttttctgaactaaacgaggccttaaagccaggtattagggtcactgcaagaagaagcagcgatgagaaaagacagccgaacacgtgtggagcaaaaaaaaaaaatgatggactaaagcctgcatttggttcgctatttgaatgctaaacacccccttggtagtagtactagtaccgatgtcaatcaagggcagcaatttgaatttcaaaaccttgccgttggtgtggaccaaccaacggcctaatgtcctccgtggcgacataaacagacctggccttctacccctcgccgctgctgcctgccgggtcgggacccaaacctcccgctcctccgctccccccaaaccgtatctctagcccgaggagggggattcattcggccagcggacctcctccaccgccgacgagatccacgatgtcgaccatcgccgcctcccgccgctcgtcctcgtcctcgtccgcggccgccaagcgccccgcgatttcggagggcgccgggggacccaaggtggccgccgcgcaggccaagaagcgcgtggcgctcggcaacatcaccaacgttgccgcgcgaggagggagggccgtcgttggcggcggccttgggaatgccgcgccacccaccaccagcgcggtatgtacgatacgactactctacccgtcaaggatcgttgcgggattggggaatttcttgcggaactcgtagtgctttcctcggacccaggacccctcgatgggcatggactaatgtttctatttctgatttctgaatggttcgcgaatcgggcgtgcctttcttgccttcagagatggatcgatggcacttgcagtctattgtttggggatttcttgatttagaaatgcagtcttcgttttgctaagagatctttgcaatatgcaaggtttgagtttttgtgccactctaggagatacgctgcgatttggtttctttagccattcgccactgttcgttgcgttcccgttcttgagaggctgtcacctctacaacattccctgaatacgttcttatcctgtttgtattgggggtttagtttatgagcgacgtcgcctcttcaacattccctgaatcctagtacaaattttgtgatttcctactgttactcacagtcagtattgcaactttacttgagcccttgcttttttttttgtcatcataaaaagcagagaaacctgcaacgtttctttctctcgctgcgctgcccatggacgttcacaggggcgaatgcgtgcactgtatgtacgagtacaaataataggatttttatgagatggacagtagctttccaccggggcgcagttccggttcgaatttcgaaacgatttgaacccaaaccatccgcggccgcgaggctgagctgatgggcggccccgcagctccgggatgagacggggacgtgcggcttggatccctccgcgtttcaaatgggtgtttccctcccttcactgcctgcagaccaggcggctgcacttgaatttggcgtgaacaaaaaaggcaaggacactcaggcacgaggatttggtctttccaaagccgttgccgcgccctagatggctagattgttgcacttgcactgtcacaaacgagtccggagtccccaccaccacgtccacgtgtgcatactgtttattggtttaaatcttggattctggtcatggtcaaaagccaaaggctagaccttccatgtcattttcgaaagaaagttccttggttttcgcagtcgtggcaatcttttgtttttgtttgctttgcagtcttctcttggagtattatattatacttctgcagtcctgctattatttttgagcttatccgttttgttcaaatctcatgcagaaattgaatccagcggtacccttgaagaagccatctttggcaagtgctcggagtgtgagctccattcggggtcaagctgtcaagtcggcttccatcaagccagctccaccagtgtcacgccatggcagtgcaattcaaaaacataatgttcctcctcctaaagtgcctaccattgccgatgtgccaagtcacgctcctgccttggtaccctgcaccggcttggtgtctcctggacgctcaggagattttgtttcgattgatgatacgatgtcgacttgcgactccatgaagagcccggactttgagtacatagacaatcaggattcctcgatgctggcttcattgcagcgacggacaaatgaacatctgcgaataacagaggatagagatgttgaaggtctgctgaaatgcatattaagattagcatttttaagtgtaatttgttatgcttttttgttgacccagttgcgtatggcctgctttcttttgcagaaaataagtggaagaaaaatgccattgccccaatggaaattgaccgcatttgtgatgttgacaacgaatatgaggacccacagttgtgtgctactctggcttctgacatttacatgcacctgcgggaggctgaggtgacacattcttttctgaactctggtgccgaaatggtttcacttaagcactaaacataaggaatttttggttgactgccaaatagctacattgatgcagctaaataagctaggctgtaatatgattacattaagtgtgttaggtcatatataattgcagttcaccagtgtgggtgcaatttctgataatttttatgtgaagttttataattagcacattaattaaactcgatttgattgaaggaatgtctatgttttgttccgaagaaatttgggctacacttgatctgtacatacgttaaagagtcctagaaaactttgcttcttccttgattgccactaatagtgctttactttttggcagacgaagaaaagaccatcaactgatttcatggaaacaattcaaaaagacatcaacccaagcatgagggcaattttgatcgactggcttgtggaagtatgctttttctgctataaataagaaaagcctaaagagcaatcttgtcaactttctgttttattcattatttttccctcatgcaggtttctgaagaatatcgtcttgttcctgatactttgtacctgacagttaactacattgaccgttatctttctggtaacgaaattaaccgccaacggttgcaattacttggtgttgcttgcatgcttatagctgcgtaagattctgcttctcattccatttatttttctttgagttattatcttcagttatcattacaacgttggcatactgattttgacatgttggaaacttcaaattcagaaaatatgaggagatatgtgcaccccaagtagaagaattctgctacataacagacaatacatacttcagagatgaggtttgtgatttgtttacgtcctatcattcttaaaaaaaaaatacagcagaccatatcaaatggtcccttgtttgtcattgtcactaactaacttgtacgttaacaggttctagatatggaaacttctgtactgaaatacttgaagtttgaaatgacagcacctacagcaaagtgctttttgaggtgctttcctgttctatttcactttagtaaaatttatgatgattatactaatctaacctaccactaactcttcaatttttccttacaataggaggtttgctcgtgctgcacaagcgtgtgacgaggtactgctatatagtcagcttctggttactggaaggaattcctattaagttacaaacatgacaacaattcactgacaatttctcattgtacaggatcctgctttgcatctcgagttccttgccaattacatcgctgagctatcactactggagtacaatctactctcttaccctccatcactaatagctgcatcggctattttcttggcgaggtttatactacagccaacaaagtatccttgggtaggtggaataatcatgttgctgttccatctctatagcacttgcctagtgaaatgtctcgcgagctaacttacacatctcattgtcaattggaagcagaattccacacttgctcattatacacagtacaagccgtccgagttgagtgactgtgtaaaggcattgcatcgcctgtgcagtgttggttctgggaccaaccttccagcaatcagagaaaagtacagtcaacataaggtaattggacctggtcacaaatttcttcagttaacagcccttttgatagtactaatgggatcctctccctttccttcctcagtacaaatttgttgcaaagaagcagtgtccaccacagatacctactgaattctttcgggatgccacatgctagactagaatcccagaaggccagaagtaattccagttgcttactggaatttccttgatgtggctcaaatgcccagtgtagcacagcacaactgtgcaggtgattagttgatgcaagtgctgatgacccaggttattttaggtgattacaagtgtgtagattctagatcaatgtttgtggtcatgttagggcattggtgtgattttcctttcctgcttccaatctttctgtatctagaccaatgtttccaagcgctttataaatcggagttgtgtattagagcataatatctcgtacgttaactgaagaaatttgggaccaggttggtagagtttgtatatatgaagatgagagcccaaattcatagttggctgcaatgaggtctgagctgcctcttgacagtaagacctagaaaacagatgaatctttcatcttaagcctgctgctgcttgttcctttctaacctactactactgtcttttagtgtattttctttaagctgt

SEQ ID NO: 4275 - DNA, 5788 bp, Sorghum bicolor
ctcgcgcgccgcggcgaggcgggcgaggaaagggaagggccgcggcgtcaggcacctgctgtgcaggttcttgatggcgagcgccgccgcggcgcccaaggccctgtggccgcgtaggaaagacggcggcgtggcttaccgtccaggtctgctcgtctgcctcggatatggcgtgtgactctgagtgagatgggagcccgcgttcgtctccgccatgcttgtgctccacatgccaatggtctgatggtatggaggctggaaatctctccgcccaccttattacagttactagggctgtgaaaattgttcctgcagatcataaaaatatactgtatttggatgctttgaattcgatgtcatactctaaatttcgtagctgtagttgacagcaactttgggccagtacaaggtgtcaaccagtatgcatgctgtaaaattatatactccatcaaaaaggttaagtcttcataatatttgcaaattaaagccaacatttggaacgtgagtgactaaccaataacacagttcattgctggattgagagtagctcgattggtcaagtttttatgtggctaaaatgtcgatcaggatcgaatctccaactctccatatgtgtacatattgtggccaaatattcttctgataatggacgtaagcgacgtaactgtcaagaacaaagcatgtggtcagtatcaaaatccaatgccctatgttgcatctggctctctggaacaaaatgggagacgactctgtcttgattttctgagatgggatgatcccgtattttcatttgcttgaaacaacagtcattcttgtcctatgtttgatttgagggatgacaaaaggagatgatggatgtcgatttttttttatccatcagccacatgtgggtctgttaatcgccttgttcttcagcactactttaggtgtacttttcagcaaagtaaatcagtatcagcataagccaaaattcagcgaaaatatattgttcacatggtttttttaaggtagtcaacacacacatattaagcaaataattacaagatttctataagattttcttgcaaataactatttgtcccttctcatccctagtctaaacatcattgaaaacaggattgacgtggttggtctcatgaagatttcagatgatctctaacatttgttatttgcgcattctctctttgggttcttgtgttcaatccaaaatgttttcaaatgttctaatttttgcgtctgtttttgtaccaacacattatttatttttatttatcatgtttagagcaactcgaacagatatgctatccatgatatctagactatttttatattttcaaagcaaaaaactaaagtccaacaggtgtgataactggtttgctaaaatagcaagtttgctattcctaaactttcgcttgtcatatataacatgtcgtcctcactaactatcatatacaaaggctgttgtagaactctatgctttaaatgagttttttattatatataatggctaaatcttgtagtttagaatataattttacctaatctcttggagatgctcttacattggttctacattccaaaaagttccataacaattggttaggagagatcgaaggggcgggggagagttggagagagaggatgattttgctggcacagatagcacaaatatcacagcacttgcatatccgggtcacccaccgttttaaccgtgttcgacttttcctcttctccacccaaacggctaaaaaaattcggagcagcaaatccaggccgtcgatcatggatccgagcgccatcccggcaccagtttccattaataaaattccgaccgttggagaaatccctccaagcccaacacctacaaagccaccgccgcctcccgcttccttctccgccatacctcgtgcccgacgagccctagggaccgcgagagaaggattcgaagggagattcaagggggtttgcggattcgctcctcgtgaacggcggcggcggccatggcgtccaagaagcaggcggggccgggattcgcggttcccgctcaggaaccgaagaacggcggcggtgagtttcctccctggcgcattctccatctcgtttgattgattcttgttctggttccggtgattcggggggattagagtagaaggatgtggattcggatgctgccgcgctcgtagtgttctcggatgtcctcgtgcgcgctcgttgattggctggcgcgtcgcagtaatggtcggtttctttcttggtcgggctttgcatagtagatcgatcgacgattcatgaattcccggtcgatcatgtcttcgcataatggcatcgcggcgctggtgtctagttcttcgtgtatgggttcagttggggatcatgttcttctgtcgccgtaaagggagcgcctttctggaaacgaaaaagttcgttggcttttggtctgatggattcggcttcttgatctgcaattagaagtcctgttttggtctctgcgttggacggtctcttgggattttccgtgtggattgttcgtgaattgacagtttgacagtgggtatggccaatgttctttcttggctgccgtaaggccgtgacgggtcatcgatcggtttgattacacctttgtgctgttcttacttgcgggtctctgattccatatcacgtagagcaggctgggtatcgttgcgattcttgtcctgtttgctgaataacgattgcagatttttattttttttcaacaattcggtttatgtgcgcgtctataccaaatcgtcccttgtgagcttattaattttggtctgtatatgcatgattataccaaatttccccttgtgattgcgattcttgttcttattgaatttctctgtcattagtgtaatgaagaaatccatgatcttgatgtgaacatgcataatgactgcaggatcttaactgctggtgtccataaagctgtggtgaatcgttaataaatgggaatatgtttctttctctctttattctgcaagattttatatggtgtaccttcagattgccgttcctatgtagcactcatagagtcatagtaatggttaaaccttgctttgtccttcacgtgattttggtactaagattctctctgctaatgcacttatgttcgtcttctaaaaattcaatttgatcagatgcggccagactcgtcaggaagccaatggctacatttccacagcaagcggcggcaagaggccgtagggcacttgtcgacgttggcaatcttatgaatggccggccttctcttgtgaaccgacagaagcaagcggttgcagcaacagcaaacagccataaagcagtcgacgttggcagcaagaagccactggttcctcaggcagcagcaagaagccggcgatcacttgccgatattaagaatcctaggatcaatgaccgtgctgctcctgcaaatcgtcagaggccactggctgctgtgtctaaaaggaatgggaaagcagtaatgctgaaggaatgcaaggtgaagcctgaagtcattgtgattagtccagataccgagaaggagaagaaagccaaaacctcagggggcccgagagtctgtaggagggtaccaacactttttggtaatttgacaaaatgcagcagggtatgaacacaagcaaaattctaaggttaagactgtctctttcttttcagtctaagaatgcttgtgtacccttttgtctgtacacaggcttctgatggggttgtcagcagcccgaagaagacagatccatatgacattgatacacctgattcttgcaatgagctggcagtggttgaatatgttgaggacatctacagattctacaagagcactgaggtgagatcaattcttttatgataaaaatgtgaagccacagtttttttttatcttgatgcattgctgattcaaaggattgttgaattgaccatttctgaccattgttgatatgtggcgttgttgcttgtccagggcacctgcctgcccctcagcagctacatgagctcgcagactgaaatcagcgagagaatgagagctatccttatcgactggattatcgaggtacagtacaggcttattctaatgccagagacactttacttgaccgtctacatcatcgatcagtacttgtccatggagagtgttccaagaaaggagctacagctcgtcggcataagtgccgtgctgatagcaagcaagtatgaagagacatgggctccactggtaggcttccccagaatattgctgatgttgtttctatgtggttctaaccatgctagtccattcttcgattagcttacccaaaacaacaatgttattgcaggtcaaggatttgctgtgcatttgtgacaatgcctttaccagagaccaggttctgaccaaggaaaaagccatcctggacaggctccattggaacttgacggttccaacaatgtacatgttcattgttcggtatctgaaagccgcaatgggcgacaaaaaggtatagctatccactcatagtagtgtattttaccaccacatattttagatattgacatgaaatctgccattttcttccatacttttggtgcagcttgagaacatggcattcttctactctgagctggcattggtccagtacacgatgctggtttaccctccatcagtgaccgcagctgctgccgtctatgctgccaggtgtacccttggaatgaatccactgtggactgatattctggagcatcacactggcttaagtgagccacagttactgtacgtccttgatcactatatcttgcctttgaaatccgattctaatccgaaacattgataatgtttactaagttagtttcatgcatattatctggagtctttaaaataaaatgtgattttgacatgctattgcaaccaattccatttctgtgaagtattaagtatttaactgaatgatcatgctaaaaaaacatcctgattatgtggaccgccatccgtcatttcatattctgtgaacactgaaactctatgaagtgcatctttactgtagtaggccagcaaagtctatgtatagcattagcattagcagaacacaacaatgtaaattacttttcgcttctttggctcatgactagtagtaacttaacttgttgggggatgatgtaactgcagggattgcgctaggcggctgatcaacttccatgccctggctccggaaagcaagcagaaggcggtgtacaagaaatactccagccccaagctcggggccgtcgcgcttcaataccctgacaagaagctgttgccagtttgagctggggtgcagaggctcgctcgctgctgctcttttgttttttcttttcccttgtcgtcgtctcttgggaaaacgactatggatgcctgctgtatcatcgcttcgatggtaccatttgtttgggtcgtgtgctctttgctttgctactgaagcggagcgtgtgtttggtcagtgtggtacttgaatcgtcggcaaatattaaatgattatcagtcggtttggttaatcatgtgatgtttgttgaaaggttcttgtggaaatgtgatgtgaagcagctttgcactttgaccttgtggcctgtgagcaatgtacccccggttgtttacgtgaccaacgttgtgagttgtgacaggccggctgccgtggcatggtcgtcagcggcctacttgcctcaccggcgcctgagctccgacaccaacatcggctgcgcttgtgacagcactgtttgtgatgcagcagcagcagcaaagtcttcaggtctacactaccagttggaattt

SEQ ID NO: 4276 - DNA, 6243 bp, Sorghum bicolor
agctatctgatagcaaggctgttgtggacctctttttttttaagaagttatctattttacaaaatagctaaacattagaatttgactattaattttagccaagctcttggagatgctctaaggtgttaagcctggcttgattaggaagccaagggggtttggaccctggtttatgggaaacggctagggcgagcattttcttggatctaggttagggctatgcgaccaccatctctgctcatcactgcttgtgctatcacctactcccttcgtcccaaaaaaagtgacgcttttgactttcaaacatcgtgtttgaccgtttatcttattcaaaaaatttatgtaaattataaaataaataaatcattagtaagtatctataatgataaaataattcttaacaaaatatataatatttatgtaaaaaatttgaataagacgaatagttaaataaaatgtctaaaattctaaaaccacattctttttaggatgaagggagtattatgccgttgtcaagctgccaagcacttgcgtcacttgtgttgccacccttcgtcccgtttgcacacaccgactaaagtctcatctgcaatggcttcgacttcgcggtgggtgcagactgccactacgcttcgaggaagccgtcgccggtgattgcatttgcatttgaagggatttttttttcataaacctaactttgtgattttttcatgtcagaggcattatgattttttattgtccacttaataccgttaaatgctagaaacgaacggaaagccatagaaggaacgaaagttggtttaaagaaagagagttcaaaaaaaagaactatacaaaaaagaggtattttttgagggccaagtaagggcatgtttagattggagatgaaaaatttttggatgtcacatcggatatgtcggaaggatgtcgagaggggtttttaaaaactaataaaaaaacaaattacatatctcgactggaaactgaaagacaaatctattaagtataattaatctgtcattagcacatgtgggttaatgtagcacttaaggctaatcatagactaactaggcttaaaagattcgtctcgcgattttcaaccaaactgtgtaattagtttattttttatctacatttaatattccatgcatgtgttcaaatatttgataggatgggtgaaaaaattttaggctgtaaactaaacagggcctaaatccttagcataacactcttggcacgatgtacagagaccaaaatccagtcgaatttcaaatttggataaacaaatactcctgacctgatgtacgcaaaccaataaggccttgtttagttccgaaaactgaaaagtttttggaactgtagcactttcggttatttgtgtcaaatattgtccaattatagactaaataggatcaaaagattcgtctcgcgatttacagataaactgtgcaattaatttttattttcgtctatatttagtgctctatgcatatgccacaagatttgatgtgacagagaatgttgaaaagtttttggttttcggagtgaactaaacaaggcctaaaataaaataaaaagatttgccatgtacgcaaaacgagacagtcagacagcccatcctgggccgacgccggcaaaccagaagcaaacaaacggcgagacgcgcccggggcagtagcgtcacaccgcaacaacctgttccgttccgcgccggggggggggggggggggtggggtggggtggggtggcgccggggcaacaccgtcatttccgctgacacggaagcggacacccgaaaaatttcaaaatccaagcgcccaacgggccgttttcgaacccgacgcagccgcccgtccgatgggaacgatcggacggcctccggcggtcgacggcggcgttggagggaacgcgactgggccgcctgatccggtgccctagccccccgcgcccactataaaatccgccccctttctggccactcgctcatttcatttaccacaccctcccccttcccctccccgctcccccctcatctggacggccgactcgcttcttcttctgtgaggtaatgcggcggaatccttgtgccatattacgattttgggttttgttttcgtgttccctccgggatttatgtctggtagtagcagatttggggacttttttttggtttcgttttgtgaggtttgaattttggggctagatttgggtggatgttgcggtgtccttcgctgctggtgcggctatgtttttttattagatctgcaccgctccaaattttgtttaggcgtttgattgtcagatcatcagtcatctttcgctgcttctggattctacatgttctcggttcttatattgggatttgagatttggctttgttcataggtgacgcgcttccgtgaggtattctcatagaatttcaggtagatctcaaggggctcctcacttcccttgtggtgctacagccagtattttaagttttctgcagtcctctctctttttttaactgcactttttcctttattcccggatctgattgatttcgtgccggagcttgttattcctccatagatctggttctccactccctttcggagtaatgtctccatcattttcacgctactaaccgcccttctgctcccctcccacctgcagctaccaaccttgagatcaagccatgagggagatcctccacatccagggcggccagtgcgggaaccagatcggttccaagttctgggaggttgtctgcgacgagcatggtatcgaccccaccggacgctacgtcggcacctccgacctccagctcgagcgcgtcaacgtctactacaacgaggcctcatgcggccgcttcgtgccgcgcgccgtgctcatggacctcgagcccggcaccatggacagcgtccgcaccggcccgtacggacagatcttccgccccgacaacttcgtcttcggccagtctggcgcggggaacaactgggccaagggccactacaccgagggcgctgagctcatcgactccgtgcttgacgtcgtgaggaaagaggctgagaactgcgactgcctgcaaggtccctttcatttttagcatccttaaatgcttactgttaattatcttttgacctgaaagcatactgttaattatgcttgtgtgttagatctgatgagagcactttcagatccgattttgtctattactcttggatggcactatcatgtgattatttagctttattttaagtgtgctttggtgcagttacttgattgttagctagtgtgcgtttgctggtggactttagtatattgttgttgctacttatttatctaccggtcctttgttttattgactactatactttaggattgaccctaagtattgccagattgtgtatttttttgctgttaggtgcagtcacatgagcctgttcaccaatatttattttcaatggttttgactgcaaaagaagttcgatccatatatgctgtttgatttctttcatacctgaaaggctgtttagaagtgttgtatggaatatgctattggcatctgtaatagatattttgttctgtgtgatattagactactcattgcctttcactttttggagagaaaaaaaaagagtttctctatcttgtctgtacacagggttactatgacaagattgagaagtccttggtctcattgtgtaattttacctgtttctacattgtgttggctgcaacttacatttttttttaacttgctgtgatcaggcttccaagtttgccactcccttggaggaggcactggatctggaatgggcacccttctcatctcaaagatcagggaggagtaccctgatcggatgatgctcaccttttctgtgttcccctcacccaaggtgtcggacactgttgtggagccatacaatgccacactgtctgttcatcagttggttgagaatgctgatgaatgcatggttctggacaacgaggcgctttatgacatttgcttccgaactctgaagcttacaacacctagctgtgagttgatttaaactctaagatcaattaccctgtgttgaaaatgttttatttgtgatatgctttatcaggtagatttatgttccaaatctccaatgatggccttgccacaataatatttttttgctcagtaatttaaattcagtttttaatatttgtattgccagatctgttgtcgttctttggcttggccgtaattagctgattagttgcacatggctgccctgttaaaaagagctggcacctgatgcgtactagaataattgatgtgttttgcacttgtcctattcatcaattaagccaactcattggctgttcttttcaatgtcctgttctgtaatagaaaaaatagattagttatataatcaataaccctggctgatctggtgaaatgacttcacacctgtctagacattggctattccatctttaagcttttgaaattatagtgttcactttctgagtaattctgattatttacagaaatcatgtagtagtttatattatgttgaattcttgaatactgttgtgacatagtttgtttctgaacagttggagacttgaatcacttgatcagtgcaacaatgagcggagtcacttgctgcctgcgcttcccaggacagctgaactctgacctgcgcaagcttgcagtcaacctgatcccattccctcgcctgcacttcttcatggttggctttgcgccactcacctcgcgtggctcgcagcagtaccgtgctctcaccgtccctgagctaacccagcagatgtgggatgccaagaacatgatgtgcgccgctgacccgcgccatggccgctatctcacagcctctgccatgttccgtggcaagatgagcaccaaggaggtggacgagcagatgatcaatgtgcagaacaagaactcgtcctacttcgtcgagtggatccccaacaacgtcaagtccagtgtctgcgacatcccgccgcgtggcctttccatggcctccaccttcattggcaactccacctccatccaggagatgttccgccgtgtgagcgagcagttcactgctatgttcaggaggaaggctttcttgcattggtacactggtgagggcatggatgagatggagttcaccgaggctgagagcaacatgaatgatctggtgtccgagtaccagcagtaccaggatgccactgccgatgaggaggcagagtacgaggacgaggaggatggcatccaagacgagtaaggtgttctggactctggacagccacatatttgtacccctctctggacctggttttttctttcaagcttgtgctttgcctatggtttgcttattattgtattcgcgcatgttaatgctgggtatgtagtagcacttctgtggggtagcatgctgtatgctaccacttgccctctttcgccaccacaaagacttgttcacctgcactgcttgatatgccatggcttatatgtgaggagtatttgattattgtatctgggtgcttgatgctgtgatggttcttaacattaagaatgcgaattttgtcccgtgcacttgtttgctctcttggatcagcacggctcggacatatccaagtgctgcctcgctggtccatggggcaccggatacggccggccggatctcaaccccatcgatagctccagagccgatttctgctgcgccatatggactcaagatccgcgttttagtttcaaaaaaaaaaagtcgcgttttgcagattgcctcccaccgtagtttttctccaggagcttgttgggagtgtcgcatgggctcatctttaagatataaaattgactcccaatgatttaccaatacctgaatacctgaattttgtaatttgtgttgtcgcgttaagtctacctgaaataaaaattggccaggtttgcgaagggaaaaagtacggagtctcgacatcagacggagacttggccttttccttgaaaaagctagacaatctctgttttggcttttaaatacatacggttgtaatgacaaaatactgttggctgatttgttgtgagagaaaaacactgttgaatgaccaacagattcggctgataaactcaagtgaacataatacttcgaatcagatttttccgtcttcagactaggattctaaattagagactagaaacagtgttccaaagactttagaagtcttcaccttttaaatcgatgattgcggcccttgttattgacgaaactttaaatc

SEQ ID NO: 4277 - DNA, 2686 bp, Sorghum bicolor
ttttaattatctactgtccactgacatgcaactattatttgtattctattatgcaaattattattttaattcaagtcaaaacaatcaggtgttaagcaccagagtttgaatgtcatcggtaatgacatcaacatgtagggcagatacagctatccaactaaatgtaggcagttcccaaagaaattagggtgtatgcaatatgagtgcttattttgatgtggtggagaacatatttttgaagtggtatacttagttggatttgtacaaaacggaaatgagcttttggcttacagttattgttatgtgccgttgcctacactgcttggttagaaacaagttgttactttgatttctgtagtgcaaactgaagaatcccatgcagaaggatcttttttttcgagaacatccatgcagaaggatctcagaaagatgaactgtgtggcttgactgtgattgttgagtccatcatagtacaactccaggtatggctggaataatatctataataaagacaatagagttatcttgtcatgtgcatgtttatttctgtctcacaccacatgaaatgttttcatttcttgacccacttcagtccttgaataatgtacatcagtgtttcctttgttatatcgttgtctgtgattttccttactgtagatgatcagggcatggataggtgctgaccaaaagttacaagtcgggatggagtagtaaaatatcggtaataaaaaagcagaggaggaaaagaaaagataggcgtaggggtaggataagctggcaaaggtctaatcttgcaaggcacatagcatttcctcgatttgagggtatcaagatccatcaatggacgatctgaagataggcctgaaaactggcgacaacacctagctctgaatgataagacctgaattattggaggggactttgcttgtgctttctccacatgcgtagatgcatgaatctatcagatgcctgtccacaccagtcttcaaagttatgtcaaatcaggaataaaataggtagggaaaagcaatcctgtacctccattaagtgatacaataatgttagataccataactagcttatcctcttacacagtttactgtagagtgatgctgtggggcaatgaaaaccataagattaaaaatgccagggcagatgaactaatactagtagtacaccgtgtgatgcatgctttctttttctaggccagagatgtacgtactttaagactttattcaagtgcagcatttcagatatttagccccatcttttcattcttgcattgtacttgctgcatgctgggtcctgattcctgaacttattttagtattgttaagtataatatgcaatttatattatgactaatagtttaatgtttgtttcctgatgggctaacaaaggtgatacttgatgaattgaagtcaacatgctgacgctaacatgtaatcaaacgtaggtaacatatattcatgattgagcttttttgcacgcgctccagaagctcctttttttttaagacatctctccagtagcttgtgttcaaattcagactatataccttttaaagtaatactctgattgaccagcatatgggtcacatcttctattcttcttcttcttcttcttcttcttcttcttcttcttcttcttcttcttcttcttcttcttcttcttcttcttcttcttcttcacaaactaattaagcagtctagaatatattgactatacaaatcatgtgtgaattaattcatttatgcgtcttgatgttcaaatgatatttaactatggtgtcactctggaagttgcaaaactttcatattagtgctcttttggccctatgcacacatctgcagaataatgtggttacatatttgcttgagaatgcagctctgaacagttgttagctcattattatttgcgaagagatataattaagcagatccagtatcctgagaaaataatcccccccctccccccccccccccccaaaaaaaaaagaatgcctgagaaaagaagatatattgatccaaaaaaacttcagtgaagccaaacaaactagaaaactgcactggctgtcaagaaatgtttcttgtaaccagattccatctaccacctacattttacacaaaactttggagcatcttagctcgctaaagctagccgtcctgccaccaaatctgtcttgattgattggactcttttcaagtgatagatctgcctcgtggatcttgaaactcgttaagctcgtccaggatgagttggtgctgatattcacatctgcagcttgttagtcgagacctgaaaaatcatcagccatgttctctattaggataaaaatgttgtgccagattccatgatttgtgagtcagggcacacactcgcacttgctgactatttttatgtttcagcttcatttctccctgtagtatctgtcctgttgccaccaccatccaaaaactgattgctttcggtttgtgctgaatagggcacactaaaatgctggttctcagcctggaatcattgtgaaatttggatataagagatccagacaagaattggtgaatatcttttcatctatttgtatactatttgtgaaatgctacctgcacggtagtctgcaattgaggatctcctgtatttgctccctgttgagcttcgttattcaggctctgctgctgctgagtag

SEQ ID NO: 4278 - DNA, 3329 bp, Sorghum bicolor; identical to SEQ ID NO: 3644
  misc_feature (722)..(821): n is a, c, g, or t

SEQ ID NO: 4279 - DNA, 5434 bp, Sorghum bicolor
gcacacttcactgaaaaagaaatattttttctcaagagcaccatgcattcttcgaacaattggcttctccgatgatgatgttgatcaaatatctttagatttggtcaaaatactgttgcaattgtttgggcaactttcatgttgattgaagacgtcaagtttcactggtcgaagaagctcaagacggcgtgttacttcacaatacatggtgctcggggactagctgtgggggtataaactcctatacccttacggctagacttgggccaggaggcttggcccattacgagacaagctcaaagcttgatccgacagcttagagtttcgcgcaagggaacaagccgtgaagatcaagcaggattctagtcggttagaataggaattgatatcgaactatctatggcaattgtaaccgactaggattagtttcgaattgatatcgaactatctatgacaattgtaaccgactaggattagtttccagatctgtaaccttgccctccggactatataaggaggggcaagggacccccctagaagatcatacacgattattctctcaacacaaatcaatacaaccagacgcaggacgtaggtattacgtcaactcggcggccgaacctggataaaaagctcgcccgtgtcttgcgtcaccatcgagttcgtagtttgcgcaccgtctaccgataaactactaccgtgggtataccccaaggtagactgccgaccagctttcgtcgacaaggaggatatttgataattttttatttttaaggagctattttaccaaactgttgaataaagtttttttctctttttactaaaatattaagatagtgaggccttgtttagatcccaccaaaaactaaaaactttttaagattctccgttacatcgaatcttacggcatacgcatggagcattaaatatagacaaaaacaaaaactaattgcacagtttgcctgtaaatcacgagacgaatcttttaagcctagttactctatgtttggacaatgtttgtcaaataaaaataaaagtgctacagtagcgaaatctaaaaggtttttacaactaaggcctcgtttacttccactcaaaaatccaaaatttttcaaaatttcccgtcacatcgaatctttagacgtatgcatggagtattaaatatagacgaaaataaagactaattgcacagtttgatttgtattgacgagacaaatcttttgaatctagttagtccatggttggacaataattaccagaaacaaacgaaaatgctatagtgtcgcgaaatttttttgttgaggaactaaacacggcctaagaccttgtttagttccaaatttttttagggaacgggcactgtagcaattttgtttgtatgtgacaaatattgtctaattatagactaactaggcttaaaagatttgtcttgcaaattacaaataaactgtgtaattagtttttatttttatttatatttaatgctccatgcatatgtccaaatacgtgtgtctaaaattttaatataatagagaattctaaaaaaatttagattttagaaaggaactaaacaaggcctaaacaaggctgagttatcttagagatgctcaaccatacggtacaattgggtcttgtttagatgtgaaaaacttttggatttcgctactgtagcactttcgtttgtttgtggtaaatattgttcaatgatagactaactagggtcaaaagattcgtcttgtgatttacagtcaaactgtgtgattagtttttattttcgtctatatttaatacttcatgcatgtgtcgaaagatttgatgtgacaagaaatcttgaaaactttttgaatttcgggtgaactaaacaaggtatctgaattgcgatacactttatggaaaacaacgtccaataaattgtatcgtaaataggagtatatccgtgtagattccaaaacgggcgctcgcgtctccgtttcccacacgccaaaggtgtgaaatctgaagcatcatcgcttattctgccctacccaaaacgaggtcggcgaccaccctcgcaccgcgcacgcgtggcggtagcccagcactcctgcccgcgcacggtacctaggctccgccccccgcaacggccacctgccggtcacagacccgcgtcgcccaccggcagccgccgtcctctcgcgtctcttacctcacgcgcggataaatagcaaagcacctctctgcttctccgccatttctttcctgttcggatcgggtcaggtcagtgctccgtgttgcgtcccctaacaagaagaaagaagaaaagaaaaaggagagtttctttcgggtcgtccttctctcggattgtcgaaaggccgctcctttaggagatttgcgcgcttctcgtcgagattagtcgtccggtgttcggatcgagctgtttggggtggaggaattttgaggccaagacaagaagagagtcggaatcggatcgggagttcttgtggtccgaggttgcgggaaaaaaagcgagggatttttgggaggatttcttgtttgaggggaaaaaaatcggtttgttgagcggattagaggcggagatgggagccggggctgaggtcatgcatcaggtcgtgccgctgctggagccgccgttccaccggtgcgtcgttaagagcgtcgatgtcatggaggaggtggtcaccgtggcgcctgggcaggtgcagccggcgacgtcgccgaaggcggtggtggaggttgccgtagaggtgcccgatctggtgagttttcgatttcagctgagcagaagtttcggtttttttttcttctgttaattaattaatgttgtggtttggtcaaattttacttggatcaccaaaggaaattatacttcgtgtagtatttgctctgctttcgaatatgtcttctcgagtacgataatatggtgaattgcaggaattgataattgcttaaatttccaaggagcagggctttctttcctctctttttttttgggggggggggggggttgctgtttctgtttgttcatatcgatttgtgtagcatatatattgataagttgtatatttgaaatgtgtagctgcctcctaaattcgttgctgaagttatcttagattctaccctcttgtgacgtattgctggcttcgtctttgtaattggttgtgctacttaatcaattgattgttatgcgtgtagaacaaaaaaggatagttgtttggtcaattcaatacgtcatagttggtggctcttaattagaaccagaacaaaagttcatgatgtgttttgtgttaattaaacatatcagagaagcaaattctaggtttatatcacattatatgtgactacaaagacgccagcatagctaacagttttgtgcttgatgcaggagttcaagagagcttctaatgctgggagtagtgtatctgcagaacaactgcaatttgtccctagcattagatctggtagctttgctgatattgggcctaggcggttcatggaagacgaacatattagaattgatgatctttctggtcatcttggctcactgttgatggtctctgcacctagcgccttctatggggtatgtactgtgaatgatgttaggctaattattataatcataagttcacgacctaaatttctgaacccaattgaaagtgatttctcttttgccatttaggtgtttgatggtcatgggggttcagatgcagcagcctacatgaaaacacatgcaatgaggttgttctttgaagatgctgacttccctcaaacatcacaagaagatgaaatatatgctggatctgttgaggattcagtccgcaaagctttcttgcgggctgaccttgctcttgctgatgattccgtcatcaaccgttcttctggcaccacagcgctgacagcattggtcctcgggaggtaagttgaaaatggaacccaaacctctagtagagatcttaattgtcgtttcagtgatgtgatgtggtgtggtaaaccattctaatctgtggttcctatcttgcaggcaattgttagtagcaaatgttggggattgccgtgcagtcctgtgtaggaaaggaacagcggtggagatttcaaaggatcacaggccgacatatgacgcagagcgtcaaagggttatcgagtgtggtggatacattgaggatggctacctcaacggtgtactctctgtgacccgggctttaggggactgggatatgaaactgccccaaggctctccatcgcctcttatcgctgagccagagatacactggaccaccctgacagaggaagatgagttcctcatcattggctgcgatggcatatgggacgtgatgagcagccagcacgcggtgagcacggtccgaaaggggctccggaggcacgatgaccctgagcggtgtgctcgggagcttgccatggaagcgaagaggcttgagacctttgacaacctcactgtgatcatcgtgtgctttgtccctgacctcgcgggggctgcctcagcagctgcgccttcttcagagcaggctccggctcccgctggaaggatcaggtgctgcaagagcctgtcgccggaggcactctgcaagctgaggagatggcttgagtctgaccattagacgctgctgtagagagaggcctgtgtttctgtgctgtggctgtgtaaatatttctgcgctgatgttgttcgtacgtctagtacggctgtgcttacacggccagcaattttgtagcgagttcctgaggccgcggcgccgcctcttttgtttcacaccgttttgttggatgtacataccattgttgccgttgctactcggtgcggctcagtttggcagaggggatatctggcctcaattcgtttgtcttataagctattttttttttctgtttagtgttttttctcacaataaatcataaattactgaacaatattttcagccataactttttagccataactttttaggcaagcaaacgccatgtaacccagtttggctgatgggatggtgatttcatcatacttattctgtgcagttacttagccatgttcggttgtgaagatcagaaccatcactgttcgttaggatgggttttcaggtatcagcagcccgcatttcgttagggggttggtcttcagggttcagcaatcagcagtctccgagcctgatttggctgattggagcgtgtcctgtactcctgtgttgatatctgctattcgtgtggtcatccgtggtgtacagagaaaaaaatatcttcgtgcacttgtggttgatcgctgcagggcaggacggaggaactgccaagataaggtcgaggatccggtcacaaacaaggatccgctgccgcctgccggatcaagttgcatatgaatggattcggtgcgttcgcatgcagttgccatcaacgaaaaggaggaataataatccggtgccgccgcgtt

SEQ ID NO: 4280 - DNA, 5310 bp, Sorghum bicolor
  misc_feature (3043)..(3142): n is a, c, g, or t
caagcttcgaaagctttcctttgcgcgtgatggcgcgcgccttgcactagttaaaaataacaacaacgatgcttgcatgtcgcttttcacacggccaataattggtcagctcagtgttaaagagattattagtgaaataccagatttgaagttgcatgcttagtttataatcattcttgtcagccacttgctggcccggtcttatcttttttttttaataaacctttggtagaagttttcatctcttattgcaaaggcaaaatttgctattggacaatattttctactgatttctgaaagacactcttcttgacaaattggttggtggacaccgtagctaacaaaatacttttataaaatagatataaaatcatataagtaccctaaaattatatctaaaatcttctagactgtacatgatgagaaccacatagtaaaatattgttttgcactaaaaataattattttgcctctctttataaataaacaaagttaaccatggttaattagttcatgtatttgtagcacactaaaaatcttgaaaaaatcatagaatacatacatcaccaaatcatgactatggtaaaaatatcagctcaaaataataaagtttataatggtatatttagcataactgagttatagatttatctcctatcaagcttaaattgatatatgaaactttattattttgagctgatatttttagcatagtcatgatttggtgatgtacgcaatctatgatttttccaagttttagtgtcctacaaatacatgaacaaattaaccatggttaactttgtttatttatgaggagaggcaaaatagtcattttcagtgcaaaacaatattaattctcatcatgtagagtctagaaaattttatggtataattttggggtacttaaatgattttatatctattttataaaaatattttgttaggcccaatgtccaccaaccaattagttttgaactaaagtgtcttcagcaaagagccatcatttagtatatccaacaacaaattttgcctattaaaaattagtagcattctagccttgcgcgctcccaaaaaaaaagaatgaagaatccccgaagtccctaacagcacatctctgcagtgattggcgatcaagagtacttagaaaattaagcttttaactcgtagtagtaaaagatcaaattaactttatgtggacacataagaaagaagcaaatgctggcaaggtaatataccatatcctcagctaggtttcttccatggttgaacaaagaacagatcagcctgcacaaaatgtataataatacggtgttttatttctgaaggcctctcctaatcaaaattttaccaggatgcaaacatgaattcaccactgtaggaaatttcctgttgcgttccattctcattgcttgttcaaggactaccattctcctctgctcccgagtaaagaaagttagaacactatatacagatcatggaataaaatcaaagattaaccaatagtcttatccttgcacggtgaataattgaatgaactcaaaagaaattattttccccacaataggtcaattaatcggttagtaggcaactgaaaaattattgtcaaatgcttgtcactttctcttatcctaggtaccgacgcaccgttgtatttggtgaactccgataatagttttgtttaccatgcctaacaaatcaaccgccttaactgctcagcgaggcttaagtaaccctattttattctctagagcgctagaaacagagctaagagtagcaggtcaaactagtcggcaaagtcaaacttgtgagctactttggcaccagaactgccttttcttgtcacaattatatatgaccttttcaccaagctaagcttagctgtgtatatatacatgagagtctattacagttgcacattgcaacctaaggctcataaagaagtagaatcgaatcgccatagtgcaaagagctactcattgagcatccaagtgcaaacatatatggcgtccaaacctttctccaaatccttcttcgccttctaccgatttgttcgacgaaggctagggaatccaccatgtcagcaccatcattgggaaagaacgagtgggatatctacctatcctgttgtcatccaggggtgcccactagccttccaagttgatgatcaccttcagaaccaagctctagttctagatatagaagggctactgaggtcttcgtctttcttcccctacttcatgcttgttgccatagaagcaggtagtttccttagaggtcttatcctattatgcctctacccttttatgtatttctttacacaagaagtacaatcaagagtcatggtcatggtatgcttcttggggttaagggaggagaaggtggctagagtggctagggcaacgttgccaaagcatttcctagaggatatagggagggaagggcttgagatagtgagagggttcaaaagggtggtaggattgagtaggatgatccctagggatatggtggaggatttcctcaaagagtacatgggggtggagatggtggtgggaagggaggtaaagatggtgagagggcattatgttggtttgttggaaatggagagcgagataaagtttgggctggagaagattgaagggacagagatggtagggtttggaagctgcacgggctattttagccatgattatcaccagctcttcacttgttgcaaggttagatgctgtgcaccaacatggtttctctagctatgttttgcttactgcatcaatacaacgaatgattttgatatatatgggctattaaagatactgcatccatgccattctcctctcttttacctccatttttattcttccatgttatggattttattgcaatttttgagtcagctaaattcggtttgacagttactgttgtccatctgataaagtgttcaattgtttgatattaatttcccattgcatgtacaatatgcactgtgcaatattccataggccatgaataatcatagtaactaagaagagggatgcagaagacaaannnnnnnnnnnnnnnnnnnnnnnnnnnnnnnnnnnnnnnnnnnnnnnnnnnnnnnnnnnnnnnnnnnnnnnnnnnnnnnnnnnnnnnnnnnnnnnnnnnntgattagtaacaatactatggtgcactcgtgtgtcatttgtgttcattaattttgcaattagttggcctccatgggaaggacaattcatctgatgacactacaggtcatggcataagcagttctttctcctgcaagctcaaggtcaccaagacattataaaaaactaaaaagcagaaggaagcggcacaaatgatttgtttgattaattagtttacccaaactacttgattagaccaaacatataaggtgcaattaactttgagttgttctttttcattagcaaaatgcttcatgccattgaatacttactgtcactgatcaatatatgatccagtaagaaaattcacattaaaatgttttggattgtgaggaagcctaacagtgtcactaaaagtaaataaagtgattgaagtgtttagcagctgcttctttttgcagaaacaatattgagtaagagtaaccatggtcaagggtgcagtaaaatcaaaatagttttcctactataaatgcacagaactatgccctctagttacgtcatgatcttatatgataccaatgtctatagattaagttcaaatctttgtagtaagaagtctgatcttcaaattgaaattagctttacaaataggaagttctttggctttttgaagccaggtttcattagactttacactttagtctcgaactatttacagacatcaaaaagtcaggatatattatgcttttgggatcatgaatgctaatctagagtgaattctcatttgcaggaagtttatttggtgaccccagaacaaaagaaacaatggtcgaccttgccaagagaccaatacccgaggcccctgatcttccatgatagcaggctagctttcagacctacccctcaagccaccctagccatgttgatgtggctcccgcttgctgtccccctcaccgtgctccgaacactcgtctttgtgaaccttccatactctatctcactcccaattgggagtgtgaccggagtcacaacacgggtcatcaactccccaatctctagcaatggcaacacaaaccatggagctcttgcccagcccaatccgcggggtcacctatacgtaagcaaccatcgcacacttctcgacccagtttacatctcagcgatgctgaacaagaaggtctcagcaatgacatacagtgtcagccgtatcagtgagctcatgtcacccatccagaccatccgactgactcgaaaccgcgatgaggatcgcaggagaatggaaaactcactgcagaagggggacgtggtgatttgccctgagggtaccacatgcagggagccatacctgcttcggttcagcccgctatttgtcgagctcgtccatgaggtatacccagtggcactgatgaactggtccagtatgttctatggaatgtctactggcaggtccaagtacctagaccacttctactacttcatgaacccacatccagcgtatgttgtccagttcatggaaaggatgaaaacccatgtggtgatcaacggcaggagatgcgagagctatgaggtggcaaacatggtgcagggcgagattggtagggctcttgagtttgaacccactaaactaactcgcaaggacaaatacctgattctagcaggaaatgaaggggttgtggatacaaagcagtaacatatgtcaatattgttagatgagaatatatcacggtacaggcactacttgatggaaataattaatctttctatctgctggttttggatttttggtcggttgtttagaaactctatatatgcaccctatcatgagtcagcaggtctgattgtcttgtatagcattgagaattataggtacttttaagttctgtacatgagcataaatgtcagttgatatatgcaaaaaaaggcatatgctagtcttagtataatgtatggcatcattcttgcatcagtactgctgcttctatgtgtgcccggtgcctaaattagaaatgcagattaagtacattctggtaccaacaagagcattgcaccaaggccaaaattacttccatatgcttaccgaataactggtcatttgaggatgtgaagcaatggagtgagtgccaacacattccatgtagcagccacttctttgattaccaagaaaatcactggtaatagactgcaaaccag

SEQ ID NO: 4281 - DNA, 3739 bp, Sorghum bicolor
gcactctctaagaatggatggaacttgaaagtctatttaatacggtaaatctgtatgtagtctgggtaattttttcttttttgtcacctggatttgtggccatcggatccatctctcatttgatctggtcctttcctttcttctttgcttctatgttagaaatccgctttgttcattgtctagatttcaagtaaaatgcagataaatgtccacgcttggtgtttagagaattatccagtcagcatgtttttcttgttcatgtgttattttaagtcatgtctttctcttagagtctcatattgtaattaatttttacattgattatgtcagcataaatttcttttgttattggtgtaaacatgattttttatctgctctctgaattttgttttgcacagttttgttttgcatgttcattatgaataaagtgtataggccatctcgataatatggtagtagaatctaaaaaaatacacaaactataactgataaataaaatataataagtttttaaaggagtacaatgaacatatcttacattgcagcaatctttaattttgtactccatatcaggccaacactcaagtacttttgcgagtgtttttgttgtctagcttgtcacaacatcgcggatctcgtccaaagtgagtcatggactttccagtttgcaaaatttataattttttgattaattatacaattgtatatattagagtagagattgatgaattatacaattataagacttagatgaacaacggttcaagatatctcacatagataaggaaatgcataagctatagatattctcacctgctgtgctaatattttgcatactaaccttcttccgtgctcggtactgacgttggtactctcgttgactccttttattcgcttccctttgttcatcggtcaacttagctctttgtttccgttgttgtgcactcctttcatccctcttcatattagcaatgtctgtatgctagacatatatatatatatattagtagagaatattgaaattaaggtatgttttacaatataataacaaaatgtttaccgttgggcacagataatgcaccgcctgttgtggtcgcggtgccagttccaacatggtttgatctccatgtgcatctgatgggatattttcttaacgttgcactttatttctttcccaatattttcctttatattagtttgctctttgtattctcaaatttttttattgtatattgtattctgtttgttttaaaaaatatgtgattatcaatgtttctattggagatttattaatgttataagatctttacatcttatatggatcaattggtgctgaaactttatggttttactagaagattatgacaatgagggctttagtagttagttttgaagtccaaagggtacatatgttttaccgctcgtcgaaaccagaagagcatgaagagactatttattttagtttaaagattttttctagatctaaccgtggtattagcacgggcaatatactagtagacattaattgtagtgtcacctaagcatattgctgatgtggtattgtagttattgaagagagagagtaaaaatcataaaaactgggtctaagttagaaactatgtctacacaaaatcgaagacatgaagtgatatgattggttaagaatagaaagagaatgaatatgattagataaaaagatattctatagaaactgtccattggaactatagtttctatatatattatctataaaaattaataggtctatgtagtttctaggttgggagcgtcgttagaagctgcgtttccagcctccacgctgttgggccaacttgtgctgctcgaaggcccgcaaaggcgcaatcgttggatatacgccgaagggtggatgctacagtggcagagcgactgcacgcacgccgacgcccccaagtcagagccgtcgccgccgccgccgccgccgcctccggccttctcttcctggccaaaatctgagaatcatggacaatcccacacctcccgtggccgccgccgctgcccgctgtttcgacttcgacttgatagtcctgggcgccggcatcatgggtagctgcacggcacacgcggcggcgtcccgaggcgcgcgcgtcttgctcctggagcgcttcgacctgctgcacggcctgggctcctcgcacggcgagtcgcgcaccttccgcgacgcctacccggacgcgtggtacccgccgatggtgcgcctccccggccgcctctgggcggacgctgaggccgagtccggccaccgcgtactcaccgcgattccgctgctcttgatgggcccgcgcagcaacgcctcggtcctcgccgccgccagaaacgccggtgcggaggaggtggacgatgtgtccgcgaggtggggaggcgcgttccggctccctgatgggtgggttgccgcggtgagcgaccacggctccggcgtgctgcacacgaccgaggctgtcaaaatgttccaggatctcgccgtccacaagggtgctatggtgagggacaacgcggaggtcgtcgagatcctgaagagaccggagggaggcatcgcggtgaggacgagcaccggcgaggagttccacagcgcgaagtgcgtcgtcacggtgggcgcgtggaccagcaggctcatcaagtccgccgccggtgtggagctcccgctccccatccagccgctgcacacgctggtcctgtactggcgcatcgagcccggccgagagggagagctgacggcggagtccggcttccccacgttctcgagctactgcgacccgctgtacgtgtacagtatgccgtcgctggagcgcccgggcatgatcaagatcaactatcacggcggaccaccgtgcgacccggacctggtctctggcggcggcgacgtcgtggagcgggtggcccgctggattgacgagttcatgcctggacacgtggagaccgcgggcgggccggtcgaccggctggcgtgcatgtactccatgacgccagacgaggacttcgtgatcgacttcctcggcggggagttcgggcaggacgtggtggtcggggctgggttttccgggcatggcttcaagatgggtccggcggtagggatgatcctggcagagatggctttggacggcgagacgaggactgcggcggaggccggcgtggagctcggtcacttcaggatcaaccggttcgagagtaaccccttggggaatgcctccaaggaggattagtaaggtcgttcatggatatggtatgtgttgtgtaagcgtcgattttgcaatatcacgggacttcaatgctggaatctctaagtactcaaccatgagtgccagtactttcctcaagatcttttcaggtcttgtttagttcacctcgaaatccaaaaacttttcaagatttcctgtcacatcgaatctttgggcacatacatgacgcattagatatagatgaaaataaaaactaattacacaatttgtctgtaaatcgcgagatgaatcttttgagcctagttagtctatgattagataatatttaccacaaacaaacgaaagtgctacagtaccgaaatccgaaatcttttcggaactaaacaaggcctcagtgaaaaattgtggtggagagaaataatgcaagttggcagaaaagccgtggcaaacagaaaatattgtttgctgatttattgtaagagaaaaatattgttgaatagcggacaaatttggcagataagctt

SEQ ID NO: 4282 - DNA, 5690 bp, Sorghum bicolor
tttattttttatttcatttttatttttccatccagacgttagtttcctttttctactttctatacttctcatttgtttttcttattctattatttttttatttttctcacaggacatgacattttatggtttatttagctttttttattactttattttattttttatattgtatatgttttttatttcttttctttccattcctttcttttttcttattatttttttattttcttatttcaattaatctttcccgacgtatatgtttcttttcttctctcaaaataggtagttggtatttttttctatttattttcttcttgattaactcctggtaggttgttatactagtttctttttttatttcttatatttatttttccttttattttcttattttgtattctgtgttcttttactctacttaaattttttacttttcatgttcatatttattttttattttcctatatatttatcatttgttattcatgttttatgtatgttttctgttctttgctattttttttattttttatattattattatttttaatataaaattatttttagtttattttttatattatatgagattttacgtcatatagtatagatgtgatgttctacgatgtgtttttgtgatgttcgcatgtatataatttcatgttctgtgatgttttgtttgtaatgttcatgtagtatgtatgtgatgttctataatattttctacgatgttcacatgttgtaaatgtgatgttctacgttttttatgtccatgtggtattatatgatatattttataatgttcttctagtatataagtgatgttcacgtagtctataataatgttctatgatgtattatgtgatgtttatgtggtatatatgttttatactattacgttttttattttatagtgtatttagtagtgttcacttagtatacacatgattttttatactatatattaggatttttaaaaagtacacatgtgctattattttatttatttctctattaagtgtttaattatagtatttatttatttatttatatatgtatttttatgtatattgtaattctatttcatgaatctaaattatgaacattcttcttacagagacgaaacattgttctttaaatctagaatatcgactttgcttaataaaagaaaatgttctatcttcattagataaatgttcgttaaaaaaattactgaaatatatttatatgggatcttgttttaaaggatttattgaaagaaattcaatggtgtaattggaatttattttggatattttatttaacagttatgatttttttagttagcatgcgtgttctagatgaggtggtgcaaattttctggcgcaagatcctcctgtgcaccctgctgtctgctgtgggcggaatttgcgagcgcaggaaatgagctgagtttaggcgggaaagaatcatcggcgctagaatctggactatctgggccttgtttagttccaaaaaattttgcaaaacagctactgtagcactttcgtttgtttgtgacaaatattgtctaatcatagactaactaggctcaaaagattcatctcatcaattccgaccaaactatgtaattagtttttattttcgtctatatttaatactccatgtatgcgtctaaagattcgatgtgacggggaatctgaaaaattttgcaaaattttttgggaagtaaacaaggccctggtccggccgcccggaccttaagagctcccgtggctagtgggtggcgagtggctcgggcagagggccgcgcacagccagacagacgacgggcatatttttgttggttggcgcaggtctcgaagcatggtattgacttccctcctctgattccctgcaggctagtgctctgcaatgtatggagtactaagcacgcacatgcgcatccacctcttgcttcgcgtgcgctaattatatactatatatatatgcatctgagcagctcgctgtttcatatgctttggctgcacagcaggtgcggccgcgcagcctgcctgtcttttgatcgatcgatcaagcctcaaggggtaccgagatgacggatcggccgtcgtttccggctctcattgctctcgccgttcttgtggtgggcagctactgctgcgtggcgacctcggccgcctcgccggcggtggaagatgatgagctgcgtggtcggacgatgcggcggcgccgcgcggcgtcggtgatggtgcccatcaccatcctcaagtccgcagtcagcgacggagctggtatgtatgctgctgctgcatgttgctcctctgatcttggctcttggtgggatatggagatatatgggttatagtgcggtgcgtggggggtatcaaaggcgcgctctagctagtctccattgtgacaagctatagcttttgctagttattactagttatatatatagtccagatttaagctgtttcttgtgctaattgtaatggtctgaagactgctaccgtaattggtagcttaaggttcagacgttcagtatttctactggtgttcgttggtcgatttcctacgtatctggtgaaacaatgcctcacaggaagtaacaaaagaaataccagtagatgaatgggaactgatgaactatgcattgtaaaactaatgttggaaatgtcacatggtactgtcagcgttgcccaaattaacaaaaagcattttataagaactaaagatatactagtatattataataatatatattatctcagtgtgcatggatggaacgccacctgcttacaacttggatcctggctccggaacgggtagcagaagctggattgtgaacttagaggtcagtaaatatatatactaccatttgaaatttttaaagcacatacttaagcttaaagttctatatatgattcatgttgttcttattagtattcgttagtactaatgtaagaactccccactttttatatatcttcgcgcttaattgcttaaacttttctatatgtgatgttcttatttttatttacattttcgaagttgtgtactactttagtttcttcataagtacactaacggagtaataagcttattattatacatatgccgggcatggacgcatgcatatgcagggaggtgcatggtgcaacagcgccaagacatgccggcttaccaagagctccgggcgcggctcgtcggaccacatggataaagagatccccttcaccggcatcatgagcagcagcagcgccgtcaatcctggtctgccctgtttttaatttgtccatccacagttccacaccgcatcttagattagcttatccatgtccattactcatcatccccgatgctgataaacacgagcatatatattgtatgtgtagatttctacaattggaaccgggtaaagattcgctactgcgacggtggatcttttgccggcgaggcctttgataaggtgcccaaagaacatcatcactactcaaaagtagaagcatagcttgtgaaaatgattcttcaaagtgtagtttgtgaattgaaatatatattttttttaatcactgtagtagtttgcagacattttattttgacatcttctgactacataggagttaacttgtagaacactgggatttatttccgagggcagcgcatctggaacgcggtcatccggcacctcctctccattgggatggcctctgctgatcgtgtgctgctcaccggctgctcctcggggggtctggcggtgatcctgcactgcgaccagttgcgcgccttcttcccgtccggcaccaccgtcgtcaagtgcatctccgacggcggcctctacctcgacgcgtacgtaccctacctgtgctgcatcacacacaagaggccggcaactgaactgacagcaggtttccctcccatgactccggtggcatgcatgcagcgtggatgtctccggtggccggagcctgagatcctacttccgtgacatcgtggccatgcaaggaatagctcagaacctgccgccggcttgcaccgcccgtctcgacgccacctcggtgcgtgctgtcgctgctctcctattgcttctcatgaagtgatggttgctctgaaatctcaatctcgtgtgaatgcagtgcttcttcccgcaaaacataatcgatggcatcaagaccccactgtttctgctaaatgcagcatacgacttcattcaggtaaacattaatttcgctttaatgagcagacaccctaaatagcaaatgtattaccggtgacattacttacctgcattgttccgtcagattgtgctcagcctggcgccagacagagctgacccaaacggcgcttggcgagcctgcaagtccaaccgcacggcctgcagtgcatcccagatgagtttcctgcaaggttaaactgggaatccatttggtaatgcaagttcatcttcatcaggaaatgacgatccgaatgactaaagcaaattggtacacaagtgcagatttcagggaccagatggtagcatccgtcagaggcttctccggttccaggagcaacgggctcttcataagctcctgcttcgcgcactgccagtcggagcagctgggcacctggaacaccaaaccaggtggctcccccaccattcaaaacaaggtaacaattgacaataccccatatagtggctagatacaaaagaaactgtctctttccatgatgaaattgttggatattcatgtattttgatgttcatgtgcaggggattgcaaaatccgttggtgactggtactttgatcgagctgaagtgaaggcgatcgactgccgctatccctgcgacaacacttgccaccatatcatatgagaagatccacatttttattttgcacagtgaagagcatacgttttatcaacaaagtgtacatcatattgatttgggaatgcatttgaatacagccattaaaggaacactaacacaagaaataaatggtaatgacatgtttcagtagatcaagagtgattctatgtttagcatgtgatccattcgatggaatagctatctatcattctagtcagttagcagttggcactaccagcaaatattttctactactacattcagaattctgcatacctgctcatgccaatcctccaaaaactgaagaatggggctttcagtaatcagtgtcgataagaatgaattacattattatacaaaactgtgggttgaggagcaaaatctcttccattgacgatgtactatttctgtacaactagtagaattgacgctgtccattctatgaacaaagatatgctgaggcacaggatctgctgataataacaacaatagctcaagacaaaaaaatactggaaagctgtgtcccagtatgaagctaccaaaatcagctgactcatatcatgaagtacatttctcatacgtaacgaccatctttgtacatgtggagactgcagccactgcaactaaaagcaccagcaacatttctcacaggaagatcatgacgctgcttgggcagcaccaagtttgttagctcctttgtccagtttcttttttgacaccttcttttgggatgcttcctcttcttggttcttcactactggtttgaactgttgaaaaagaaaggataattttagaagaatcagaatatatctgaactaaaggtatattgatgagtcagaactgatgatatcag

SEQ ID NO: 4283 - DNA, 11963 bp, Sorghum bicolor
aacagaagctatggcgtgacatcagatcgagtttttgcccaaaggatagctgagatctttatgagccaaattgtggcatcgccagacatgcccgagctgatcacacatttggtttggtgaacagccatttaggtgcggtggaattgtatgattttgcataattcttttttttccttatccttttgaccctgatttggtagagtaatttcataaatagtcccttgtcaattgtcattacaggcggagaaattcaaacaataagattgtggcagatgttacatgtatacaaacctttttgagatggtctcattatatattagagtagagtccattgtcggtccctatagactgttatttcggttcttaaactcgcaaaataatcgtttaggtcctaacttgttcgagtgtgtcattctgatccttgaagttaaaaattcacgtataggttctcaaacttgtttggttgtgttatcttggtttgtaaacttggttttaagtcttgtttgtgtcaaaacagggcggatctaaaagctctattaaaatataattcataattttttcatatgaactttaatgaagacaaagtttatatagaattgtagtcatcaacacgatctacaattttgtagttgagaagtttttaaattaagactatttagagttccaaaatatttttgtaagtttatatattttaaaattttaaattaaattatgtgacactaaacgacttcaaataaaaaacttttcaattataaagttgtagaccatattgagaactataactttcatgttgaccatgtcaatatctaagattgtttgataattttaatttttaaatttcaaaatctataaatttacaacaatatttttagaccctaaatatttttaattcaaaaaacttttcaactacaaagttatagatcgcgttgagggctacaattttgatataaagtttgtcttcattcgagttcatatgaaaaaaaatatgaatctttttttatatagagtttttagatcatcctattttggcttagatgagacttaaaaccaagtttaaggatactgcacgagtttgtaaacaggtgatttctaagtttggagaccaaataacacaagtgaataagtttaggaaccaaaataacatagataaaataaatttgagaacttaaatggtcgatttgtaagttcggaaaccgagatacgatagtgaactttactctatatattatttgaaattcatccatttttcagggaagccgcagcccctcttttcctggaaggatctttgcagcgtactctatatattattcctggaagtaactctgctattagtgtttttttttgaaactttaggcaaactttattaattcacaaagactattgcattatttataagcaaattgaaaatagataaaaggagatcgtctacccatatttgaaaactcttttgtgataaagctcatctacctaactcatgagctactgaattacatagtactacaatgacttgttgatatctcactgaactccttaaataataaaacaatcttgtcataagtagccaacccaccgtcttgcattgtttgaaccactttcatacaatcagattagatctcaactcgactacatctagtttgctgggcatgctaccaattccattctggttataaacagattttttcagaaacattctgtttatataattaattaaatgctacagagtacccagacgagaggcttaaaaaacaatcattccgtttgcctttttgaaacgagttttgcttggtccattcatgcacttttcggaacgagcccatagtacgctagtagatcttttttttgggctccgtcgacggcccacccatttcctttatccatcgtgtccacctccatgactccatccacactccacagccacgccacggccattgcccaccacccagagcacgcggcggcttgtcgccgtgcgcgccggcaccaccaccacgcgaggcacgcccatggccatggcgcctcacgcctcggcggccaccgcagccgctacccctgcgctgcgctttccccacactttgtccgccacgggcctctcctcgtcgcctctcgctgggggctgcggcggctgccgggttcggttccgccccagccggcgcggaccgggtatgcaggggcgccgagaaggtggctcccacttggcgcgcgtggggggcctgctgggcagcgtattcggcgggggcggccgcgacgacggggaggccacgcggaagaagtacgccgacaccgtggcgcgcatcaactccatggagcccgaagtctccgcgctctcagacgccgacttgcgcgcacgcaccgccgcgctccaggaccgcgctcgcaccggggaatccctggattcccttctccccgtacgtatccaaatataacgggcactgctttcattccaatgtgtcgaacgtagaatctaaaatggactttagtagtgactacactaaagatgttacagtctgtgatcatgagagtaacgtttcgaggtagaactaggaaaaccatagccttctattaactgaaagcaacattttaatttgattatctgattaactagagtatattagtatcaaaacaactcactgttccttttcattagccactttaacatgatctctcatgactcctgtatgatgatatctcaacttctcaaggtggaatctgtgtcatcatttgtgcaggaagcatttgctgttgtgagggaggcttccaagagagttctaggtctccgtccctttgatgtgcagttgattggtggcatggttctgcacaagggggagattgcagaaatgaagactggagaggggaagactcttgtggccattctgccagcattcttaaatgctttgagtgggaaaggagtgcatgttgtcactgtaaatgattatcttgcaagacgtgattgtgagtgggttggtcaagttccccgatttctaggactgcaggttggcttaattcaacgtatgtcatcacatcacagtattcattcctgttgtctgtgtcgtctctagttgcgcatattctttagtttccacattaatatggccccttatttaccaatttaagctctagcacttgaatgattcatggaagtactgatatgtatctgaaaataacataagcctaagagggtggcttgctgaactactgaacaatcaataacagctcctactatgaatgtttagctgggccattaccattgtgagttatggcatatgcttccatgccttatcatgctgcagcttcatgtatcctacagtcctagcccaactagcattttgattatattttatttgtgcaggcattatttataggttcctgtttctttgttgctagtgatagtttgttaaacagagtttttactttgacagagaacatgacacctgagcaaaggagggaaaattactcatgcgatattacttatgtcacaaacagtgagcttggttttgattatctaagagataaccttgcaatggtatgcatttcttatgttggaaatactttgttatttgttggtccctccgttccaaattgtcagtcgttctgtcttttctatatacattatgtctggatacataataaaagttatgaatctagaaaagccagaacttcttacaattttggaaccgagggagtaatatccaagtgttttcctctacatggatcattgcatctcctgcaattgactgagtctacattattgcagactgtagatgaacttgtcttgaggaacttcaattactgtgtgatagatgaagttgattcaatccttattgatgaagcaagaacacctcttataatatcaggcctagctgaaaagccaagcgaccggtattacaaagcagcaaaaatagctgatgcttttgagcgagacattcattacacggtgagcaataagcttctgtatggatatttgatctgttaatatgggttgataaaacaataaaatatgccctcacgctcaacatattctagcctcctgatttctgaaacttttatttgcccttctgtttcgagcaagttgcatgtcaaatattctattaccattttctagaaatgaaaaaggatatagtacttatatgcgtctatcacctagccataatttgtgtttatttgtctcttcagttaacataaattgccatctaacaatgactgtttcttcaggtggatgaaaagcaaagaaatgttttacttacagaagaaggttatgctgatgctgaagaaatactggacataaatgatctatatgatcctcgtgaacagtgggcttcgtatgttctaaatgcaatcaaggctaaggagctcttccttaaagatgtcaattacattgttcgtagcaaggaagtgcttattgtagatgagtttactggcagagttatgccggtgagtatattttatcattattctcggtagcacaagacatgttactgtccgtaggatccaaaatcctaaaacagttagtacatacctttgccttctagtaattggatgacactaagctcagtgatacatgtgaggtaatagttttctggttggtttttatggcaaaccttgacttgtatgcttgaacttgaactaatattacatcatgcaagtgcactctgaccaaggttcacacataccaagtttgtgcataggcatatgtgtaaaaacaaacttgcagttcataaatgttgacgctcatacacggtatatgaacataagaaggaatgaaagtaagagggggagaggcacatgatgattttttttgtatgccctggatgccagggcttttttgtccacatcactttttgtagcatgaagacagatgtttgagtaggaatttcattattctagttttcacattcgagatttgatgcttttggcagggcaggcgatggagtgatggtctccatcaagcaattgaagcaaaagaaggtgtatctatacaaaatgaaaccataactctcgcatcaataagttaccaaaacttctttcttcaggcaagtgccaaactcttctgtctggagcttctgatgcttaaaaattactggaatccaccaacgaaaccatttctggtgtttttttaatgctaatggccagcaacccttgttgagcattttagttgatagtggtagagactaatgaatatgtaaatggctcagcttgctggatgaacatcttcctcctaatcttatctttgttctatgttcaatctattactttgtcaataaattaacagacttttgtgacagtttcccaaactctgtggcatgactggaactgcagctacagagacccaagagtttgagagcatatataaacttaaagttactgttgttccaacaaacaagccaatgatacggaaggtacttgcactctgttgtaataattgtttaatatgctgtaaaactgtgaaagacctttccttttatttcatcccattttctgccaaaaaaatgattttgcttctttctttgcaggatgattcagatgttgtttttagagcaacaaatggaaaatggcgtgctgttcttgtggagatatcaagaatgaataaagttggccgtcctgtgcttgttggtaccaccagtgttgagcaaagtgaatctttatcagagcaattgcgtgaagctgggattcctcatgaggtattcttgttagtttttcattaacaatagtaaatcctcctttttacactcaggaatgctgttattctctcacagaaaggaaccaatgaaaataatatagtaaataaactatttcaaaggaatctagctcctactaacatgtttgaaagttgcctcccctgctgtacttaaggttaaaaaaaagttgcaacatcagtttctcatttcctaaggtgccaaaactgtctaaattttattctaatttctattgaaggtcctgaatgctaagccagagaatgttgagagggaggcagagatcgtagctcagagtggacgccttggtgctgtgacaattgccaccaatatggcaggacgtggaactgatattattcttggtggcaatgcagaattcatggccaggttgaagttgcgtgagatccttatgccaaggtactaattttccttatcaaatttccaaataatattctacagtgctttcaatacatggttgtagtttgtgtgtggggggggggggggatgcatgtttgattcattaactggttctattgacgcctctctatggggtacagctgtatctgaacaggtgctaacttactccaacggtccaaccccacatgcaccccctcccctctcacgctccatgtccatgcacatactcagacctacacacttcacagtatgcacatctaggattggatagtgacagaactacaaggctcctcaggcgaacaggcatgccacattcctcttgttcttcacacatgagaggcaatatatgaatttatctgtggacaacccctggtgggacagtcaagcctggggcttgaatgctcactggcaggatcgtcaaagcttggggggctcgaatgcttatggcaatgaatgttgaacctggggcctgaacgctcattgatgggatcgaaatactgattctaacactgcatcttttcattatctggttcttcatgtgcctgttatttgcaatgaattaggagaagttaaattagagtcaattggcatgattcatgaacaacatttctgtatctgcagtgctgtatcaacaatcctaaaatgttcatttatgcctatttctaaataagttagtttttacatttgtcgataaagattgagttgcgatctacatccttgatcttagagagagtgttctttaagaggagggggttgtttcttttttaatcaagcattccacacgattactacagaatcttcattatcttgaataaataataagttgcaatggaactaccttatctttgcaacagacctctatgggatgcatatgattctgaaagggaccgtttttccccagtgtatatgtagcataaatgttgttcagctgttcttataggctcttttgattccgactgctgcagagttgtcaatccaatagatggtgttattgtatccaaaaagcagatgccaccacgaaagacatggaaggtacataactggctataggttcagtaggacatgatcaacaactgatggtctcgagattctgggacttttgcattgggcagatgtattatgatttaacttgtgatataagtttatctaatgacttactgcacttattttgccttcagacgaatgaaagcttgttcccatgtgaactttcaaaagaaacattatcatccgtcaaagatacagttgaaatggctgtcaaagaatggggagagaaatcattaactgaactggaagcagaagagcggttgtcctactcatgtgagaaggtaggcctatttcagcaaccatgagaggtcaaatattagttttattgtggatgagacaactactggtgttacacattgcagtctgaatattctgttaaaagtttttgtgtctttaggacttaagtatgtttctttatatttcagggaccaacacgtgatgaagtaatagcaaatttgagaaatgcatttatgaagatagcagacgaatataaagttttcactgaggaggaaaagaagaaggttatattgcgtataaaagaaacattgatagctctatatattgctattcagtgtagcatagtgttcatgtgatcaatttgattcaggtcattacagcaggcggacttcatgtagtaggaacagagcgccatgaatcgcgcagaattgacaatcaggtaatatacttttgaggctattgctgttaatatgcagggatgaactcaagatatcttttctgcttgctgcatgggtgaattgctagtttgtgccaaactaaacaagtctacccttagaaaaatattatgtttcatcccaaagtccatggtacatgttttgagtatctgcattctacaaagccaacaatgaagtagttaccacatatctttttttactttgatcatgacagagcatgattacaactgaatttgtttatctttcttgtttagctccgtggtcgaagtggaagacaaggggatcctggaagctctcgcttctttcttagtctcgaggataatattttccggatctttggaggtgacaggatacaggtttgtattattttctcgagttctataattgtttacatgggaaataataccaatggcttcactacataaaagtaatgtattgcataaaaaagcacctccttttggtatctccatcattttaatgatatgacttattgattgtaccttgctaaatgcctctgacaaagttagatgttgatctcaagttgcatgtcatgttttgaaataatggcagatatttgttcataatagtggaatagaatgtactcaaatccattcgctgccatttttgtttgaaggacagaatgtgatgctctcatcattctactgatagtgggtccaagtgcgttgaactatatcctgctactagctataaactagaaatgttttgtagcaaaaatgttgagaaccaagtggtagtttggttggtagagcttccaagaaaagccacccacctggacacctgggatcaaacccaggtgcttgcaggttgtttgggtacatccctaaagggtccagtactcccctctcttaagacaacgctagggatgtcttctccctgtggttgagttctctttttttagaaaaaaaaaccctgttataatcattgtaatacacttgtgtaagcatacctgcaggagtgtgtctggtaaaattactgcatcacttgtactaatagtagctgttgctctcagatatatccttgcatggcttatccatatgatttcaacatttcttggcagacaagaataaatctgtatctaatagcatttggtttctcgtctagggtctgatgcaagcatttcgagttgaagatctgcctattgaatcgaaaatgctaacaagggctctagatgaagcacaacgaaaagttgagaactacttttttgacatcaggaagcagttgtttgagtatgatgaggtattgaatagccagagagatcgtgtatatgcagaaagaagacgtgctcttgcatctgacagtcttgagtcacttattgtggaatatgctgaattgacaatggacgacatattagaggttggttattgtgaccatctgacagctgcacttaaatattaaaactgaacacaaagcattatctttctctgaacttctgatgctataatattcttctgtcattggcaggctaacataggccctgatactccaaaggaaaattgggacctgagcaaacttatagctaagctgcaacagtaagttttcagttagtacatatacatgtgtatttggtcaattgggatctgttgactgatgtactttcaccaaatttgtaatgtttccgtttcttttctactaggtattgctatctgttggatgatttgacaccagaattgttggagggcaaaagctcaagctatgaggatttgcgggagtacctccgtaagcgaggacgtgaagcttacttccaaaaaactgttagttatttctccttttgctttcatggatagcattttttcacacggttcaaatattataacaagtttaatgcaaatatttattacaaacaaagagagagtctgagtaggtatttcacactttaagaactacacctatcaatttatctgtggttcttagtaggtaaaaccaaatccgagccgaaggcaaagctagatcttagcagtagatcatcttgacaggagctagcctatgatgaaaaaaggtcttctgattctgaaatgtatattcttgtttataacaagtgcatcttatgagcaagacaagtctgaatataataatacatattttttttcttaaaatgaagatcaacccattcatgtgtttggatgtccaaatgcatttccccgttttaaaccgtgtaaactaatcaggtaaaatatcagaagcatttttcttcacaatggtatttcagactagaacagtacaatagctttgataaactattaaccaaatatcaggagcaccagaaatagtgagatgtagttcctcatttcataacttctatacttgtatgccaggaaattgtggagaagcaagctccaggattgatgaaggaggctgagcggtttctaattctcagcaatatcgataggctgtggaaagaacacctgcaggcactaaaatttgtccaacaagctgttggtttaaggggttatgcccaacgagatccccttattgagtataaacttgagggatataatcttttcttagacatgatggctcaaatcaggaggaatgttatttattctgtatatcaggtaagtcaactttattggtcttgtttctgcctgtacagcctatgcagttctcttagttgtagttccgtggctcctcttgtccccctctccctctttgtacagtggtgttgttctttttgttttgtttttttaataaaatccttacagtgggggttcccctgctgtatttaaagttcaaaaaaaaaatccatccacctgtcctaaaaaaagtcttctttcatgctacattttcattttaagtaacatttgaaccactgagtttggagtgatgtaattgtgacttccttgaaagataggttttatgtttagttagcagacagttcccctttgtatagttcatgcatgatgcaaagacttgttatgataaactagacctacataataaataatttgaggttttagctatcagtctatcttgcactgtgaactggtgaagcatcatgatcctgactcctgagtggtcacatatgcttctttacacaagcaactgacatatcttagttttcaaatgcatatttttggtattacttagcactgatatcatcagttctgactcatcaatatacctttagttcagatatattctgattcttctaaaattatcctttctttttcaacagttcaaaccagtagtgaagaaccaagaagaggaagcatcccaaaagaaggtgtcaaaaaagaaactggacaaaggagctaacaaacttggtgctgcccaagcagcgtcatgatcttcctgtgagaaatgttgctggtgcttttagttgcagtggctgcagtctccacatgtacaaagatggtcgttacgtatgagaaatgtacttcatgatatgagtcagctgattttggtagcttcatactgggacacagctttccagtatttttttgtcttgagctattgttgttattatcagcagatcctgtgcctcagcatatctttgttcatagaatggacagcgtcaattctactagttgtacagaaatagtacatcgtcaatggaagagattttgctcctcaacccacagttttgtataataatgtaattcattcttatcgacactgattactgaaagccccattcttcagtttttggaggattggcatgagcaggtatgcagaattctgaatgtagtagtagaaaatatttgctggtagtgccaactgctaactgactagaatgatagatagctattccatcgaatggatcacatgctaaacatagaatcactcttgatctactgaaacatgtcattaccatttatttcttgtgttagtgttcctttaatggctgtattcaaatgcattcccaaatcaatatgatgtacactttgttgataaaacgtatgctcttcactgtgcaaaataaaaatgtggatcttctcatatgatatggtggcaagtgttgtcgcagggatagcggcagtcgatcgccttcacttcagctcgatcaaagtaccagtcaccaacggattttgcaatcccctgcacatgaacatcaaaatacatgaatatccaacaatttcatcatggaaagagacagtttcttttgtat

SEQ ID NO: 4284 - DNA, 4707 bp, Sorghum bicolor
aagaagagagaaaaaaaaaacaccaaaggcaaggcgaatcgtgtttaaaaaaaaaaatccttctctgcaacgtgcaagtgcaaccatggagaaccggagatagatccaggaggtgcggccatagtggtcggatcatgcaggcgcaatcgcgcgactttctgtgctccaatcgtccttcgagtcagaggcatgcatctttgactttttgaaacatgcttcattaaacaattgcgaaattaatactcaatccatgctaattattatttcttgaataaataggagggttttttaggcccctacaggccctaaattatatgacgttcaactttttaacataattttgattatttgtcttattcaaatttttgtgcaaaatatcacttcttttgtcatgatttgattataagtaaaagttctataaaaatgacttaaatttaactatatttatataatttttttaaataaaaacaaaaaaatcaaatatcttttagtttgggatagagagagtaataattatgcattttcttgccgctcaaatacctatagaaaaacaattggaaaaaggataaactcctatttgctaccatgcgagaacacgacatatgcacatacagtcatacacgtgctaggaagatggtgctacaattttctcatgagaacgacttcccaaggacaagaaattaatcagacaccaaaagtaatcgtgagattgtttttctcattgaacttgacctttccttttttttttgtaatcagtaatcaccattctgaacacaggaatcttgcaggaaaaaaaaatgcatttcatgcatttccaaaaaggcatgtaacgcttctgtgacaaggtattttgctcactgtccaggacagcacatgatccatataacatgttgacctccacttaaaatgtttgaaaattatttactttttttggataattcatatatttgtaggcattaacaataataatgctaaggccttgtttagttctcaaaaagttttaccaaaaatttaagattttacgtcacatcaaatattgcggcatatgtatgaagtattaaatataaacgaaaataaaaacttattacatagattacctataatttgtgagacgaatcttttgagcctagttaatctacgataggataatatttattaaataaaaataaaagtactatagtacctaaaatcttaaaattttgccaattacaagacctaaagttgatcgtacagtgatgcggtctccggccacgctaaagcgttttttcctccctttcaattgacaaccaccaaccatagcccccaaaaggaatgaacttcctcctaaagaaactattctctccatcctaaattataaaaaattttagcatttatagatttatagattttactatgtatctaaacattatatatatagtaaaaattatgaatttagaaaagtctgaaattattctataattcataatggagagagtaaaagacacctcgtaagtcgtaaaccggtgataataggtgaggcaagtattttattttccatttctaggttgaggctggcaaatttctaggagaaaaatgaataacagaaatactactactgtactgataaaacgtagtactgataacagaatatactacacggttatacggaagaaaatgatggagagagaaatgttaggtgaagtgggcccagcatcactggggggttggtggccgtggggttggtgagaggacaacaaggctacagcgctgctactgcctaccggccagcgggtggcttcttcgccgacgtggggccatccggtcagtgtccgcccgccatgtcctcacgtgcatgcctgcccgactcgccaaaatactttccgcaccgaagctcaggtacacccgcacccgcacccgcaccccgtgcggacccacctctgacctccttcccccggatccgcgcccggcgccagcgcggctataaatggcggagcccccagcagtgccgagaccccgtgccacacatccccgttcgcatcttctccctcttgccggtcccgaataaagagcagcagcgcaaggtgagttccagcctgctgcttctctctctcgttggttcgtcatttccccgttcgtcgtgcttctcccgaggttcgtccgtccgtgcgtgcgtggttttgtcatttgtgcgcgcatgcttggggggagatgctgcaaaccttggttgggtcttcctcggttggatctgatggtcgccacgggatggccgatcccggtgtgggttttggtgattattatgcttatttagggattctgtagatctggggtgccgtttaaatttgagattcagtggacaaattttgggattttttttttaaaaaaatttggtgtctcggagggagggttcaccattttattagatctcgtagcctctgcatttggagttgtctgtggtgctctgattttcagatctcacggcatcggtttaataagtatatttgttggtcatccaattcgaatgtgcggtggatctgcggatggtttctgattgtctgaattccttttttttttcaaataaaatttgcagaggttaatttatcgcccgagaagaagaaagcaatggcggctgagagcttcctcttcacctcggagtccgtgaacgaggggcaccccgacaagctgtgcgaccaggtgtcggacgccgtgctcgacgcctgcctcgcgcaggaccccgacagcaaggtggcgtgcgagacctgcaccaagaccaacatggtgatggtgttcggcgagatcaccaccaaggccaccgtggactacgagaagatcgtccgggacacctgccgcgagatcggcttcgtctccgacgacgtgggcctcgacgcggaccgctgcaaggtgctggtcaacatcgagcagcagtcccccgacatcgcgcagggcgtgcacgggcacttcaccaagcggcccgaggagatcggcgccggcgaccagggccacatgttcgggtacgccaccgacgagacccccgagctgatgccgctcagccacgtgctggccaccaagctcggcgcgcgcctcaccgaggtccgcaagaacggcacctgcgcctggctcaggcccgacggcaagacccaggtcacggtggagtacgtcaacgagggcggcgccatggtgcccgtccgcgtccacaccgtcctcatctccacccagcacgacgagaccgtcaccaacgacgagatcgccgccgacctcaaggagcacgtcatcaagcccgtcatcccggagaagtacctcgacgagaagaccatcttccacctcaacccgtcgggccgcttcgtcatcggtgggccccacggcgacgccggcctcaccggccgcaagatcatcatcgacacctacggcggctggggtgcccacggcggtggcgccttctccggcaaggaccccaccaaggtggaccgcagcggcgcctacatcgccaggcaggccgccaagagcatcgtggccagcggcctcgcccgccgctgcctcgtgcaggtctcctacgccatcggcgtgccggagcccctgtccgtgttcgtcgactcgtacggcaccgggagcatcccggacaaggagatcctcaagatcgtcaaggagaacttcgacttcaggcccggcatgatcaccatcaacctcgacctgaagaaaggcggcaacaggttcatcaagaccgccgcctacggccactttggccgtgacgacgccgacttcacctgggaggtggtgaagcccctcaagttcgacaaggcatccgcttaagattgggaagccaaattggacatgaagaagactgtgtgtctccgtgctgtatcttcctctggctctgctgatacctgctgcaagcattgctgctgctgctgctgctcctgctcctggatgtgtgtttgatcagtgactggctgctccatagaagagaagaaaagaaggctttggcaagcaagccatgtcggcgccgccggcttagggattggtataatttggtgtggcagcaaccaggattatgcgctgatctttatcttttagtttggtcgtccagtatttttttttcttccccttttcgagtctgtactgaaactgctgagagatttgcagtttttaatctatcaatattcgtatgttactgttaccctttaggtgccccctgtgtaaccaagcgcaattacaagttcacatttctccgtccacttgtgcttggtgacctttgagtaccatgaaaggtggtgaaaaaattgtttcgtgtgacctttgagcagctgtgaaaggtgcgcacagttcatactgcacaaattggcaactgaagggacaggctggatctttgttgctgttggttacacaactggccaaacttgaacagcagcaaaattggccaccggtacgtgatgcgcgcttagctgaaatattatagctgaaagaaccgttcgctgtttgttaagagagaaaaactgaaaaattatgactaaaagaacagttggccatttgataagagagaaaaactgaaaacatggctaaaagcctcagtcatgattcttgagcaggaaagctgaaattatgcatcctttttgtagatcgggtgggcacgtggagttctactgtatttctgagcgagtagaggtatttttttgtcacccaaagaaagaactgtttaaacagctagcggggatgattatttcggcggcttatgct

SEQ ID NO: 4285 - DNA, 6857 bp, Sorghum bicolor
gggcgactgaacgacgagttgagtaaattattttgctcgagaagatgagatttgcagtggaaaggaggatttgtggtggagcacaagaaccaaggtcagtgcaggagaggaattgactctcatggatcctgtggaatcgtttgggaagggattgaggagggcgacgagcccaacgcctacaggaggggccagcagggagggaagcaaagcctgtagtgcatgggtgggtccacctagcgcgccctctgcctctagcccgcaacaacccctagccatggccgagctgtgcttctctgctttttgcgaggacaacagagcacggaggtaggcacaccgacgaagtgggaggggccggtcctcgccgtctacccctagagctagacctagggttttggtgtccaggtaggtgcctggcgcacggtggattggttggtggagtggtggcgcccgtcgcacgacggcttggtgtgaagggtgagagttggaaggagggggggtcatcgctgccaccgccgggtatggaacaagatgaggatggggacggtgctgtaggtggccgcggcttttgcgcatgctcggagggttggcgcaggccggcggtgccaggtacctagaggagaagttcgacaagcgtgtgtcgaagagggtggaggaaaacttggagagggaggactcggccgtcggcgggtgcgttgggtacggggagtcgctgtgcaggttttggctggaggcaacggggagtggatgtgaatgttttagctgcgggcgaggggagtggatgagggcatttttgcgggtggcgaggggagtgcatgtggatgatttcgtttcacatgttttagttgtagagatgaaatttccttgtatgtttgcatatgaattggatataacatgcatgattaaaaaaacttagcaagatgctaaaatgcattagaaatatatcaagcaccattagtattataataatcactttacttataggcctctaatattttgatgagtcgcaataggaatgaaagtgcgacaacatccttgaggtgacatgaatggaaagaaaaacaaagagcccgatttaggaaaaatctggcgctgaccatattagtttggagaatcaatttggaaatctaaatttctatatgctcttggagttgctcttctgttccaaggttaattttctgaattctgaaagtgacaaattaatccagaattaaagagcttttcccttttcagaaggacagctagtaccaaaaaaaaaaactgatcgcaagactttgatccgaactcgagagaattcgagaaatcaaaatgggaagcgttgaagaacgattcttcatgcggagaggcacgcgccactgattcagcgcgccaacgccacgcggggttgcgaaaacaacagaaacgaaaagaaggtcgcccacttgccttctttgacctacgtggcgtggctgacagcaaggctcaataggcgcgtgacacgtgccccccttccgcctcgctggtgcagctttcctcggctcccagcagccgttggtcgtccccacgcctccccgagagcaggaaacacccaccacacgcttcgctcggccccactcgagggaccgacaccccggtcccaccacggtgcgcgcccgatccgggccccgcaggtcagtgaggcaaggccggacgaatggcaagttgggcagcgcgctccccgggccgccgacccgactgtgctggagacttccaacaaccaaaaacccctaacgcctcgaggtggcgcacccagacaaaactgggctccgtccgcctccttcctccccacctccggcctccgccgctgccttcggtcttttccccgtgcgcaaattcgctcgcagctggcgccgacaccacaccatccgcaccggaaacacgcaccgaagtggggagcagcgcctaccaaacgcggcgccgcttctcctctatttgttcctctcgcggagccgcccccatcctgtgtgtaggcgtgtggcgagtccatggcggcggcggcggcggatacctcggaggcgtccgcggccgggatcgcgctcgcggaggccaacatcaactgggagaggtacgcgccacgttccccttctaagatagagagttaacaagaatcgaaaagaggaatcttttcgtcctggcaggcggtttacgtttgcggcctcgcatcttttggcggcccgtctccggatcggcagcgtgctcttagtttggttgggctctcagcccgccgcttgttcccgtgctcggcacggggcaaaggatgaggaatgagcaaccagggagcgtgggttacatgaaggtgattcacggcacaggcgcattgcgtcttttccccaaccttttggtggcctggggcgcgggggagggccacgagatcagtgccgcagatgtggatgggggacggaacttgggtcttctggaaagctgtaaatttaattggcaaaacttgacgtgttaaagaggaatcggttgtatttccccaattccagcagtggctgctaggttcacaggctggtagttaatctgcttcaaattcgtgtgattaacatgtagacatgtttttttttctcttgttcgtctttgtatggaaatttgacactagttgagttgagcacgtcctcaaataggaaggaaatccaaatttttagcttttatatgtgtcgtattattttgttacacatcgccgcagtttcagattctaaatatacttctgaagtccttaattcaagtgtccttaattcaagccatagcttggatttttttcccctgatatcttatgtacttgttctccattgtgtcatataaaattctcaactttcaaatcaatttctatggaacaatcgctggcgcacagtactgagttttgcctttaaaagaatgggagattcatttgtgaacctaggtctacgcccatcaagatttcatgaactcctatgcatcaaaaagttcttcaaagtctgtacatgtagaaatatttggagaattattttaagtgaagaaatatcagcacccctaatggtagtagttcactctagggtccatgaagttcctttaaaaatcacattttggaactgtaattgttccctgcatttttttcatcagtggtgtgatggactataattttggcatgctattttggaaatgtcatgctggcaacatggtaatttgcataaattatgggctttgaatctatagaaaggatatcaattttacatattcctgtaactgatgtagctatctttttgtatcacgctgaaggttggacaagacgaggtttcatgtgattggagctatcctgtttacggcccagcaaggtgctctgcacccaacagctgttgtgaagactaggatgcaggttgctgaaggggggcttgcacatatgtccgggtttgctgtttttaggaggatattgagaagcgatggcatccctggcattttcagaggatttggtacctctgctgttggagctctgcctgggcgagtgctagctctaacatcactggagatctctaaagaaatgatgtttaagtattgtgaacattttgatatgtcagaggcgtcacgaattgctgtagcaaatggggttgcaggcctgatgtcgagtatctgttcatgctcatattttgttcctctagatgtggtgagcattctttcacactagctccatattgtcgtatttccaacttttgtgtttagcaattattagtcaaatcaccaacatcatgttaacaagtttgttgaatatagagctaaatgcatgggtggcccctgaacttgttaaggggagccacttaggtccacgaactttgaaaacatatttctgggttcctaaacttgctaagtgatgcacccacatggtcggtatggtccagaaatggacctgtagtgcaccatttgatatgtttaggatctgcagtgtttctataagtttaggtccaatggaggacataagagcacaaatccgaatatctgatacatgacatatgaagcaatcaacacagaaacgttcatttgatggataattttcctttttcggtgatacttccatagtgaagctatcatgttgcaattgcttggaagttgaaaccctatcaactctttatactctctttagatgtctacataagtttaagcattatgtcgctttatgatgtatagctaggtacatgtcacatcgtgatcatcgtactgttccatgaagttcctatatagatatatctatctttctgtacagagcaaggcctggccgttttaggaatattttcttcgtataaattaaatcgattccgttacacaatattattatagttgttcacaacaaacgtgattaaaaacattttcctgtatgacatccttattttgttatctaatttacatggtgctcttccatatttctgaacttacagatttgccaaaggctcatggttcaaggattgccggggatggcaacatacaggggaccatttgatgtgataaataaggttgtcagaacagaagggatccgggggctttaccgaggttttggaatcactatgttaactcagtcgccagcttcagccctttggtggagtgcatatggtggtgctcaacatgctatttggaggtgtgtgtaatttttgtttatcatttattgttcattgtgtctacaaaatattagtgcatgcttgattaatattcttgcaatcctaaaataggagtttgggttatggaaatgactcaccaacaaaaccatctcaatcagaacttgttgctgtccaagctacagcaggaacaattgctggtgcttgctcgtcgattatcaccactccaatagatacaatcaagactcggcttcaggtatgtttagttgtttttctgaacgtgtggttatgtatctttgcagactctagtttcctatggcatttgtcatgttttcttcgtgctatcccagttatttgttactatcttatttatcaagtttttggactaggaagttgatccattttctgagtgtcagaagatcacaggggtttccttcggtggttctttctgtaatttagaagttgacatgccatgaaagtagtaatattgttgcttttgactcctttttactataaatgactgtgcaacagaggatcgggcatgttggtcatagcaagaaggtgcaggatagaatttgaaagggcttgtgggcctaggctatactttctgccttgtgaagtatgggtagctttaatatacaggatttcaactggaccttaagctcctcaatatacgatggtgaaggacagaatgtccattattctaggtagcttgtgagatcatgttttagctcttaacctgggtgacacaggtctggtcaagcttattgttcctctgtgtcaggtgcctcggtttcagaaccacacctattaatcaatttcaatatgacatttcaaggctggcactgcaacattttagtggttgcctgtgccagcgaatgatgtctgcatattgtgatgatcatgttataccttaggtatgcagattatctttgagttggctgtttaacgtaccacctttactacataggatatgtacccgaacataatgttggcacagccaagtagctaactactgtcatagaggaaggaactattaccatgcatgatacttgtgagaattccatcgtcaggtgttcattatttgcatgtgatttcaggttatggacaactatggtaagggtaggccttctgtcatgaaaactaccaggctgctgcttgatgaagatgggtggagggggttttatagaggttttggaccgaggtttcttaacatgtctctctggggcacatcaatgatcgtgacatatgagctcataagtaggtcatttttcagtattattatctattacctatatatttcagtcgggaaggatcattaacttttttctttcatattctgaacctgcagagaggctatccgtgaagtctgaatgacacagtttggtggattctcaactgaggcgatttactgttcaagatcatctataccaatacaggcaatcaagttagtttgcctcgcgaaaagtatacacgagtattatgattgggtaggatgcagaattatgatttagttgcataacataacatgcttctgtatgagacttgcgatgtatatatttgtgctaaaagccctcctttaaggatgttgtagccagcttctttaggatgtaacagatggaggccaagatgcttgttctgtctaatgaggcacattatagctgtacctgttcgtggtccagcaaaattttggcaaagaattctgcatccttttcgtccagtgaccatctctccggttgttggtgttgtcctgcttgcatttttacttggaatctacagagattgtttgtcattgtatatcttatatgctggcatctttttacttggatagactaagaatatcgaatctaatatgcttttgaggaatgaggactcgactgcgtttcaccctcttgaactcattgcagctcaaatttcagtagctgcgagcatgccattcgagaaattcgccttgtttccgtatttgtaatttgtcatatatgtagaatgtcgagtgtattagcatttactgtcagatgacagaaatcttgttagtgaagagaacaatgtcatctcatctcagcaactcgtgagcgggtcttggagagactccgggctgccttccagcaagcagtagactggtggcagcgtgagcgtctccatgactccgtaggcgttccagcagtaagggtccgcgagcagcgctccctcgtctccgccggccggcagcagctcgacgccggacatggtgatgtccgtgcaggcgacggcgtcgctgcacgcgag

SEQ ID NO: 4286 - DNA, 3069 bp, Sorghum bicolor
agcaaagtatctgccaagtgcgaccagaatacagaccttagcttgtcattgatgattagctgaaacataacacatcaggtttaggctagtgttgccatttgccatgctggagtgagtgactgagtgattaacgcagttgatttgatcaagtctaacctattataataaattaagctacaattgaatcagatgacagtagtaagatggaatacaaccactggtcgcagagactgtgttgtactgttgtgcttattggtacatgtactaagaaatttaaaagttcaacctactatctttgataatctgaatcacggttgattcaaccaattcatgctaattcatttaactttcaacaaatacttaatgatcattactaaccaagaagcaaagctaaaacacatgtcaaatgttgtggctgatatttaacttagaagtaatgtgcagcacatgaactgattttgggccaaataattaaaatttgaagggatctaaggaaatatcagtgtgcagcatacttggagacctatatcgtacttcatactgagggtgtgtctcgcccaatccccttaatttgttgctcagttgctactggagatgcaagttaatccatggttagaagtcagctcagcaaccaaatatggctcccaaaagatgcagttaatccaccgttgcagatgttcaccacaaccgactccatagaacctactgccaaaataagtcccatatcatagtgtctagctatcaatattttatatgtgtgttttagatcaggactttaggaaaacaagaaacctgaaactacaaatgatgaggattagataataaaaaaaataacttagttatggaagggtcaccataacacatggcagagcctcacctagaccacataaaattgcttcagattgaccacctaaaatcagaaccattaatttaattaagtaattataaaataactacaaggtacataaaaaaacactaaaaaggtcacttaccttctaaatccactgtataaacagttctaaaatctgaaatccacttaaaaattaacgctggcaactcgcctagtaatttatataaaattgtttagaacatctatgcatcaaacaaaggatttacaaattcacttcttgacaaagataaactcacctcagctggatctctctttgctagaatataattgaaggtagaagggtattaaacaaagaaattccacggctcaaatttacttgcaaaataacataatagtataacaatgacatgaacaaagttaatccacagaagaagattagccacgaaacaacactgacatagagtatatcaccttcaaaaaaagagcacatcgtgactgtacatgcaagacaaaaatcaaaacctctgccattagaacaactatatagtattctttgaaggtgatatatcatggtgcactggatgcacttccattgctcgatgcacagctcatccaacatatatctcaacatgtgctgccaatacaagatgcatatgtaatagataagtaacaatcaagagataatgcatcttgaaggcaaagttcataatgaagggagtttaataattcaaaacagactatggagtttttgttccacagaacaatatcactcttagttgcacccgttgttgtcgacaaaatgatggttctcaagtagcatacaacaacgtcattcctaaatgccaattttcccaggttaatagattaaaatagtgctagaacatgcaaggaatgacatgctgaaatttccatgaacagagtggataactgcagattcaattaggcaaatttttaatatagcaaaatggtgtacttggatctgttgagtaggggatactaacgaggtatttcgatctgttggcgtagggaatactcgtaggaaatactcacgagtagaatttgttggggagcgaccgtcatccagtgcctcatcttcctcctcgatgctagcatgatcatcgcgctccaatcctttccctgttgcgccgccatgctgttgcgccactctgatgtcggcggcagctcctccacggcccagtcgcgccagcacttttcgcatgacgcccagctcctcgcccatgcacgcgccgtggcccccaagccccgcgctggcttacccgcgcagccgttgctgaggttgaccgtgccatcgccctcgatcctgcgatgcttccctgcttatcctcaagggccttgccatcgacctccagcgccatcgcctccctgggctatgcgccctcgatgttgtcctcacgagcacgatggggacggagcatcggcgccgatgcgtgaccgccccatgccgccaccgtcggatcaagcatggcgacggccgccaaaccctagccacgccggggatgtggtgtccgcagcgtcgggctccggcggcgggcgtctgcggccgcggcgggagcgcgtggcgtaaaaatgctgcagggactggggcggcggtggtgggggaggatggaggggagcacctggtgcgaaggcgacgatcgattttttttccttttgtctcagacgcgttacgagggaagccgggagaaagggtcgaggtgaagcgacggagctgacggaggtctgatttgacgcgaggctgagggtgtgtaaggttgtaatcatacttctaatttgggtcgttaaatctgtaagacatgtgctgtgagtcgttgatcttgcaggtggaatttgcctagagaagatttcaattatagtagagattttattgataatcttgacatctatggtattagatagttaatatttacaataatatatataggtcggagatatatttatttaataataaaagtaaaaattagtcaaaccttatcttactctagtattacatcttaatataccttagtattatattaaaacatgagaagtttgttgctagcattatttttttatttagattatgattcctatgaaatatgatatatgagttaaatgtatgtagattatgaacacatgggcttatcaagtgttcatatgacacaacagcacatcgtgcaaaggtagtggaagcatcctcaagcataaatttaggttttgca

SEQ ID NO: 4287 - DNA, 6851 bp, Sorghum bicolor
gaccgagcgagtgggccgacgcgagcaagtgaccggacaaagtgggtcaaatgggccagctggaaaaagacaaaaattttggctctttaatatttaactagtaaagatgtccgtgcgttgcaatgggagaaaaaacaatactatatatagataaatagtattaatcaactcaaatgatcacttcgtcttcttccatacctcgcctttacaactcaaatatttatcttcatttctataaatatggtcaaatctaaaatagtttgacctaagataattataaaagttaatttcatttggggcgaatgagcataaaaaaaagtcttctaaacaatagtatattagtactagtaataataaccatactactactaataattattatttttaatatatgcacttaatttttcactacattgtcgttccggaacgttcacgctcatcaggtagcccacgcgacgcgcgaaaattcgaggcatggcacgacgcacggcaaggcctgaaaccgatggcaagcaatcaccaccgtgcgtcggatccgcgaaacacccagcagcctgatccgaccacgccacaactgatccaaatccccgtgcctcccaaaacggttgcctctgcaccggtggcctcgcggagccctcagcaagcgagcgcgacctgacccaagcggaggatctatcccttacccggttgggagattatcgacatagctgatgagcatcttgagcggcgcgtgaggctcggcgcagaggctgcgctccatctcctccaccatggcgtccgcggtcgagaaccgctgctccacctcctcgatagccggggccgccttcctcttcctctcgtcctccgcttcctaccgccgacgtctcctgcgcgacagcgacaccaccgccacccccaccgacgcggcagccgcggcgccaaccaccacagtcgtccccatgaccgcgtctttcctccgcggtgctctacgactctcggtggcgaccaatgtgccagtggtgtggcgagggcagcgaggcggccgcgtggagaaggtaggaaggtggtggcgggtgagatctgactaagcttctcttcctatgattcttttccaagccagctgttggagaaagccaactttaattcgaagcttggtgagaagaatttatcgcaaacggccaggggcggtcagaaagataagtgcccgcaaggaactctggattggaagcgggggcaatgacgcaagagcgggcgggcaaaaaaaatttagaggacagactgaaattttggctctttatagataggtatagatatttaatattaaatataaataaatttgcaaaactaatattgccaattgattaaaaaaactaatattgccaatcagacaacataatgattaatgcgtgatgaatttagggtcttataatggccttgttttttttgacaagatactacctttgtcaaaaaaaaaaaattctagatttagatcaagtgaaacttctttattcttaaccaagtttatatagataaatattatgagtatttcatgattaaattaataatacttaattggtattataaatgtgtactgtttatagatttgattaaatttaaaaatatgatttcttagaaaataagaattatttttatttacgaagggacaataaaaaaaatcttgtcctcacatgacgcttgacgccacgagtccacgacggacccgtgcagtagccggagttgcagccgcaaagaccaaaaaggctctaggagcccggccaaaagtgcgagcccgttgtcccgggacccagccattgccacgcacgcgggacgtcactgaagctctcgaaccgcggggcggcggaatcgatcaggactcgggaggaaggcgaaggccgaaggagcaacgacgggcgctcgctcgcttgcttgctacagcatcagcaacgctctcaccttgtctggctctggcctcgcagtgccaaactgccaaccgaggagaggcgtgcgtggtggcggcggcaatggcggcgaggagggcgccgctgctcgtcgctgtcctcctcctgcaccaaacggtgtccgcgcttgctgggtacggcgcgccctggatccgtcacaactggtttccaaattccgactctttatcgggggggggttcttcgttcttttcgtgttcttggaattcgctctgctgtctgcacgcgtatctgttggccaaaatcgcatcttgatcaagggtttcagatcgatgacgaaggactttcatgatgtactgctcaaaatcactttcttccacggctgggtgctcagagtttctgcatttcttatatcttctcctgtaatttttttaaggtttttaactgctagctagtatttttccagttcctggactcctgattgctcaaattctgattaattttccactcctccgtaatgatgtttcacaatattatctataagcattgatgggttggtactgatcattctgatgataatccatttttgtatgcaaccaatggagtagaaagagctactatgaaatactgcaagtgtcaaagggtgcatcggaggataaaatcaagcgggcctaccgcaagcttgcgctaaaataccaccctgacaagaaccccaacaatgaggaagccgacaggcagtttaccgagatcaacaatggtatgtagtatgtactagtaatttggagaatatttgttagtgacttagtgctcatctaccagagaacgaaacatccctgacggtagtgactagaggttttatcttgcagcctacgaggtcttgacgaatcaggagaagaggaaagtctatgactggtacggtgaggagggtttggagcaatcccatggcaggcatagtgatggtgatggtcatgctatgaacatcgaacacgtgtttagcaagtaagtggaaaattgcatgttatattttttttacatcagcttattttgacaactaaatatagagagtgaacacaagctctctctacgaagcatacattattgacacaacatagaactaaaacatgatgcgaaccatatttcataatttattaatacaaggttcctttacttcaatgagacccaacttctttgcagaagaaatgaaaattttggtcttatcttaactaagacattatctgtgtgtgttgtggcaaggttaaagggcatgtggttggccatacaaaaatgaagtaaatcacaattgttttggttggatccatagatatttgaaaactgaggacgtcttattaggacgacaggcttgatggtcctgaccaacttatgttgtgtgagtgtgaacttaggatttagtatattgagatgtaccattttagtacgtagaaccgtgtgcatctccaattcattctttagctgatggatgccactgcttcaaacgtgatgcgcagtgctgtatatgaagttaatcagtatggaataggaaaaaattatctggattttatttgaaagatcttaaaaatatgcttgtcgagtctatgttgcttgctacacattctagactgttgattacttgtcgttctggtctcctgggaggttccgcaaaagatgacgctgtgcactcgcagcattggtttggacgcgaatgcccccgtccgtccaccttctgactttacaaccatcagacctccagcattgaacacagagaaccagccacttgagctatgcaacattgctgtaaaggtgacacctgcagtttcatttaataggggcaaaggaggaaaatactccataattaatcactccttgttaaacacaatcatgtcctaaacgtcaactaattcaggtatggagggagtatgttataaattggtcgttcatgtctagctgtactgtcctttctaggtgttgtgctaacaataacaatgaacaaagttgcagatgtacaattgtgcattcctgtcatatacacaagtgtaattattcactacaaagaattcattaattgtgaatggttcactgattaacatgccattgggcagatttcccttgttattactatattttgtttcatctttacttcaatgcaactcagtgctgaacaaaattgtttcactgtgttcctggacccaaatcttatagatatctcccatcagtaacaatcttcttgttttgctctaaaaaaacagttttttcggtggtggaagtatggaagaggaggaagaacgaactttaaagggtgatgatgtcattgttgaactggatgcttcgctagaagacttgtatatgggtggttccttaaaggtaacaacggcttgcaacattaaagtgtcgtgataacattttttaatgcgttcttcaagtagcttgagatttcagttgaaatggtttgcgcttatggccgcttatagttatttgctttgactggtatttgattggtgcacgatagatttggagggagaaaaatgttataaaaccagctcctggcaacaggcgatgcaaatgtaggaatgaaattcgtcaacgagaaattgctcctggtgttttttatcaaatgagtgagcaggtaatttctaatgtggtaatagttctatattaatataatggaacaggtgtccatatgtttcttgtttcatcttgtcatggttttcatgatgaagaacattatcttcaagttttcattttgaaagatggtcatatatgatccagttactatacctggctttctaaactctgcggtgacatgaggatacatttttcttttccaggtttgtgatacatgcccaaatgtgaagtacgtaagagaaggcgatttcattaatgttgatattgaaaaggggatgcaagatggacaggtagaaagcaacggtgttacttgtttcttccagtgatctatctggctgacgtgctgcaaacttttgtaacatgtctgaacaccctggtttccgcttctttacacggcaacattctttttcttcttttcttgccataaacaatagaatgttatgcatagactgcatagggccccttttctgagagccagactaactagcagtctagcactgtacagccaggaaactgatttcggtgcgccacctgcagtgactgaattatagcaacttcttcagaattttaagaacatcgaaactctagagttctgttggaacttcagtctgagctagaatttgaatatcatatgccatggacatgattacaagaattgctgaagctcattctatagggcatgttgaatatgaatgtcaggcatttttttttttgatatctttttcccccttgaaccggtaggagagctccatgtctttattatattgagaagagagaattttcttgatttctcattatggatgtatcttctactttcaggaaattttattttacgaggatggtgaacctaagattgatggagagtctggtgatttgaaggttgctatctttttatacataaatactacggtaaggaatgataagcttggcaccatttatttatgacaaatttacttgttgagcagtttaacattcggacagcacggcatgagcgcttcagaagagaaggcaacgacctacatacaacagtggaaatctcactggtactcttcactcaatcttgtttcctcgttaacattgctacctaggcagaaattactaattatacagatctacctctaaggatctttttggtcgaagaaggtctgaaccaaatcagttttttgcgctcgttcttagatgaaggttgtgctcgatgttaagccaatgcattattttagctacaaatcagaagggttcttgagtacattctgaagtaggaaattcagctaaagaatagtgtccttttttttattgctgattctttagtgttgctgaagcctgaaggcttactaagtacgaaccacgagcctcagtcattccaccagaccagagttaggcatccgttagtttaggcagcttagagcaactttgccaattatcactgtctcttccatttctcacgcgcttactcttacattagatctgttgtcaaccactgagctttcatctctcattgcagtcagaagctcttgttggatttgagaagaacataaagcaccttgacaaccatgccgtggaaatcgggaccaaggtaacttgcagtgattttaatgagttttgtaccctgcaagaaattatcttgtgtgaaaatgctaatttgcaaacaatgaactttactcattgacaaaaaattcaggtgatcacgaaaccaaaagaagttaggaagtctgaaggagagggcatgccactgtaccatagcaacgagaagggagacctgtacgtcattttcgaggtagtcttccctaaagacctaactgatgatcaaaaggccaagctgatgaacatttttatttgaccaccatcaagctcagctcttgggctagttgccaagagcataggtaaacatgccaatagcagcatgaatgttttgtttttcaagtgttgttgctcagatccacaggtagacagacgtagaaaatggatgcatcaatatatctgtaaattgtctggcaattttacttttcaactatctcccccgccagcaatgttcatgagttgtctggttcaacacaaacaaaaagtctgcatttatacattaagatgtgttgaaacagcaaacctttcatcttcactgagtagggcatacaaccatagcagtaactgtcaggaaagtaactaaaatttgtaccagaaaagttacaagtcgatgccaacagttgtccgacacatgcagtgcatctgtactagttactctaacatgcagattgtacaactacgaagacatcatatgttagtcgtagccagcgtctcttcatccacgtcaaaagctttccttgcttgcttgagctcttcatt

SEQ ID NO: 4288 - DNA, 3751 bp, Sorghum bicolor
tcttactttatttgctatatatgcagacattgcgtgctgttactttcttatgcagattgtaatgaataaaacacttgtcagggatattacctgcagtaattatagttgtttcctacaccatgacagcatcgatcacacaaagaagactcacctaccgggtcttctcctcgaggtccggcgcgtggaggcccattcaaacgctcggcgaagttgaacggggacctggcccaggcgtacgtacacgaacattatattgtgccaacacaacagacgtggtcatctgccgtggcgccgtgtactggctcgatcaccatggggagactacactggtgactggtacgtgttcgccatggctcgtggatcctggtgtgtgtggtgtccgccggtaacttttttttttgtcctgtgcggctgtgcagccctttacgtcattttttttttgttttgtctttcccaaaatgaagtaactctctgtcttttttcttacatataaatcagtattaaaactttgctcttaattaataaacaaatataataaacaaaatattcctgtcttagaataaattattattataatctgaatcagccgatgggctaactaatccaagcataaactgaaattttaatcagttttccatccaatctaattaaaataaatatttctcctaactatccgcaaatactagtacaagtatcaaagttgtccgcatatgccaacgtagccagggtataatgtggaaagagggaggtaccgaacggtcatatatagtctatactcatcaatggatatatctacttttgacacgatgatgactaacccctttccgacttcaataaggtattaaaactatatcttttttttaatgaaacttgatatctaactctaccaacacatggatagtatgtaaactaaagttatggcattacgagaaaatatttatatgccttataatgaaagaaaaaaatctatcaaaattgtattttaattcaatacgaagtcaataggacattgccaatattaatttatattatggatgtcatgacaaaataaagtatacctttaaattttatagaaaaataagagataaataaatatgtaaccttgtcctccttgtttctagtaatgagtgattgttgcatcaaccacttacaacatcaaatgtagcacatttataaattaaggtgttgcggccaccaacaaactgaaacaaagaggtcaaacgtttaataactttttttctcctattataacgtataggcatgtttgctagtaataataaattatatgtagacgtctttcgtgaaggtacaaacctctattatgaattcgagagaaaaaaagaggaacacctgtgggatggcaaggattaattagccagtactcaatgtaggctgacaaaaagacaaacaaatgaacaacttttggctgtcgccatatatctcttgaaataaataaaggcacttatttcgtctcgatcaccgtcactgcataaacatgcatactttaacttgtagtgtaccaaacaactggcgggttctggcactgtgctagacagctggtccttcggccgatatggccctggtgcatgcagccgatgcatacatagcgtagtgtgagaaaccgaagaaaagaacaccgaacgaatagttcagcctttcttgccaaatcgatctgcctgctctgtcgtctccggctcaattatcttaacggcactacattcaattacttcccctctttgcatttgcaaaaatagaaacacatcactccacaggccggccagctttttcctcgtttcattttgttttcacgctcacatgttccatcgccctagctcgcttgctgcttgctgtttcttgctgaaattgcccttgggtctgttcattttgaatcctttaatttccccatatccccattccccaatccatggtcgtccatcgcgacagtatagacaccagacaccatttcttgcgtgagccatagttgatgtcatctgtcttccatggctcagcctcccaatcccaagagaaggtcgtccctacctctccctgactggagatccggcctgccagaggaactcctccagtccatcgcgcaacgtctcgcgtcgggccacgacgcggcgtccttccgatccgcttgctccccgtggcgcgccgccgtcccgttcgcgaccttcgggccgctcctgctgctgccgttcgaccccgactcggaccgcgtcgacttctactgcgcctcggaggagaaggtcttctccaagacgctgcccgacgtgcgcggcaaggtggcgtgcggctcgtcgtgcgggtggctggcgctcatggacgaggcggcgtccgtgacgctgctaaatccgttcgccggtgcccgtgcccgtgcccgtgcgcaacgcgttgagctcccgccggcaggcgaacacgtcgcggcggcgtcctcgtcggaacccgtgtctaaggtccacggccggtgggtcgtccatcccaccaacaacggctacgggaacgcggatgctgcgggcagaggcatcaagctagaagacatgagggacgtgttcttccgtgagatcgtgctctccgcgccgcctgacgccgacggcggcagcgagtgcgtggccatggccatgcttgggtgctccacggaggtcgcgttctgccgggttggagtcgacagcgcatggacgctgctcgacaccaaactggactgctccgtggcctccgtcgtccactgccaggacaagttcttggcgatcgactacactggagaaatctccatctgcagcatcagcaacgccgccgccggtgcaacaccaaccgcgacgctgctgccgtcgctgtcgccacctgcggggctctgccaccgcagctacctggaatcaaacggtgagctgcacattgtgggtgccatggtgagcacgttccacgagacacagagcttcgcctacagcagcgcgatctacaagtgcaacctccacgaccgtacgccggagtggtccagggtgagggacatcggtgatcggacactgttcgtgtctaaacatttcaagggaggcttcagtggaacaagtgtatccatgtataaagagaacaaaatctacatgtctgaacccttgtatggggatccatacgacttggtccatcgtttggagatcgttgatatttctaccggcacatctgaagtgaagcccgtccacgaaaagacgatgcagggttccgaggctctaggttggattcgacccaatctctggaagggaggtaggatgatgttcttaattcaaaggtttattacttcaaatacacatatattagggcaagcagttgcattgggatgtttttagcttctgcacacaagcactggctatgaaaagaatttgatatatgccacatttggttactattagttcgcgaactgagttagttagttgaaacaaaaccttaagtgacctacattataattacgaatgcagccagttctctctttttatattcaattttggtttaattcccacactacaaacaattgatggcaccattgtagatcaagaccatgtatatgggcaacagtaaaattgtgacggggcgtgatccaagcataaattccataaattccagacatagctagggttctctctagctaaattcttattcttataatctattaaaccccatgttttaaatagcgagctaaggccaaggtgtttagcgttttataaactgtaattagcgtactttagcggtaaaattgtgcatgaac

SEQ ID NO: 4289 - DNA, 11174 bp, Sorghum bicolor
caaagagtatacaataatgatggatttggtgaatcaaatccacggtttaataacgaaccatgttaacttaccataacaacaactcaattcctatcgaattccttcctatctaattcctatatatatatatatatatatatatgatactgaacgatgttcagtactgtttagtattttttcatctcaaatttggcttgcagtgtagaataatattctacacctagagtgtagaatagcgttgccgtatatatatatatatatcagccccagtgcatccgccctggttgccgagcgctccttttaggggtggtgcatgcttggcggcgttgcatggctggtgctgatggtagcggcgcattctgtgagctccccagaggggcgacatgtggagccgcgtgatctggcgcaaccaacagcggtggcgaggagaggccgactgctcgctcaagcgcaagtgcaatgacctctatctcagactctcagtgcgtgtggataggaggagatcggacagtaaggagagaagatagttattttctatttgtttttcttttttacacattattattatatgtatgtaattatttctgtatgtaaatatatttatagatctattggcggtatgaaagaaatagatattgaagatttctttttgtcaatataaaacatcttaaccgcatataatggtctatgtttgtaagtctacgacaccacactctctttgagagcaaccacaatgttactcaaaagcagtccataggtattataataatatgtatcaggtagctgaaacactgtgagatcagtctatagagtaatccatagtaaaaggtacacataagcttatggactactcatagagaataaaaaaaatattattttcttacttctcctcatctctctcttcttgcagtggctggtggattgaaggtaaatatttttttatcctctttgggtcccatcttatagactacttagtccatatacattgtcagaagaaaacaatagctatgaattagttacgttgatctcatgtatatggactatttggtccatatatattgtggtctctctaactaaatgtcactttaatgttggcatttaatttttatagtattgttattttgtcattgtgatctttatatttataatataaaattttagctacttttctgcgttccgcttccgacgcccactgcttcaggctttgtttagttcaaaaagtatcaaatttttttcaagattttccatcacactaaatcttgcaatacatgcatggtacattaaatataaataaaaataaaaactaatgtgtgtaaatcgcgagacgaatcttttaagcctaggccttgtttagttcaccctgaaaacaaaaaagttttcaagattccccgtcacatcgaatcttgtgacacatgcatgaaacattaaatatagacgaaaacaaaaactaatcgaaaacttttcacttttcagaactaaacaaggccctagttactccatgaatgaaaaatgtttgtcaaacaaaaacgaaaatgctacagtattgaaatccaaaatttttggaaactgaacaaggcagttccgaaaactttttggtttttgatactgtagcacttttattttcacttgacaaatattgtcaaatcatggactaactagattcaaaagatttatatcgcgatttacaggtaaactgtgtaattagtttttgttttcgtttatatttagtgcttcatctgatgggtaatcttgaatttttttttagtttttagggtgaactaaatgaggctttgaaagaaaaaaatataagcacccaaagtttcttttcattttcccgccgttcttgcgtggagctcaacattttcgccttttcggcgttccgcttccgacgcccgctgcttctccagcacgattcccgtccttcccccttcccccttcccccggaaggaacccgccatcaaaaaccccggcgccctaccaaaaaaaagggcaaaaccccatcgagagcgagccaaaaactccaagctgctccaagcccgcccgccattcccctcccacaaccccaccccaacgccgccaccgctcaggggtccgaaccttcttgaaccttgcgggaaccccaggggcgaggagcagatgtcggcgaggctaagggtggaggagctccgcgcggcgctgctgagccgcggcctcgatgtctccggcaccaagaacgctctcgtgagtcctcccgcctttccccaagtcgtcagaagcgtaccccagcaatcgcccaactgctattcgcgtccgattcttgctgcgctgtgcgcggtccagccgcgcgaatgagcacccaccatcatgtgctcgtgctgcgcaggcttactgtgcttgtgctaggtttctattgcgtgcgcgtattgatgcgttcgagatccttgttgtgactgctgcaatgtcatctgcaccaggtgcggaggctggacgccgcaatctgcaaggacgagaagatcgcggttgctgctgcggcaaccgaggtggcagatgggtatggcgtagccgtagatggtgtgctcgtggatggcaaagggaacggcaggaacaacaagaggaaaaggtccggggatggggatgaagaggggaacggcgatacgtctatagacctggcaaaactagagggcatgagctatcgcgagctgcagggattggctaaggcacggggactcgcagcaaatgggggcaagaaggatgttatccagaggttgctctcagcgactgttgatcctgttgcagttgctgatggtggtcctcagggcgaaaaggaagtcataaaaggtctccaattctgtagatctatctgtttctttttcccctggattgggctgcagtacctatgctcattcattgaaggtgagggtataatttgttcctgtaattgattggtacaggtggtgatgaggaggctgaggtgaaaaaggagaagattgttacagccacgaagaagggagctgcagtgctggatcaacacattcctgatcacataaaagtgaactatcatgtcttgcaagtggtatgacgatttactttgcctttgactgtcttatacttgctgtgtgccttgggtgtgcaattcaatttgctccacctcatagtcatatgctgaactaatgaaaaatatgatccctctaggatgaaaaaacaaattaggccttgtttggatattgttggattcacctcaattcacatgtgttggagtggattggggtggaatttagttcaagttccactccaatccaccccaacacatgtggattgatgcgaatccgactacatccaaacaaggccttagaccatttgtgtcccctaaaccaaatcacattaactgagtgctgctgcaatcgttcggtattcagtttgtctgttaatagacattgtgcagtagcctaatctagcaggactaattctgtctgaaattgaaggagactattccaagaaaaactaatgatttttccctaatttcttcccttaagttttggtattgaaagtagacctgtgaagttttttaatagacatctttttagaatggaatgccaaatatttagtacccttgaactgatttttgatgaccttatgcttcttttcttaaactgattttcgatgaccttatgcttcttttgttatcatgtttatggtggacatgctttctacagggtgatgaaatctatgatgccaccttgaaccagactaatgttggagacaacaacaataagttctatatccttcaagttttaggtttgtcatgcagatcaatttttgcagatgcctttcttcaattcattttaaattgtcaacaactgagtgatattaaattggttgatgaaaataccatgttttccaaaaaaaatgttgcaagtttctccttttcgctctgttgtgctgtactattttattcaaatgtaatgcagtaatgcacaagtcaaatgtacttgttgccattctgttacatggtttcaatctatgaaatatgaatgatggttgatattaatattagatagagagttaacttgtgcctgttaattgtagaatctgatgctggtggaagcttcatggtttacaatagatggggaagagtaggggcacgaggtcaagataaactacatggtccctttttaacacgagaccaagcaatatatgaatttgaggggaagttccatgacaaaactaataatcattggtctgatcgcaagaacttcaaatgttatgcaaagaaatacacttggcttgaaatggattatggtgaaactaataaagaaatagtaagtttcacttatcaaattgtttctaatttaatatttgtattggttttaattctttgttcttatttgccccaggagaaaggttccattactgatcagataaaagagacaaaacttgaaactagaattgcgcagttcatatccctgatctgcaatattagcatgatgaagcaacaaatggtggaaataggtaagttgcattattcctgttcttcaaacagattctagtatcgtaaattcataatgtaagtctgtgtgaaggtaactattagtcgtatttatttcctaagatgatattgttatcaccaaaatttttttgatgatgtgtgccaccttaataagtttcgtggaataattaatgctttgcacattataatggacttaatttcaaaaagaaaaactgagattcaagggagtaaattgattattaatcaccagttcaaaacttcaaatagtagcgctgatttaattcagggaaaaaaaacgaacaatcaattgcacgcttttatcttgtcccagtctgtatctgttatgttgaaaaatgaaaaatatattcatgttgcttatacatttagcattagcatgtacttatcatcttgctcaatcaaataggttataatgctgacaagcttccccttggaaagctaagcaaatctacaatacttcaggtgagttatgttgatgtttctaattgggaattatgaattcgttgtggacataatactacaggttgaagaatgattcacacatacaacttgcacttaactatcttacaagctaggtgaaagaataacatagagttgcattggcacaaactttacaagtaaataacttaaatatagcatacactgaaaatgtttcgcaagatgcgtgttaaaagcttcactctgttttgacaatgataacgtttctgagctttccatagggttatgatgttttgaaaaggatatccaatgttatttcaaaggcagacaggagacagcttgagcaattgactgggtaagctcatagtttctttttatttgacaaagtatattatatgactaaaatagcatgcttgttgacaccctattggaaatattcaatatgctatcatcatgtgttttatattattatttaaattctgtaaatattgacattttgttgcttcacatgctgttgagtgtctttttactcattagcctattgcattgtaagcaattggacatcgtttaatactaataggagtcagactttcaaaatatcaatgataatcatcaatatgttcctgttgccatacatggtatggtctttaatattgtaacaattgattatggttgtttgccaatctcaaggtatgaagtagtttttggaaatattgaacgtttctttatcataatcaatgatggctgttctatgcttgaaatcatccatgcccagtatagagaatagtcaaattctactgattctggttgcagtagaaatttttgtcctttgaccactaaagttttgtacattgcctctggttgtagggaattctacaccgtgattcctcatgactttggtttcagaaagatgcgtgagtctcgaactttgtagcttagtgtccttacagaatgaatatattatgtttagcactgtttcagtcacctctttagcattcttttggttcaggggacaagttgggatgggacttggtgatactctttccaccagtgtttggttgtggggcgtcagtgcatgggttgagcctagatgggaatatacttagatgtggggcgagctataataccttagcccattattagcttgtagtagttggcccatgcggttcatttgtagttgtggttgagggtgagggccagcttataatctgtcactccaaacgtactaaccttgagaatgaaagtgtaagagaggtgctatgcatatgcgggctcattccatgtgtgagctgggccatcggcagattttggacgtgggggtgttatagagcccatccctcattgttggcgttgctatctgtcttcgactctaagcacatcaccaaggcaggactgcaggagctttggtgcgggccagctcgaggccgtgctgccgtgccgcttcggtgcaggggtgaggcggtgtgtgtaaccttgaatctgagccgcactggatgcaggtgagagcgacaaggcgagctcaagcctttgtggcacaaggggatgagggtggcgcggggaccttgagctggtctgacagtggggcggcatggtggatgaggccagcgtggcaagctccatctgttgtggctgtaggcaaacgcgatgggaagtgagcagtgggagtggctggatcaactgttacagtcttagagacgggtacagcgggagcaggtggatggaccgaggatggatttgtttttcttatataggaaaaaaatgttgcacgtgagtttgacaggtgggtcccatgggtgacagattggttccactcgatgccatcccacctaccaaacaaaaaactgggattgacctatccttcacaacaaagtgggatagtcatgccccaaaaactagggatgggtcccatcccacctcatcttgaaatcaaatggatgctagtttggaagtgattgcccttctaacaaatgtcatctgacaggtgaatttattatcgacactcctcagaaactaaaagctaagctggagatggtaataggctattgccttctactcatttcgattatcttgcagctttcaattcttatttgtttagaaacagagtgcatttagttcattttaagttctgatatcctagtttttatatgtaattgggaaacatacctgtcattcttatgcaagtagcaagttcaatcagagtagctgaattgatttcagttttgtatattgttattcacatcacttattgatggagattcagagtcatgccccttatttgtatgatgagcatatgactgtatattgtcctctatggctgatgtttgtgcagaatctgcttaccttgttttcttgcactaggttgaagcccttggtgagattgaaattgcaactaaacttttggaggatgattccagtgaccaggtattccatttcactaatgggttttaggaataatttcttatacctcaaatcctttatatggcactcccagtgactggggggccctttgggggggggggggggggggcagtgatggcatatcagggattgtgagttttctcattggcatataaggaaattgaccatgttatgcctgggccgatgtcatctcttccataaaagatatgccctaaatatgttttgttgtacctttttatatactatctcttccaaattatagttcactttagatttgtctcaatttaaacctcctttgacttagaaaagtttatagaaagatacacggactctagaaatcaaattagtttcatagaattctccatgaatatgtttaattaagcatttgtttggacttatatatgttaatacatttttctaaaaatgtcataagtttgacttgggacaaagccaaagtgaactataacttggaacagagggagtatatatcactataaaataaataatttatttatttttcattgatttttattattgtttagtgaatctacaaaaaacatacatatatgtgaatgtgaactatcttttttttccctcgaacacacatcatgtgaaccatcagaaaaatgcacgcttcatggaactcagtctacatatggatcttactcatcagattctgttgcatttatcatgaatctacagatgtggttttattgaaatctatacatcgaattgaactaaatcgtgtagttttctgagagttatgtggaaagttgtgtaattgtgtgaattaatctaatcgtgaatatgcatttttcacctttttctggagttggtggcacattttgatttgtttgggtaactaaaataatagtttccatgctttgtacccttgcacatttttaacataagcataacatgattgaacatgtaggatgatccgctatatgctcgatacaagcaacttcattgtgatctcgcacctcttgaagctgattcggatgagtactctatggtaattttcttaccaacaatatacatacatatattgtggacgttcaagtctgtagctcaaaaggattctttcgcatttcaagctaacatatttacatctcaatcttacatattttcttttagatatggggattcaaccttatataaataaatgtgtgaaaacattcttatgcagcatggagtggtgtctttattcttgtccgctgtctttggtaaattgctcatctaagtttttaattatttacaaaaatatctgctgtccagataaaaacatatttgaggaatacacatggaaaaacacactctggttatacggtggacatagtgcaaatatttaatgtttcaaggcatggtgaaacagagcgatttcagaaagtgagatatttctgttctgttattatctacacaacccaaaagattggactgttgtgtgacatcactaattttcaacatgtgcatgcagtttgctagtacaagaaataggatgcttttgtggcatggttctcggttgagcaactggactgggatcctttctcagggtaattcatgctatctaaaattatttactgccacttctatatatggcttcactttgctttctaagttgatgagatacttcctgctatctacttgtcctggagctcacaaggtcagcatctagttcgtagtgggactgctgaaatttcaatgttaaatttatcagcacgaactgaatggttcattttcatgagaatttgttatggtgctttccttcacgtttttaacgcttgtgtagttagtgtctagcaaagtttgttcattcatatggaaaaagctaaattcagcttgtgttaccttttgtgctatttgagacttggcactttgataggtgatggttcttgtcttgaattactatctcccaggtctgcgaatcgctcctcctgaagcacctgttagtggttacatgtttggcaagggtgtttactttgctgacatgttttcaaagagtgcaaactattgctgcgcttcagaagcatgtagatctggagtactgcttttatgtgaggtctgctgcctactgaatattcatgcatgattttactagcttcagattgtgtggtattttatctatttgttacactggttgatcacttgattatcatatgtgcatgtcccaattattttgtttgttacactagttactttgtcatatagagactagagttctgcccaattattttgttgtaaggtattgagttcagggtaaatgcagattacgaatgagctatttaacttcaatttaccaggttgcattgggcgatatgaatgagctactaaatgcagattacgatgctaataacctgcccaagggaaaattaaggtcagttactgatgcaatttcttttgattatagcaccttttctccccctaaataattttctatatgtattcctttggccaattcctaatgttaaatgatatgcaagaatggaagacaatatttttttaaatcattgtttgcttgtgtttttcttgtggccaattcctgatgttaactcagtacatataatggcacaagatcggaagatattttttatgctccatttaatatatactactgtaacatccctcatctatttcctttttgaattttgaaattgcatgaaaatgatacaagagaatggactaattgcttgctagtggctgaaagtactattatgcttgctgctgatatgaacaagatttggttgcaattattttttgtgcagcacgaagggagttggtcaaacagcacctgacatggtcgagtctaagatcactgacgatggtgtggttgttccccttggcaaacctaaacaggaaccttccaaaagggtatgtacattcccgtgctgcatttacatggttatatatttccaaatgcaaatgccatacgggaagcaccataactgtgaaaatactgctctctggttgcagggtggcttgcgttacaatgagtacattgtgtacaacgtagatcagataagaatgcggtatgtcctgcttgttaacttcaacttcaagagacggtagatgctgttggcctgttgcaaagagctgaaggtgttgccgagatctttcttagcagaacatctgtggaattatagcaccaaaggtttcatcttaggtgccgtcatccaaattttctgagcagatttggtagcctttgcatttagattttggtttcaggcttccagcccgttgatgactaatgctgagtgtatgtatatatgatccatcgcaatccatcttccatgtagttatatcttccatttatcgtcatattagttttaacttgttccatgcatgtaaatctgaaaaagcatatagccctaatactgttctaactatccgcaagttagaacttacatggcctttgtagtttttcaacagatcataaaattgtggacccctaaaaagatgctctagtctaggcaccatgaaatcttaccctcagatacttaaatgaataattcacaacacgccattgtaatttcagaaatccttgtctgtatgagccagcaacaataaatcatgagatgatgggtcatatgtttctttcacgtccactttgtgtaacaccctaaaaattcccttgttgaattagatttactaagtcaattttgtgagcattaaattataggaaaaataataattttttgggaattaaaatttaatgtaggtttagaaaagattttgttgcaagcacttttactgtgatgattgttttaaaaacaaaatgtcatttgcttaaaaattcatttaaaaaaaaatgcaagtg

SEQ ID NO: 4290 - DNA, 20403 bp, Sorghum bicolor
gagagaaaaacatgcttaatatctagttgattataatttttagtaaatataattcgtatatagatcaacatattttgtgaaagaacatttctttggcatgtgtgactgcggttgaagttcaattcattgatggatgccttactaatcgtatagtgcccgtggcacgccacggcttcatcttaggggtgcacttaaaaagaatcaaacaacgttatttttcaatagtttaggtcacattcaattctggaaaatactaatgcataataaggcatatatatattataataaagtcatgtctcatatatttcagctaatttatttattagagtagaatttgaagtttttcagggatattattgtggacgcaagttttttcaggaaacaaagcgctacccttgtgtcctcgtatatttgttttttcaggaaacaaagctctagttggctatccccatacacttgatgccttattctcacgtacttatcatttcgatgcaaccatttaggagaatcacatgggtcttggttttccttgatttgaactgaagatggcttggtaaaaattccagaacactccgtttgaaatgttgattgatgccatactctgacctctgatcctgccatattgatgtcaaacaaatttatgttttatgcaaaaatgcatccttcagccgatggttgtagaacggccgatgaaggtgtcccataagttggttgcgctcctccgatgaaggtgacctctgatcctgccatattattgcaccgattttaagtaattagggcatggtgaatgaacaaaataaaaatgtataaccatttgatagcagacacatatctaaacaacaaatttttgtagcacctggctgatccggtgcttttgtaagggaagtagattctgccttccgccgagcacggtactcccgctgccgtttattccacccctccctttcgtcgctggtttcttgagcccttatcttagcacgatactcatgttgtttcatattccttttctctctcttgcgttgctcttcactgcaagttgttgacatggtgatttttatacatgatgttgtatatatatatggtggcattacttgtgtatggatatatatctggagtatgtatgtttgttacattggtaagtgcaatgcgtccttctcctggtgtccccattttgtcatcgaggtaacagggatgttgctaatagcaaaaggagtaggcccaaaatgggaatacttagcaggccccaatttagcacaaacgaattaagaacagagtttagagtgcagagtaacagggatgttgctaataacatggtgtttttagtaaatggagtattaagaacagagtttagagtgcagagtatgtggcattagaaagacatgtcattcccggtaaataagagtgtagttatctatggaaactattgttgagctgaggtactaggagatctctctctttctttttttggtaagagtgcaattttacaaattttatggtcgaggacttcaggggagttatgctttgacgcacgggcatgtttcttttttggtaaagaaagagtgcagttttacacattttattttcgaagttcaggggagagtcatgctttgccgcacgggcatgtgtttttttggtaaaggaagacacggaaatatcgcaaggaataaacatccgcctctgcggcgaccgaccacagctctttttcgccagcgctttcctttcttgccgtgccccctactctcttgatcctggactcgagtccccccttcccgtctcacgttcttcacccacccactcctgactccccctccccccgcttccctccgccttaaacccacgcaatccagcggaggagcccatctccgcccccggcgacgccgctcaaaccctagccgctccgccggctctgccaccgcaagccaatgcccccacctcgaaccctagcaacaccatcgtcctcatagtccttccacaaccgtcgccaacagtactgcccgaagatggcggccgaacccgccgctgcggccgctgcgtcggcggcggccgcgatctccgccgtgatggactggcgctcatcccccgacgcccgcgccgccgccttcgcgtacctcgaatcggtccgtgctactccgcggccgcgtcagcctcctcttctccctttgggcttcttcgctctcccgtctctgcttttggttttctctcgccaccggtgttgcagcgtggtgcggtgcggagcgcttgcttggttcatgcccgcttgttgtggttggatttttgcctaatccatgaattgctgtttcacggactttgcgggtcgatagcaaatgttgaagtggttatcacactgcactagtgggcatttggttttactaagttatttttgtgtctaatcggtccatagagttcttaagtttgtgtgattgctaccactgttctgttcctcgcttgagctagcgtctaatggctaacaccggtccaactactgaagtttctattccttgctctgactgcacattcctgctgctattctagaaatcctgtgatgccccgtttctcctaaatgcaatgcagacagtgtgctaacaaggctcactaactacaggttaagagtggagacgtccgagccttggcaagcacatcgtttctcttggttcggaaggaccagacgtcagagatccgcctgcacgggttcaagatgttgcaggtaaagcttgaatcctgtctctgtctttgtgattcttttgattgggattgtatggattgctttagcaataagtataataaaatctgtacactccccagttgttcttgtagtatttgtttaggacttcaggtgcacttgaggttaacactcaaatttcacaaagctacatgagcgataacaaatatgtggaaatctgttgcttacttgcttttagtatacggtggacatcttaacatgcgctttttccttaatggaggcaataacatttcattttctatccctattgaacttgtctaacactgacccatatatttctttgcaagtgattaatatagttggtgttagatcaaattgagaacggcactgttctttgatttggtccggctgctttgttataagttatttggcagctacaactttttacttaccttgctagcaattgcctttgctaagtatgaataatagcggtaaatccattctatgatgattatggtcatgttgattaccacaatcatggtcctcattacattggttactatgatctttgttgtcattttacattgaacattgtagtttttcagagaaaaacatatcttctttatctgtagttattattgatttgtactcctgtaggtcattattgtttgcctatgtcagcacaagcacaagagataagagcatataaatgaccaagacaaaattatccatagtaaatgcattgtacttgtattcttttactgtacttgatgtaaatcaccacaggttcacctcttatctaccacttggattacaatttgtgcacagatggagtcaattccgtggattcagtgtaaatattattaaatgggtttttacaacagaaaacaggcactagtttattttcttgcctcattcactttcactgcatgcacctaacattaatttagaaacctgatgaataaatgtggagccagcaaaaattatcagaggtatttcagaatgatcagatcaatgccggagcgtgatagaaaaataacataggtccatctgagcaagccaaaagcaacagtaacaacaacaaagcctcttattctgagataagttgggtaggatagacaagaaactcaacatgaggaaaaataaagaaaataaataattgaatagggtaaaaaagaaaaataagaggtaccagtatagtaatgaaaatagtataaatggggaccgaccgtctagcctatgttattggtatttggattgttgttttccatgtgcctaaccaatgcttgttctttaggtagcttcctacccttcgctaagtctctactccctcctcttatcccatgtgtcaggttttgaagaagaatataattggtggaatattggatatgttgcattgggcctcatggactgattatatagggtacataggactaacaccttatgtgggtacacaatgtggtactattcctatttactctaacatccccccaagctgataagtaacatccccccgcagtcataacagtcgatgcaccgcgtaagctatggttggagaagaagccaatgagtcatgcaaggcgatagccctttatgccgatgtcgaggagccgagcgtaagggcacaatagccatggtcgaagaagtcgtgctgaagatggccaaggtcgatgtagttgtggtcgggttgcgtgtcgattgagctgcaggtgcataagggcgccatggtaatgacggagactcgttgaggcaatcgacgtgggagggagcgatggcgaagtcgacgcagttagggtcgtcatagatgtagaagaaagacaacgacacaatcgaggcagatagggtgggaatgggagggtcgatgccaaagttgatgtagtcaagccgcctgagccccgaggcgcagctggatttgccagacccaacaacgcatcggggacgaaagcacaagtcggtgttgccaataccaatcgtataagggagagggccccaaccgtgtggttgtgctggagaaagaagaagcaatgtaggagaagatgcgttggcgagcaggtctcagcaacgacgcgggtagtggtagctcgatgatgaagacccaattagtaggacaaagaccttgtacagacggatggtgcagtagggattgcgcagcacagtcgtcgatgcacaaataacgacgatggagatgctacggcgaagcgtacacacggacaatggtgttgtggctcgatcaggcgacacaacagcagccctgttgctgggagaagatgcacgtagtacttggagacggtgtcgatgaagtcgatgtcgatgtcggaatagaacgcgcgaggttgatggcggtgggcgactcaatcccgatcagtggttgggcaaaccaaaaagatacagcaggagatcgggtgtaccagcaagacgacatgaggatggcggtgcgtcccgatcgggcagcgcaaggcgcacaacgagtcacgaacacgcgaggtcaaaggcgccaacgcggatcgacgagatggagatggacagatctgcccgacaataacgacacgtcaaatctggctgccaccatggcagcgcagggttgaggcgtgtggccggccctggccgccaccatggcggcatgggatggggcgagatccatctgcctccatgtgatgaagaccatgtgttgatggcgatagtcgggcgagcctggggatgaggcggcagcggtagcctgggatgacataggggagatcccgatctgctatgcgacgacgatgatggcagccggatcaataggatcgggcacctaaacaggggcgctgctcccgctggagattgacctctccctaggggcgcgcaatgcggaagcagtggcggctagggttaggatctaaacctaggcaaatgataccatgaaggagaatataattggtggaatattggatatgttgcattgggcctcatgggctgattatatagtgtacataggactaacaccttatgtgggtacacaatgtggtactattcctatttactctaacaggtttgatcaacccctgcctcgtttcacactactcataccgatttggatatgtccgaaccatatgaactgatgttgtacaagctttaccttaaattattgccacccctaccctattaggcgattacctgtattgttgattcaaacttgatccttcttatcataaccacaaatctattgcgtcatgcacatctctgctatgcttagctcctggatgcacacagctgttttagcaggtcaatattctgcgtcagtcaacttcttggacctaatcggctaatcaccatggtggaacttatccattagctatactagaatttataatcatgattgttctgtacagctttttatagaagcggaactatatcttagtggtatccattactctctctcctggatcaattgatgatttcttacttatttttgcagcacctggtaagattgaggtgggaggagctcagtgctgcagagcggaatgaatttgctaatttgacaattaatttgatatcggatgttgttggccctcatgaggtgtgggccttgaagagtcaaacagctgctttagtagcagaggtttaccactatacctttgttcttttcatttttactttgtgaaattcattagctgtaggcagttacaacttcaagtactctaccttaacaagtatctcctctttgtaggtagttcgaagggagggagttgatttgtggaatactttacttccatctattgtttctctctctaacagtggccctattgaggtaacgtttcccatcagcctttcatgtttttagatctgttctaccatctgataggttgaattgcattttggaacctttttgtgttaggctgagttagttgccatgattctaaggtggcttccagaggatatcactgttcataatgaagatttggagggtaagttatttttttagtttagggaaaagtccaaattactcccctcaagtttggcatatgtccagattaccctctaaacttacatttggttcaatttactccctccaactatttcagttggtctagtttaccccttaacatgatttgttatttttgtttttccacgtattagttgagtcttaatatcatgcttttaaatagctcgctatagttgtcactatagcccgatatagctttctgagataagagtgccgctatttgtattcatgcacaattttgccgctatagtctaatatagctccgctaataatggttgataaaacactaagcaccttagccttagctcgctatttaaaacaatgcttaatatcaacttctgtgatatgatagggaacatcataagttatgttagaaggcaacgtatcatatgcaacccagcttcgtgtgcaacctatgcaaccaccaattaaggccacaggatctagatccaacgtctgaggtttttttcacttaagcccctctacctatgggtttaaatctaaccctgtgtatccagatgggagggtttaagtgaaaaaaacttagacgttagatctagatcctgtgaccttaattggtggttgcataggttgcacaggaagctgggttgcacaggatacgttcccatgttagaaaaaaatatatctcaactttttgtcactattttgatagcttaggaaatttaataataaattaacactagagatacaatatcgtatgaaacttaatgatatagtgcatttttctaacacaaaattcaatgtcctctatcgcctcacgaaatttaaaactaaaatataatttgtacagagagaaacaaaaagaaaaatctctttaaggtgttggttacttgggccttgtttagttcaccccaaaattcaaaaacttttcaagattttccgtcacatcaaatcttgtggcacatgcatggagcactaaatatagatgaaaacaaaaaccaattgcacagtttgtctgtaatttacgagatgaatcttttgagcctagttagtctatagttgtacaataattgtcagatacaaacaaaagtgctacactgtcaaaatccaaaaacttttcacaactaaacaaggccttggttggaccaacttaaatagttggagggggagtaaattggaccaaatgttagtttggggcagtggtttggacataggccaaacttggaggggagtgatatagactttttcctttaatttattatttgtgttcaggacttgaaactagattcattctccaagtttaaaccatcaaattagaagaatggaaaaccttttctcttctgttattaggttatgttatgtgttctcttctgttaacatcaaattagaagagcggaaaacctttttctcttctgttaggttatgtgttctcgtctgtaaacttctttttttttgtcacaataggtgataggcggagatctctgttacgcggccttactgagtcactgtcacaaattctgcctctattatattctgtaagtttgcctttacaccttcaccatgtccaatagatgccaatggttctgttgggttgccttggttcatgatactctgaagcatactaaccacaagtatcatattatgtcttgttttgtagctacttgagaaacattttgttgctgctttaagtgagcatgcaaagcagcaaatggatttggctaaacaacatgcagggacagtgacggcagttctaaatgctgtcaatgcatatgctgaatgggctcctgtgacagatctagccaaatatggtttaattcatgggtatgtttactggaacatttgatatccctagtgattctcaattccctcatagttattatgttctttttgcagatgtggttccttgctttcttacagcgattttcgcctccatgcttgtgagttttttaaagtgatatgccagaggtatggagagactttatgtacactaaaagttaatttcactggtttttccctcctgatatgttcttgtttttgtggtgccacctgtctcagaaaaagacctgtggatgtggcagttgctgagtatgatgctgcaatgtgcaacattttccaggtgttgatgaacatttcacaacaatttttgaccagatctggcatgcagcccagctctattgatgagagcgaatatgagtttgcatcgtgtgtttgtgagacaatggttgctctagggtcttcaaacatgcaatgcatactagccgatggacccaggactttccagttcttacaacaagtgagcatttccaaatacacttctcatactttttgaagagtaaaaggttgcttttactgccgtgcaggttcttctcttgatcctgtctaatttgttctagggctatttggcatctagggtttcacaagaaatatatctggggttgttgaaattttgggaaagtctgtctattttgttgttggaatatgaatttcgcacttaaaacttgagaataaagatgcctaaaaaactgagtttgacaagaaagtgctactgctgtacttgcaacttgcaagatcctaagtttctctatgtactgttaggattgaattcgacaactgccatacctattttttttcataaatttaaatggaaaagcaaaataagtggagctaatgtgggattcaacacactctgtgacacatgcatgttaacatcttcccaccaggacctgctgtgtttgtgtgccttggtcatggttgtgtaacttgtggttaactctttaaattcaaaaccaaatgaaactttttagctggttataagttatattggcacatctgcgaagtctggctatcctagaatatttggttcctggctggcgggtaaggtaatggttactaacgtgatgatgtcctatatgtaattatgtattacatgtgggcaatgcctgtttacctgtgtaacataacatcaccacatgactagtttgaatatgcttaatgaaattcaatcaagtcttaaaatttcactgacatgatttccacgtgttaccattcggtccattacttttgctattcttcaaacaaatttcgtgtccttgcagatgctggagtattaccaacattacaaaatcgcgcttcatttccagtctttattattttggctggtatactccttatctctatttgcatagctgaaatgcatgtcatattgttttgtaactttagagaagttgacacaaactttgtctaggtggtattgagagaaccatcgaaagctaagtctgttgcacgtgtttctggtgataattctgctgctggtaattctgcatctactggtgacttatcaacagaaaaggagaagaaaggtgtatcagtatttgtcactgatgaaatgtacagtacaattttggatgtttctttcaagagaatgctcaagaacagtggaagtgcaacttctgggttgttagaactatggagcgaagagcttgaggggaaaagtgacttctgcaactaccgcaccaaattggtatgttttcttttctcctgacttctaaaaataggagttgccttttgtccttgttaatcttaaaagatcatttgtggtttcccttgtccatcgatataactttttgtcatctcttgttttcattggtcttgattcttgaatttttgttgcatgatgtgaatctacacaaaattaggaggatggctagttattcatagtacatttctatgtccttcagttagtgattctttaccttgatagatacaacatgcttctcctttcgtcaagtttccaatttgattgtgtgatttgccatacaagtggaacttttcgtattgtaaatagttgggaggatcccagctatatatatgtatgaataagttacagaaggccagtacccttttgtttttggaccaatgatggatattgtctggcctcttattgtccacaactcagttaactgtgtcttgatcttcttgcagttggatctcattaaagtcattgcttctcaaagatctgtgattgctgcagcaagtgttgtccagagaataaatgttgtctttggagatgctaatcaagcaactaaatccccccaggttggattagctgcatatgtttacccaatgtttcaaaaagttctaggcattaaacaggtggtcaagctctgcttagcgcctagtcgttgcataagagtttcttggcaattgtactttgtcaatcagtagatttacagtagtacagtacaatgttaaatacagaattttggcacattaaaagaaaaaaaatttagcattatcatgcacccatcatgagttctgtgaccataagtcaccttccatcatctccaatgtgtctgaaattcatacagagatcaagccctaagccactcttgatgggaaaacgcctaggtgctaggaaaggcggtgctgcttgcctattgcctagatgctgcctaggatctctttttgaaacagagttcttaccgcataaacctaaattaatggtttctctttccattttcatttggtcaatgaagggttaccttctaattcagatgtttatctacctctgcaaaatgaaatttggttccaggatcttgacgcaatggaaggggctcaactggggcttgaagcagttgtcagtgctatttttgatggctcatttgattgtggaaaaactgatttggagacgaaatcccaactgcacaagatttttgaaggtttcactgaacctaacttgctttaatttggccttacagtttggtcggtgctaaattttcttctgcttgtcaaccaggcttacttcaacagcttctttctttgaagtggacagaacctaaccttgcagttattcatggtcattatttggatgctttgggccctttcttgaaacattatccagatgcagttgccagtgttgttaataagctttttgaactgttgacatctctcccaatcacatttcaggtacatttacattttatttaagtaattaccatagtagtctgatgctgtggggtgtgagccattgaggcagactgatagccatcatataattcaattctatgagttctagaaatgaaaaactgatactactttgaactggacaaatgtttcaacgtgcaatcatttcatgctgtttatttttattctaattttggttatcatgtcatttttctagttttgtgtttacagttctcatttctgccttttgatgtatgcttgtatctgcaggatccatcaaacaattctcgcctagcaaggttgcagatctgctcatcattcattcgtatatcgagagctgctgataaagctcttctgcctcatatgaaggtcaggctcagctcataattgattgccactttaccatttgttgtttcatattcgacatggagttgcttaatgacacatccttttattatcatggcagagaccacttacagtactatattcaagtttctaactgcagttgtgtcttgtaaattcatttctctgttatccttctatttcaagagggaaataagttcagatggagacttaatagtctctacggtgctttcattgatggctttaggctccattggatattattattgagctgagtttttgcttcactatgaagttcatatcagtagcatctctgtgctgggctgcataatggaatatatatttgctgctagagaaacctttattctatgaaggtttgatgtcatggctctgaaaagccattgcaaaaccaaacgaagcctaaataaagacttaattgttcagatttttatgtacatcctcaggtttaaatttttatgatttctgacatgaagggtgatatttaaacagagttcagattctagctttgtcccaaaaagaacaaaaaaatagggacccaaactaggaaaagctgcctagaatgatcagtactgggcccatctcatctgaaaccactgttcatcttttgaatttaaaagtgatgattttttttgatattctattaggctgggtcttgttattaatcctcggggcctctggggaaccttgccagagtttgctacccttgcatttgctttgtggccttgtaaggattgtaaatacatgcaggtcatgttacactgaaatgttttagtcttatccaatccaattacccagcccttttgaactacaaatgaccgttacaattttatgatatatgtaaactaatgataggtacaggtcatgttacattgaaatctttgggatcataaatctggtcactggttggtgtggcaaacttgcattcttgagtagaaaaggatctgattaaatcagaacgcaactgtttttctagggcttccactcatccatgcttttatgttgctttcaccattgtttatgcactcttttgattgtttcaaatgcttttccaatgacacagaacattgctgataccatggcttaccttcaaggagagggccgcttactacgtggtgaacataatcatttatgtgaagcatttcttgtgatggcgtcctctgctgggtatttggctgctaaacctctttgcctaaaagtagttttagtgttgcttctgtcacaagttgtattttttttttgtttccataggattcaacagcaacaagaagttcttgcctggttacttgaacctcttaataaaatgtggactcaagtggaatggcaaactgcatacttgtctgacccttctggtttgacaaacatgtttgccgatagccaattcatgtggtcaatttatcacacggttacattctttgaaaaggcgctcaagagaagtggaaccaaaaagtcttcagcagctctacaagcacccaccacaacagtacctggttatctgcatccgatgtcttcacatcttgcatggattgtgccccctctcttaagggtatgtttggctttgattgtcaattgagatattaactataatctctctgtagttgtgcagtgactaagctgataaataactagcattttaactccctatttaatctcattttcagctgctgcgatgcatacatgctttttggtctgagccatttgcccagtctcagacaggggaaatcaaagcagcaaaaagcatgactgttgcggagcaggccagccttctaggagagacagggaaacttaccaaaggtcaggttgctcctgctgatggattgctggatgttcagagagatggagaatcaaaagaaaacaatataaaaaactggttgcgtgggatccgagacagcgggtaagtattatgatttatgaactaagaaatttagcaacttcctattggcaccggaaaatattaatgctgaaaatggattcagtggatgcaaaatttcgttttattgtttgtctaccaatattagagtgggattttattgttactggttggtagcctcagtagtactgcgaaatattgttagtgccccaactaatgcattgccatgttaataaggccgaacaatacattttcaccaaaccatctagatgaaatttctgaaggatagtgcatggtgaatagaaaataagcaatggcagtttcacctactttcaaacgatttgatccaaaactgtgggcactgctactgagcatgcatggttgataatgatctagacttttgtagctactagtttctgggcaaaaaccttggtcaaagttgttgaattctttttctagttcactcccatctatctattcctactgcacagttttggttgagtatcacaacgaaaggtctatgcgcacaccatactatctttggttatgccaaaactgaagtaatatttttttcaagaacatgcctacatatttcaagaacgaacaggttaagtggaagtagatctgatcatacactggggcaggctggattcaggtctggcctgaaaaaaaacaatgttttttttttgtcggcccaattcttgatttgcctccccaaactggttaacaaaccatggctgtgacaaatgtgtctgcccggcagacaaatgagcagcacttttcttgctagccgtttatagtaagagtataagaggcttttaaccaatcacaccatcttattgggaatcctaaatgcgttaggatgtccaggaggaacggcccaccaacagtgtcaaaggcttcggcaatgtcaatccacaagagagcacttgtggccttctgtagtgctgtttgtgtaataatttggctgcaagctgaaccgaacagaaattatcatgcaacagtcgacccatgatgaatgcaatttgtttggttttacattctgatccagcatttgttccaacctcctagcaagcactttggtgagcaacttgaagaaactatgttaaacacatggtatcttccttgataattgggtagaataaccctgtgaacccatccgggcctgggttgttgtccacaaaagcgtaaataatattagtataactgatttttgaacaattaagaagctactgaaacacattggaagcagattttttgtaaaaccaaattctgtagtaccagttttaccaaataattggtgcatgatgtgtctataattcaaacaaccttttgccctggttttggtcatgaccaagttttggtgaggttgtttgttgctccaaccaaacatacctttttctaagctatttatgccatgtataagtgtctggacccttggtcaacttgggatattcttatactccctgccatggttcaaaaaggcggcgcctaggctccgcccaggcccgattagtcgcaagtcagagggtgtctgcctcgcctaggggggtagacggacccctaggcggcgccagctcgtcggcggtgctggtgggggaggtggagggggtactgcggcgccccggtgtccccatgtgcagatccagtgacctggggatgaggcgcagcagagagagacagcagcggaggacgaggcgcagcaaagagcgccggcggcggaggaggaggcagggaatcgggcggcagaggaggacgaggaggaggagacgacagggagggggctgacggtggtggatctggcggcgggaggaaggaagatgcgagcagctcgcggctggaagaaacgtgtcgagcggttgcgagactcaggaggaagagaaaaggaagaaaatgaaacagagcaggggagagaagataaggcttcggtgggggctgtggagggagttgggccattaaatgggccttttcttctttccccccattctgtccacagattttcaattttttttcttttcttttatgtatatttgagtatacatacatgtattagctaccgcctaagaaaacaccttgaaacgcctaggctctaggctatgggtcagcgcctagaaaccgcctagcgccttcttaaactttgctccctgcatatttaataataaatgaacacttgattgacacttcaacagggttgtcaagtcgtctgattaatcacaattagtcatgattatcagtgccattgcaatcagttatgcactatgattagtcgcgattagtcacaatgagtcgagattagtcggctggttggtgccatggtgactagggtcaatagatgatttgaaaaaaattcacttcgttggaccataaaaaaaatatatatcacagctcataaatattaagagacgatttctgctctttgttctaatcttttttgatacgtgcaaaatgtcatgctgcaggtacaatgttttaggattagcagctactcttggggaaccattctttcgatgcatagagggttcttctgtcacccttgctcttatggagaatatgcaagttatggagtttcggcatctgcgccaacttatccaccttgtcattattccatttgttaaatattgccctgccgatctatggcatgtatggctagtgaaccttttgcagccattatttgtccactgtcagcaagctcttaattattcatggtccagtcttcttcatgagggtcgggctaaggttcctgacagcattggtaatcttcctgggtcagaactgaaggtagaggtaatggaagaaaagttgctacgtgacttgactcgtgaagtatgttctgtgctttgggctttatcatcaccaggcttaaataatggacttccatccttggaacaacttggaccttctaaccggatggattctgttctgaagaatctggagtcctttgcttcaagttctctaactgggtaatgcaaatatttcgagcaccttgcatgattttgctaatacatttctattccttttagctggatgttattgacctttcacattctctgagctttgaccattcttaggagaaccttgtatttcaaaaatttctgttctaacttggttgatgttttatagctcctttcacaagaattaatatctgatataaatttattagtctgaaccactattttatcttgcttcctttgctgtatctgcatatcatagatgtaactagtaaaataaagtgctgggaagaaatatgcaaattgtggccttagtccatggaatcataaaacagcaaatattttaatacattcttcaagattaaaacatgaaacataccacaacagacagaggtagtatgatattattatattgcaagacttttgaggacaaatctagtgctattgtttttgtacgtccaattttgatggtctcagctatagtgtttattacatttttcgaagtttgatcacattaagtctaaagcattgggcaaaaaagatattaaaagatggaggaactcatcaaataacaaagagactgtttttttttcctttgcagatttcttatgcttcatattggcacagctcttcctgcattgaggatatcagttgaagtgttcacttggacagatagtgaagctgtgactaaagttatccccttttgtggtgctttgatccacctagccattgcttcaaaccaggctgagttgaggcagtttgttgcaaaggatttattttcctctataatacatggtttatctgttgaatcaaattcagtcatgagtgctgaacttgttggactttgtcgggagatatatgtctatctgtccgatagagatcctgcacctaggcaggtaatttttgtaggatacagaattgagctggtataaaaaaatgattgctctaatccgccattagtcttgctatatgttttttaggcactgaaagtttttcatgctattcagaaaaatgggttacatgtcaattttgagcgtataattaattccttgcagattaaaattagaaatagctacgtcacattttagtgcagtattttctatggacatggatacattgaataatgtgtatcatgctaacttttttatagacttgttatttttctgtacagtttttcttcatataacatttaaattttcaatgttacatactgtgttagatttccatatcatttaaatttagatttccatattattgactaagtggtaacataggagtattcctttttatttacatgttaccatgttacaaaatgagtggctaaatgcctaatattttcttgggaacttagatactaatgtttaactttggtccgtgatgtgatgtgtcagactctaggctgctagctggggtttattgctccaaatcccaatttgcaaatatgagcaagtttgacttgtctatatatggttcatagccacataggcttgtgcgtgatccacattttgtctgcaccaatattttgataaatttggacagttttataatctgtcattgaaattctgttatttcaccgtcataatgattgacaccattatatgttgctagtttctttgagttattttagaaataattttactagtataattttttacatataaaaaggccatactgtgctactcacttattttagtaggccttgctgtggcaggctgatattgttttcggctaaggacttgtacatgtttattttctccacaacgggatgcccgaatttcattactaagaaacaatgaaattacaaatttgtacatgttgataatgagtgaaatttgaagggacttaattgtagtgaagtgaacaaatgcctagacatactttcttgcttcgttaagtgaaatatcgttaccaatgagtcaatgggtagttgacaaggattacaaatttttggtagtaggatgcgagtcctggaaataattcttttactgggctagctatatgcactgggactaaattggaagtgctttgtttgtaggttcttctttccctcccgcacataaagcaggaagatttactagcatttgatgactctttgagtaaaactgctagtccaaaagagcaaaagcaacatatgcgaagcttacttctgctggctacagggaacaaactaagagcccttgttgctcagaagacaactaatgtgattaccaatgttacaagtgagcaaactacctcagtttttttccttttagtttcattattgtgtattgcaccctcaggaacatgagaataaaaaaagctaaatgcacacggttgcattattctatgcagtagatttattttccgtaatctctatagacttttatctgttgcttaccataaaagatgttatttttgtcaaactaaaatcagttcccttctagctgttagtttggccattgagactacatgagatacatgttttatgttgtattttacctttgcataatgttgttaaagctttaaggttactttatagtcattctaggacgtataacatggggtggccgtagtatgatgactaggagctttcgtttgcactctgataattttgtgaattgctttgtttattgttccatgtagttcggttacttgaaatggatcttatgctgtcgggtaatcagagctgatttggaattttacaatatcctgacattaacatgcacattgctttcttgatttgcagcacgaaataggagctctactggtcaccatggatcaagtgccgaagaagatggccatattgggttggccgcactatcatcgacatgatctgccaaaatttgggtgtgtaaaaaaggttgtataacatagaaatggatcctaatgtggttactgttggtggatgccggattcttgcagcatcattatgtgaggatgaatgcatgcttagttatgcggctatatacccttcctgccttcatgagcactgaccgattctttggtttaggcggtttgttttctagaatgtatgtgctttgcgtctgcgtgtgggttctggtagatggtgaagtggtgtgtgtaattacttgtagctcatagttgcatactaatagtataaataatcttgtccgtctggcatatcggcttgcgttaattcaggctcatttggcagcatggcttcttgtgagttgtgacagccaaggctagtactcccttagatgggggaagctttagttctccaaaacttctataattccaaccaagttgatagaaaaatacaccagcatttttttgacaacaatacaccagcatttaaatgtcattagtttgattaaatccccagtaaatgtcaatagttggattatggctctgtttggtttagcttccagctttagcttttggccccaaaagctcaaaagccaaccaaaggtctctatttggagcaccggattctccaaaagctagcttttgcgtagttcattttccatagcaggggaggggctgctttcaccagctgtggggtgttactttcaatgaaattacctacattgccagtggttatgaagaaaattgttcgttctatttaccttctcttcacttctgctcgacctcgaccggtccgtttgtgaatggtgac

SEQ ID NO: 4291 - DNA, 8477 bp, Sorghum bicolor
atagcagagagtaccacgggacaactttttttttttaagacaagtaccgtattttttactgataagtcatggtacgatgtactgtttgctgatttattgtaaaaaaaatattgttggattttgctgataaactcaagtaaacaggttataagtatttcacctactactggtagttgttcacttgagcttatcaactgaatctgtcaactatctagtagtatttttctctcataacaaatcacagctaatagtattttcataaattttcaaaattccttatcacatcgaatttttatacgcatgcatgaagaactaaatatagaagaaaacaaaaactaatgcatgacacattaaatgtaaacaaaaacaaaaactaattacatagtttacctataatttgcaagataatttttttgagcttagttactttataattgaacaataattgtcacatataaacgaaaatattacagtagttaaagctaaaaaatttcacgaactgaacaaagccaaaaggccaaaagaaaggaacttgtctggctactgtattttattgagggtgatctcgatttggttgggcaccagcaggtcgctcacgtttgtccgtttgcgtccggcgccacatgctcacatgtgccgccctgcaaaagagcactgcttgtccgtccactagtgcaccacggttacacgctcactacctggaactggaacgcccgcgagcagaacgatgagcgacctttttttttttttttttgattgacaacgaccgtgaccgacttgctgtagtagaaagtagacgtcgccagtcgtgaccaccacaggagtgcgaggagaaccctccctcaccgtggaatgatcatgtccaatcaccgggccgggttagcagtacactagtacagtatactagtaccggtacaccatgtgacaccatcacaccacagtcacagctaccgctacctgtgatcaggcatggcgcgcgctgaggatgcttagtgcttaatttgtttactttttttattttgaaccataatattattttgttttttaagccaaatactctctttgtccataaaaaaacattccatctcttaagtgaccgcagatttactgtgactgtgatcccaaacctaagcctatcatgtaaggataattttaatttcaaacacctgtagtatagaaaatgtgccgaaaaagtgcactatatgaaacacatgattctctatctttaaaacttgcttccacatctttttagtttctccatcatcaaccatgtgtccagtggatggttcatacctagctaggtcgatgcctccacctgtttgtggtaccgtcatttttctcctctaggatctcctatagtcatagcaggagtgttataaacgttagtgatgacatagacgtggacagaagaactatattattagaataataagtataataaagagttgtaaattaactttatataaaggtggatgagatagagtaggagagagaagagatttggattgttagtttatagccgaagagcttcagtaagccttaagagagaagaaagtaaactatgtattagttattccctccgttccaaattattggacgttttgaattttttagattcgtagtatttattatctacttagatatacactatatccagatgcataataaaaacaatatatctagaaaagtaaaaaaacgtcttataatttgaacattttgtatattttgctaaattttagcatgctaggatcagaaagcctatgtatagatcactcaggctcattttgatgtcataaacataatttatttccatccttggggcatggtttaaatctcctgtaaaattaaaaacaatggctactcggcagacacgtggcatctatataacaacagaaaagccattctaacccaatcattcacgagagaaccagtaacaaaactgtgtactacgtggtacgtgccagtatattttaatctatcgtccactgcctgcccgccccatccgcttcatcactcctttcttcccctgtttctcctcgaacccagcagcgccttcttccgtcttcccgccctgcctcaggcctcagccatgcccgtcgcggcgctccaccctcccccggtcgctgtcggcgcgggacgccgcagttgccgacgccaggcgcggtggttcgccctccgcgcgagctccctcgaggcgtcgtcggcggccgtgacggtggcagtgaatgggacggcggcggcaggggccgcggtggagaaggtgcaggaggataacgagggcctgtcggtgaaggaggatcaggacgagagggggctggaggtcctctacgacgacggcttcggctccgtgaccgtcaaggactacttcgcggcggccaaggtcctgtgcagcagggacgacggcgggccgccgcgctggttctcccccgtcgagtgcggccgcccggcagtggacgacgcgccgctgctgctcttcttgccaggtgcgtgcgtgcgtcccttcatttcacctgcccaaatcaatcacttctaccgtcccacgaacgtagacaacactgtctattggccactgcaggaatggatggcgtcggcacggggctcatcctgcaccacaagtctttgggcaagtgagtctttctccttacgtattaattaaggttttttattgccttttctggccaataataggagtagcctgcaaaccttattctagataaatcccccttttcttcaaagcaccttttcttcctgcaaacagttttctttctgattagtccagctccatgcagtctttgtcaagagagctatgaaaaaaaaaaacaagaagatagactaactagtccactagatgttgatgccttgcatctttttcctaatataatgctaaagcacccatgtgacaaaagttgtctgcctcttgttccttcttgtttttgtcttcactctttgcgttacatcatcttaggagcccctacatagtcagtaccacaaattatgaagtactagcgttttactcgactacaatttcatcaactgttattcaaactgtaaatattattattctggcacatagtggatgtcatcaagtccaactaatttttacgatacctgttgtcgttcccatcttctttagcagccatctttcttctttggtcactcatagagctttctgagttacccatacccttttaactcttgcctcctttgttaattctgcagagtattcgaggttcggtgtttgcatataccagtcaatgatcgtacaccattcgaaggtatgatgttgctgcattagttcgtggatacctctggctttgatagcatattaagttacatgcaccgaccagtttgactcaaaagattaaactgatggtgagatatggacaattcacttatattccaacatttaactatatcttattaatatttctgtaccatcccaatgtgactgtagaaaaatttgcaaaactatgagtatgaataatagaactgtgtagttgttcaagagattgagggatgagtaatccaaaagccgcccttttctaatacacgtgactataatatcatacagggttagtagaaactgttgaaaaatcgatcgagcatgagcatgatttatcacccgacagaccgatatatctagtcggagattcatttggtgggtccctggcagtggcagtggcggctcgtaatccacaaattgatttggttctcatactagtaaatccaggcaggtgatcattttttggtttgagatttgatccaaatagattctattcatatactcgtttttccccaatatcgttgccaactaacctgtttttatttaccagctacatcgtttgcaaagactccattgcagccagtattgcctctactggaatcaatgccaagcgagtttcatgttacagtgccttatcttctcagttttgtcatgggtacaactcctcttagctcttctttgaaactatgaaacactcaagaatccagctcatctttatcatggtcttcttttcacctttttcccctacaagaaaagtcagtcttaaatgttcatgcaaatttttttcttaaatatatttagtgtcaaattcaattgttgcttcacattttctggtagagaaattgttatcttttgcaactcattttgtattattatctctatgtcatgccctaaaacaataatttctttttcttgacaatacttttgctattattttcatttctaataatctccacttctacaacaacaaactgcatcttggctcttttttcgcattattatgtaatttcatttcttttcttgccacccctgctaggtcagctctatttcttcatcaagtaaacaaagatcagagaattcagaacaattcaaaaaattaaagacacataaatgcaaatagtacatacagtatgggggaatcaaggaaaaatgttgtcatttttaaaagtacttaaactttttgataaatcacaatatggcaaggaatgtactagggaaagcacttgaaactttgaagacattcaaaattaactattggatttttgggctatccaacattttccttttctacaaaaaatcttattatttaatagcattcatttttttatgtattttatatttgtttctatttagtagcaaaagagagacatttttcattggtaggaaatatattagagctgtaaccatgtagaaagaaaacatatatcttatctgtatgttcttacttcagagaatatgtttcaacaggtgatccactgaagatggctgcagttagcattgaaaacaacctatctcctccagaaactctacagaaattgtcagacagtctcacatcaatgcttcctttgctttcagtatgttgtccaatgtcccctctttttcttcccactttttttttcctacatatcttcaagtttcaatacttttgaaatgataaccctaatgctcataagtcttagcagaccattcttctttcccttttagacatgcatgagagttgcatatgtttagagctgtacagaacctcttcatttacagagagatgcacactatgagtatcctttaacttaagtttgagggactcgtgtcactggtaggtagcctaattgcaatcaggcccacctgacagtgacatgagtccctctactagtctagatcaagattacactacacaccaaataaagacatgatcatgaactaaacttcagcaccagggaagtctaaatcaaccgcatggctctaaagcttttagcacttgcaaggcaccaaacatgtatcagatcagtcatcactcttacaaccaatatgcagaacatttttttaaaaaaaaacatgtgcaaaacattttaactcagttgtagccccaattcacaaaaaagtgtgaggaacattgcttttataaatgctccatgttttgtaaaagatggaatgaatatgtatttcttttaacttattattttaaagattgtgtcctttctccttgcatgatgaaatcagttacaaatctggctgcataatggatttcttattcatttgggaaacatttcatatcattattttttgacttcatgcttttttctttacttcaggaattgtctgatattataccaagggatactcttttgtggaagctcaaacttcttaaggcaggagcagcctatgcaaattctcgtcttcatgctgtgcaagccgaagttctacttcttgccaggtccgtgctataatatttgctatctatactctatagttttgtagtccatctacttttagtgttcatgtgtttgggttcaaagtacaaatcaataatatacctgtattcagtggtaaggacaatcttctacctagtggagaagaagcggatcgactcttcaaggcactgaaaaactgcagagttcgatacttcaaggacaatggtcatacactactcttggtacaaagcatcactcttaaaagttcttctgttattcctaactcgctatctaattatacatatatatgcaaaagcagtgtatttctgagccttcatttttcaaaattatattgtgactgcacaggaggatggtgtcaatctgttatctgtcataaaaggagcaaacatgtatcgccgtggaaggcaaagggattttgtaaccaattatctcccccctactttaagtgaattcaagcaaacatttgatgtggatcacaagtatgtgtcaaaattctgaaagttgtgttctactttcatctctctctctctctctctctctctctctctctctcgacaaagtaagcaaaaatttttgaatcttctgcagactgtttcaccttgcactgagcccagtcatgatgtctaccctgaagaatggaaaagttgttcgcgggctttctggtgttcctgataaaggtcctgtcttgtttgtgggctatcatgcgctgatgggtattgagttgagtcctctgtatgaagagttccttagggagaagaagacagttgttcgtggcatggctcatccatttctgtttggaaacaaatttgactcatcgcgccaggagatatctcggatcgatactgtttctatgtatggtggattaccggtcaccccaatcaatatgtacaggttattcaagaggaatgactttgttctgctttatcctggcggagttcgggaagctctgcataggaaggtttgtttaatttgaccatttatttaaccctctagtagccttgactgaatcattgtatgattattatcataaagatttccaattccgatgtgttaaaaccaacttaaaatgagctaattcgtcagtcgccacacttaaggagatgaataaatgctacttgaaccccaacttttttttacaactttttgcttcttcctactgtaactatgtactgtattttgcagggtgaagaatacaagttgttttggccagatcaaccagaattcgtaagaatggccgcgcgctttgatgttactatcataccctttgggtgtgtaggagaggatgacgttctagaggtagagattcgttaatccatttgttgaagtgaattctttcacaccattaactagaaatgaaaccgtggctggcctagtacttttgcagggccttgttttgcttcagtattccattgtgtaaaaaaaatgcatgaccactacaagctatatgtcatgttagaacacatttgtaactaataagtttctttgctgcatggtgatggaactaatcactcactctttacactcattctgcagttggttctcgattacaatgatcagaagaacattcccggacttcgggagtggatagagtcaatcaacaaagaagccgagagagtgaggtaacatttcatgatattttctcctcgacaaagacagaaaaaatgataagatcttaaactcttgttcattcatggcaaattggcatgcatttcatttcagggacagcgtaaaaggggaggatggaaatcaagacatgtacttgccagctcttctcccaaaagtacctggtcgattctactatctattcggccaaccgattgaaatgaaagggatgaacaaccttgtcagagatagaaagaggaccaacgaggtgtatttacgtatcaaatcagaagtggaggagataatgtcatatctcaagaggaagagagaggaagacccttacaggagtatagcgcagcgtgcgctgtaccaggcaacatggggcgcctctgctcaggtcccaacttttgagccatgaagatttggtgcagaaatgtttgtgtgattggatatttagaagttcacacaaacgacgacaggagaacagcgactaccatttctgtgtgaaagtagggaagggcatctacgagctgcaattcattgaccggatgtaatgcattctgatttctgaggaaatctccctcatgctgtacagaagtagattacgtatagtatacagaaaaaatgtatatttttagaaaaactgaaataataattttaaataaaaagcacactaagcgcaataactgaaaatagataaaagaaattgtatgtaacaccccagacgccacaaaagcctaggatgtcactatctcttccctcatgccaaattctaaaacttggcaacataaacccattaacaatgtaaagcgcagaagcaagaccaacgatgaaaccattattaaaataggctccaccccatttaatattatcaaatcatgaggggtcaccatgactaataaattaattttattacatcaatccaaacccaacattaatcattaataactctatgtgtgggtgaatcagtgaagatgtgctgcaaatcccctcccttccatgcaagcatcaagtacctgaattgagtaatgcaagagtgagatgaaacatctcagcaagcaaacttgttttgacaagccatttaaaaccacaagtcgaattaaacaacaatttaacatagagttccacttatggataaacaagatacaatatcaatataaaat

SEQ ID NO: 4292 - DNA, 14733 bp, Sorghum bicolor
acggcttctccgggttgtgtttaaaaatatgatcaatatgcatcaaagggaatcggttggacttgcctccgtcggcgtcatcagcaaactcctgctgacagtctagatcctcgacgtcgaactcgcggtactcgtctccaacgtcctcgttctctaggtcgttcactttgtcagctaaaataagtgacgaacgacacagacaaaaagcccagataaataatcatataaattcaaataagctctaaaaatcataaaattaatatgagaggtagatcatgattttagatgaatttaggaaaaagaatcgttgaaatcagagttagcatgtggcatttgtgaaatggccgaaatttaatcacgcgaaaaaggctaacgatgattaaggaatggatgcttcacgagataattttttggctggtagtgcatggtgcgtgcatatactatttgatagagttaatacttatggcccacatatacataggaagagagaaattagcagggatcattagagctcttttgtatatcatggttcagtttgtggagttcacgacagtgaattggtacagataaatacaaagagggataaaaaaatactacaggaagacagaggagagcaaggagatgctcatgagctgctcacctcgtcttgcgacgacagtcgagctcgtcttgtgcgtatgaccgtatacgatatacgcaaagcgagagaaaacaagcgagtgagcgagtgaatgaacgtgcttatccgggtggtgagagtgagcacccgagagtgcatttttatagaccaaaacgctcagttgcttgccattaaagatgctactgtagtgcatggctgatgggacaaggacggtggacggtgcttaatttgcatgcaaaagacaatgtctcatttgcatgcacggtgcatgcaaatggacggtggcatgccctgcatgcatgagatatattcatgtgtgtgggtgcactgctatgctttcttgcatataagcttgtggtacttgctgttatttgtgcgcgaaaaaatatgaatggtgcccagttatgcgttgcgacttgctattttttcgagcaaaagaggaggaagaaaaagacaagaagtggggcttgcatgtcgcggtgcacgtgcgagcgaatgtgctcggcgaggggggccgggtgcaagtgcgctgcggcgctgatggtggtggggttggtgcacgcgtcgttgtcgggtatcgggcaaagcgagcgagcgaaagatatgagtagcggacatgtgatgctgatgccatgttctgctggatatatttgaagatggataactgcgatggatgaaaaaaaattggatagagatactatagagctcaaataatttatagtttttgaaatatatttcgaaaataatttttaatgtgagtaatttttgaatgtgaatttttaggatattatactattcttgttttctatctttggctagcgaaaaattcagaataaaaaatatctatattttgataacttattaaagagtttattggagagtattttttatcaaaatatctatttctctttctcttaattataaaagatttacagattctcttgaagctaattttactttcatttatgatacaccatatgctaatagaataggtcccctcattgtaggtagtgggaaccaaagacccggcggtgggagcctagccatcggataatgtagagggatccgcgttccagtaggcaagtagcgtaggaacgtcggcgtgtacaaaacaagacgccccctggcctgggcttttccatttctccagcgtccacgatactgacgccgccacgccatcggcatgggcggagccgcacgagttctaccacgtcctattgcccaccaccacttccaccagtctgcctctcttccctatctccacgctgccgcacctgtcgccgcctcctccgctctctttgccccacgccccactccgagcccgagcgtccgcgtctcccgcccgcgccgccacgccgcgatgtccgccgccgcagccgactcctcctcctcttcctccatcggtaaaccctccgtccgtccacgcaatgctgccgcccactggcgcctcacctgattgaccgactcctgttctgttctcgtgtaattattattatttatttccccgtcgcgttgcatgatcgcaggaataccgcgtgatgcggcggttagctcgctctcgcccgagagcgtcagcaacaacgatctgctcatcgttgggccgggcgtgctcggccggatcgtcgccgagatgtggaaacaggttgctactcaattgaatctgatatataggttatcaacctcgcccctcctgttgagagagcgcaactcgtcaacaacttaccaacggggattgggcacatatattacttttattgattattcaatttgtcctgttctatgcaagcccacgttgagctagaattagaaacgacggaatgtcgcctgataatactttttttaagtgttgtcagagcagctccagtgctaaatcgaactgaactggcacgattctcagttgggtagagttcggatagtgtcacgtcggtggttgctcaaagaaacaataaataaatcggaagtacaataaacaaatcggaagtgaccctggttgatgaggtttcacaggcaatgacatcagtgatctgtcctaaacaaggaattttttattggaacagcacgccacggttcgatgctgttgggttcgattttacttctgacaacgagcagccgaaccgtgtagtgttctcccttggttcgattttgcagtacactggaggtgctctcaaaactcagaagaatagtgcaattttgaactaaatacatatagaaataatacttgttaataatcgggtattttgaactaaagggtaggggatacttgctgaaattaattttgttttcatgcagttaactacaagtcactccctataaaaacattatcgaagccctagtgaacgatgtaaccttgttttcggatcaataaagtgcgtcagatggcttccctcaaaaaaaaaatcaaccatttattttccatttctgctatcttttatttagtggtactgcaaagtaccatcaacaccagtggcggatccaggatggagacaaaaaaggggggctaaatagtgaacatatagggttaaagccaaagattaataagaatttaaggctaattaacactaatttaatggacaaaccagactcatgcggggggggggcctggagcccacccagccccccctttggatccgcccctgatcaacactgtgattctggcaatcttaacctaatgatcttttggtggagtgtcgtgtccttgtgacttctttgaattatcagtaattcagtatagtacctactgtaaatgtaaatttcttaacgtgtaaagcttggtctaattaagagcttgccttataggaatatccaggttgcaaggtttgtggccagactgcaaccacagatcatcacagtgaattaactgacattggtatcattccctccttgaagaggtccgtagcgggtcccaaatttccaaatgttattttctgtgctccaccatatcgttctgaggattatgctggagatctgaggtaaataattgtaagcttttaatcattattgcttcctttattcatgttgtactatgtcactcacagtcagacatacatgctctgccttttctcttcaccagaaaaagattgaaatctccatagtccatgcttgaaagttgtaagagcatctccaatagttcaaaaaaatggtaaatcaatgagttttccaagtggaaaaagaagttaggagcacatttgttgggtcctccaaccatttccaaaatcttactcctaaaatatggaagacaattttgcatcaggaatctcggactatttctaaatcaccccaaccaattttatacttttctctcttgtacatttgcattggtaactttgtccttactccttattcttcctcacatccttccgcttccagattggccaatcgatacacacgattggatcgattttcccaaatgcagaaagattgggagatgagatatagagttgttggagagcaattttttccagtcttgccaaaaatcaagattgggagtgggttctgaaaactcttggagatgctctaatgcatgattggcttctgggtaacatgcatctagaaaatagtgcagaaatgttttataccttggatttctagggctttgggcatttattctctaattgaattttgtttaaattttaattgaatttactaatttagtatgagttagtaatcttttataatccgacaagactttgagatgagttagataataaaaacacatagaactttgcaaggctttggatgaaatgtcaatgttgcatgaatgagatgatatgccagccccctcacgccatgggcagtatctctgcaacggatccatgcctgctttctgacaccacatgaccccatagccacctggccctttccaatcggccagtcctttgctgcctgtggttggcggcatccccaccaactcatcaatgccgcagactcaccacctgttatgaccggtattacgtacaagcggcggataagtggctaggggccacaggccgatcggcctaggggggataggaccccaatttccattgtcaattgctattatttaggaatattattatttgagggagtattttataaattattagaggagaggaggatatatatatttgtaaagactctattctggattcaagcagaaacaatattgtttccagcttcctttagggagctgggagatcgggaagtcacccaaaaccctagccgccacctctctgtgaacagtacgcgcgctacagtagccgcgggtactgttcacgcctccagccgccgctgcgcctgccctcaccacggcgccccagcgccgctcgcgagttccagccccagtctctcacccatatcgcctgcgagagatcaagggaagaaggaggaaccctaacaacctggtatcggacttggccatgtcgatcccgctgccctcctccaccgtgccgcctctgtccgggaccgaggcccccgccaccaccgcgtcgctgactgcgatcccaacgtcccccttgcttccgcagccctcgctgccgccggccgccggcgcgtcgccgtcctccggtggcgtcatgacgaacgagcagctgacagcagccgtcctcgacctcggccggatggtcgctgggatccatgcattcctgctaggaccgcactcctctacgcctacgacaacccagcagctgctgctgccaacgacgacccagcagctgccgccgccgccaacgacgacccagcagctgctgccgccgccaacgacccagcagctgctgcctccaccagccaatgcgccgtccgagggcattccgatccaggacatccggtttcccccctcgccatcgccactcccagcgtggctgacgggagcctcgccgccggtctacaccaacactccggcgcacccgacggtccccctgctgcccaacatcaccgcggggttcggccatgggggcgttcccgcgtcgggcaccctctatgggggcatcgacgggaccctcgttcccggccctagcctcggggcggtgccgacactcggcgcggctccaccaggggccgcccccacggcgttcgccacgttcccgatggcgcccgcccctgctggtttcggcgctgctgcgcccgcggttttgggagcggccgaattccaaccgaagggctacaagcttgacttcacgtacgatggttcggttgacctgctgaattggctaacccactgcgagcaatttttctggggccagcgcaccccggagtcccaacgcacatggatggcttcgtaccacctcaccggcgctgctcagacgtggtactatgctctgttgttggatgaaggaatgtcgtcttgggagcgcttcaaagagctgtgccgccttcgcttcgggccgcccatctatggctcgcggttggctgaattggggcgtttaccgttccactctacggtccaggagttcgcggaccgcttccagacgatccttgcacactcccgggatatctccacgcgccaaaaggcggaactcttcgtgggcggcctcccggaacatattcggatggacgtggcgatgcgtgccccgcccgatcttcagtcggccatgttcctggcccgcgcattcgagagccgcgcaacagccacagcagcgctgttccagacgcagcagcaacgtggcgcgcgccaaccgccgcggccagcccctccccggcgccaccaggggcggctgtggttcctgctggcgcacagggcgttccagcaccagctgcagcagccgctgttccagctgccccgggggcagcagcaccgccgcgacagtttcgacgtctctcgccagccgaaatgcaggaacgtcgccgccaaggactatgctacaactgtgatgaacagtatgaacagtacgtccgtggccatgtctgcccacgactgttctacctggagtcggcagactacgtcgaggaagatgaggcccctgccgcagacgacgacgcagcccctgcggagctggacgatgatgcggctgctaacgctcatgctctcgttgtctccgtgcatgctcttgcagggatccggacgtaccataccctgctcctgccggtgacgattaagggtgaacgcttcctcgccctgctggacacggggtccacccacatgttcctccagggggccgccatgcgtcgcctgggcctcgctccataggggggcgagcagcttcgcgttacagtcgccggcggcgagcgcctcccttgcgaggggatcgctcgtgacgtgccggtcctcatcgacggcacgaccttccacatcacttgcatcgggctcgccttgggctgtttcgacatcatcctcggcgtcgacttcctcggggcgttgggccccctcacttgggacttcgaggggctcacggtggcctttcagcgcagcgggcaccgcacggtgtggcagtgcgtgggcgctccgggcgctccctcacagcagcggtctctcgccgcggtggctgctgaccctcagcgcccgctgctggacgagcttctacttcagcatgccgacatcttcgacacgccacgcgacctcccaccggctcgctccaacgaccaccgcatccacctcttgcccgggacggcgcctgtggcagtgcggccgtaccggtacccccagctacagaaggacgagctcgagcggcagtgcgccgccatgctggagcagggcatcattcgccccagtacctcgccattctcggcgcccgtgctccttgtcaagaaggcggatgggacgtggcgcttctgcatcgactaccacgcgctcaacgaccgcacgtccaaggacaagttcccaatcccggtggtggacgagctccttgatgagctccacggcgccaagttcttcaccaagctcgacctccgctccgggtaccaccaggtgcgcatgcacccggcggacatcgagaagacggcgttccgcacccaccacgaccactttgagttcctggtgatgccgtttgggctttccaacgccccagtgacattccaggcattgatgaacgacgtgctccgcccttttctccgcaggtttgtgctggtgtttttcgacgatattttgatctacagcacgtcgtggtccgagcacctgcagcacgtgggcctcgtcttcaccgcccttcgctcccacggcctcttcttgaagcggtcgaagtgcttcggggccctctccgtcgcctacctcggccacgtcatctccgccgccggggtcgccatggacagcgacaaggtggctgctgtcacctcgtggccgacgccacgatctcctcgcggggtgcgaggcttcctggggcttgccggctactacaggaagttcatccgcgacttcggctccatcgcggcccctctcacacgcctcctacggaaggaggcgttcgtctggacgacggaggcggacgaggcctttgccgcccttaagcgggcgctctcgtcagtgccggtcctacagatgcctaacttcgagcgcccgtttgtggtggactgcgacgcctccggtacagggttcggcgccgtcctacaccaggggggcggacccctggctttcttcagtcgaccttttgccgcccgccatgtcaagctggcggcctacgagcgggagctcattggactggtgcaggcagtccgtcactggcgcccgtacttgtgggggcgccgtttcctcgttcgcaccgaccactacagcttgaagttcctcctggaccagcggctgtccaccgtgcctcagcaccagtggctcagcaagctgttcgggttcgacttcgccgtcgagtaccgccccggcctgctcaactcggcagcagatgcgctgtcccgccgcgacgaggacgcggtggccgcgtgcgccctctctgggccgtcctttgacctcttcgacgtcatccgccacgccaccgcgaccgacccgacggcccgcgaccgtctacagcaactcgcggacggcaccttggacgctctgtgggctgcgcgcgacggcttcctcatccacggcaagcgcctctacgttcccgacgtcgacgatctccgccaccaagtggtcagcttggcgcactcagcggggcacgaggggatccagaaaacccttgtgcgcctccgggctgacttctacatacctggcgatcgacgcctggttcatgacttcgtccgctcctgcgacacctgtcagcggaataagacgccgaccacgcagccggcaggcctcttgcagcccctggatgtgccggcccaggtgtgggctgacatctccatggatttcgttgagggcttgccgaaagtccacggcaagtcggtgatcctgacggtggtggatcgcttctccaaatatgctcacttcatcgccctcagtcacccgtacacggccgcctcagttgcgcgtgccttcttcgacgggatcgtgcgtctgcacggcttccccagctctatcgtcagcgaccgcgacccagtcttcaccagtcatttgtggcgcgacctttttaaatgtgcaggtgtgaagcagcgcctcagtacggccttccacccccagactgatggccagtcagaggtcgtcaacaaggtgctcgccatgtacctcaggtgcgcgactggtgaccgcccccgcatatgggtcgactggctctcgtgggccgagtactgctacaacacgtcgttccactccgccttgaagacatcgccgtttgaggtggtctacggttgcccaccacccccgcttctcccacatcaggagggggcggccaagacggaggcagtggacgtcctgctgcacgaccgcgacgcatttttggcagaggtccgggagcgtcttcttcaggcacagcaatacgccaagcgcttctacgaccagcaccatcgcgaggtggagttcaatgtgggggcatgggtgctactccgcctgctacaccgccccacccatgccctcgctacgccggccacgggcaagctacgcccgcgctacgccggcccgttccagatcttggagcggattgggcgggtggcttaccggctgcagctgccggccgacgcgcgcctccacgacgtctttcacgtagggctgctcaagccctacacttttcctaccggcgtccctccttctgggccggctatgctgcctcctgtgcaggatggtcgcctgctgcccgccccggagaaggtcctccgtgctcagctacgtcggggtgagtggaaactcctggtgcagtggcacgggctggctgcggatgaggcgacttgggagcccatggaggacttcaagactctaccctgatgtgcagctcgaggacgagctgtttgccgagggagggagagatgttatgaccggtattacgtacaagcggcggataagtggctaggggccacaggccgatcggcctaggggggataggaccccaatttccattgtcaattgctattatttaggaatattattatttgagggagtattttataaattattagaggagaggaggatatatatatttgtaaagactctattctggattcaagcagaaacaatattgttaaagggagctgggagatcgggaagtcccccaaaaccctagcttgcgagttccagccccggtctctcacccatatcgcctgcgagagatcaagggaagaaggaggaaccctaacaccaccactcctcaccacctgccactgctggttgccgacctcctgctacgtcatccctctaagcccaggcagcagaccagactctgattacgctctctcctgaacttaacatcatggtgggaacttacaggatgccaatgactggaaggagcatcgttttcagccaattgatgtataagaagtgtgaaaacattgatgaatggttcaagtgtccttgcagtcaaatatacctcgctttgtcttacactttaagcctactagtgttaggttccaaggacatgtaagacatccttataccagatgacatgtgcagaatagcagcttcgaattggaatggagaaggttctttcctattcacctcgagtactgctgtgtatgactgcagtgacaatggattctgcggtgaggtattagtcctatgagcattgtattacacagcatacaagtgcaaactgcagagttatagtctttgtttgctcctgaactttgtgggtacaaaatccactccatattttgttggtagtatatgcagtattacactatattttctgctgatattgcaaactgaagcgttcagggattcatatagaaaaaaaaaattgaactttgaacaagaaaaaaaattggttttcaggctggtaacatgctgttttgtggtggttgcactttttaatgttcatctatttgcttggactttgcagcaattttccagacttccagtactagctctgtctttcttgatttcatttaacctttatctttttttttttctgtttgtgtaggattctccttgtgtatcgattggtcagagccctcgtactgatgtgcttctaaaagctgaaaatgttgtccttgaggcagggggctgtgttcttaggctagcaggactttacatatcctcattgacatgactttttttggttccaaccttcaagcacctagggttcttacttcttagatatatacattgcctgattcgtattgaattaaattgggcagaactgatgcaatattccttgacttccattacaaatcagatcgaggtcctcatgtctattggttgtcaaaaggaaccttggatgtgcgtcctgatcatatactcaatctgatacattatgaagtaagcgctgctacttatttatggttgtataacatggactaatggattgtatgctagatgtttggggcaaatttgaatccatagttatcaatttagagcatagccttggatgcaacatgtactctgaagtgttaatttgtgttatccccccatttaggcaaatcaataaacaaaacttgtatccatactctagatgctaagtttccttttttttgagtaaaacaggaggggtcgccccctactgggatttattaaaaccaaagactagaggttacaacaacatattcaggaaacaaaaaaaagagacaaagtggttgctttgctcgaagaataactcctgcaaactcatccttgaaaatttgcttgcatcgctgaagagatacaggtctgttcctgaagatatagtcattgcgcacagaccaaattgcccaagacatgcagattaagatttccaggaaaaaaggaactgcaagttgtctcctgaaactgtccaaaataccaaaggggtctacgaaagctccagcttgcaggttcagcgtgttccagcattgaacagcaaaaggacaggctaggaaaagatggagaagactttcctcaatattatggctgcaaaggacacaattatagttctctaaagccatattctttctttgtaagagccctctggtgttcaatcgacttttttcttttgttctggcaggcagttttccaaagccaatgaaatactggatggatttgcctatgacctgttaagagcttataggccttgcagggacaagaggtgagccccaaatatttgtccagagaacagcatcctgggtgttctgaatggtctgaataagggcttgttcggttacagtatttagaggccaggaatcaatccggcagtgaaagtttatataaaatagaataccaatccggccaagaattctttccggagctcgttcccggtgaaacgaacgtggcctaatagaagagaaaacttggaattgagcaaaagcctccaccgaaaggggcaagtgaaagagtaattggagttgtgttgttagccttgcactttgatctgagatattgggattcttggaaaaggagaacaattcagggaaggactgttggagaagatgtccatgccagaggtccaatcttaagaagcaggatgaaccagcaggagcttaagaatatccctccactagaaggaacctcttctttcttggataggtagaagacccttagagtaatgcctctcccaaatcagatgcaccaaaggtatatcaagcttattaaaaaatttgtgaagattcttgagtgataagctgtcactcaagattctgagtcttcaaatttcctagccccccttcatccttgggcaaacacaccatcggctaggcagcctttggagacctcttatcactaagatttgaaccacgccaaaggcagtgcttacaaaacttatcaatttgcttaataatagttttaggtaaactggaggtgcacatagaaaacgatggaagggctgaaaaaaatagcatttgtaagctccaaacatcctgcctgacttaagaaggtggaggtactcattaaccttctttcacaccgttgagaccaaaggccaaaaatcagctacacaaggtttagtcaagctctgaggcaaacccaaataggtaaaaggtagaggacccttggagcaaccaaaagtgtttacaagccgagtaaacttctcttctaaacattaatggggaccatcatcaatttagcatagttaactttcaggcctgtagattctgcaaaggaatttaggaatgccttgagaaagaaaagcttcctggcacactcttgcatgaaagtaagagtattgtcggcatactgaagaattggaaaatcctggcaatgagttaggggaatgggcagtttaatcagtccttggttctttgcagaattgaggagtgactgtagcagatctgctgccaagacaaataaaagaggcgataatggatcaccctgcctagccccatgcttgcagtggaagaccttaccaggtactccattgaggagcactgaagaggttccagagtcaaagatgcttttcatctaatcaagccatttagcaggaaagcctttgcattgcattacctgaagcatgagattgtgctcaactttatcaaacaccttttcaaattcaaccattgcactgatatgactagatttgtttcttgattacatctatctgattaatatgtcagggtgtatgtttatgtgttttgcatttacaattttctgccttatgttatttacaggatgcagcctctcttgcaattgccatcatgaaaaagagattacggagccgcatctttgtgggctgtgacaatgagcctctgtccaggtcactgccaaagttcatcttcttcagttccctttcttcccaccagcaatgattttgctgcaaatacttgtgtgctgtcaattttgatgctgcaggctagagattatggaccgtgtcaacagaagcgggaaatttgagacacagtttcagggcttcactggttagtcagtcatatactagcatttttggctgctttcatgaattcctgattaaatcatttgggctcttaattaacatatatagctgcatgctgtagggactgatggtccgctggggaagaggatggagaactccaaaactcgggcagagctcggatggcagcccaagtatccgagctttacagagttccttggtctcagcaatctctaactttcatgcgttgtcgctaaatacttgtgattaaagatgaatatactggtacatgaaagaaacaatgacaaatttgaagtggaatgttggttcctcatactacagggtttggctatcttttgttttattctgttagatcatgtaaagcattgcatcatggggtggcatgtacctaacagccttcaattctcttttgttaactcatgagagcattgtacgagcatctccaacagttatgcaattgaaatttgccatttgttggagtttgccaaatccctaaacattttgccaaaggaaaaataagtttatctccaagtgtttggcatttttgacttgacattttccaaaatagtggacccaactatttttgtccgggaatcatcttcgcggcaaattttctcgcacgtcgcgtgggcgcccgtcacacgcaattccttcgcccgtcgtgccaattgtctcgcgcgtcgcttgaccgtgtcgtcccgcaagtccacgtcgccacttggtccaagtcgtctcgagaccacgttcatcgatctcaggctcgaggtctcagacgatggatctcctagctggcgtagcgtcgcatgaaggaaggagagg

SEQ ID NO: 4293 - DNA, 4002 bp, Sorghum bicolor
aaaaaggattgtgatgatattttgttaaaattgtgcaaacgatcagccaatctcctatctcttatgcacgtatagcagttgctacaactctgccgtgcaacggagtttgttttctgacgataggaattgaccagcagctagctagtgttaggacgcaactaaaaaaggaacggggaagcctctttttttcccctccgtttgctaagaattcagcagcaggtatgctatgacgacaggaacggagcaccaacccaaggcaagcgtggcagtgatcatcatataccttaatcatcacgggtgcacttagaatcctggataatcataataaagaaatgattgatcaagctagcaagccagatcacatacgcatcgatctttagccaccatcacgttgttaataaatccataaataaactacgaataaccggctagccatacatctggtgggcccgagttacaaagacttaaatcattgtttacacattggaagcagacccgcaaactaataataaagtgcgaatgaaaaggtgagaacaagtggccgggaattagaatagtgtgaattttttaagtccccatatattctttttgcgcgaatattgttcttttttgaaactggaacaagggaagcccaaataacagtatagtggatgagacataccaaatgctctcatcaatccacactgcggtaataatgttaccatacttgtctagtttcatgtattttcagttcaatgataatgactataaatttcacaaaaaaaaaacaaggattgtcgaagccatgtgaatgcacgatcgacctgatgactaggatatgtaatgaaacaactaggagtaatatgtatatatatgtaatgaaacattggtattagggcactcacaatgtaagactctatcacagagttcaagacaattaattacatatttttatagtattttgctgatgtggcaccatatttattgaaggaaaggtagaaaaaataagacttcaaatcttatttagactctaagtccacattgttcgaggtaataactaactttagactctatgatagagtatacattctgagtgcccttagttgagtcagtgggaatgaattaatccaacggcggtaagaagggacgttgagtgctagttcacagtagatgatgaaccggtgtcaacaaagtgctcacctaatgcttgcactttgttattagtataaattaaactctccccagctgactgcagaccaattctttgacatggaggagcgaagtggggaaaaagcagcgacaactttattcgattcgatcgagaaaggaagaaaggatgcatgggatgggtggtgctgcttcgtccagatgcctgcctgtctttccgttttgttcttcttctctccatatctgatggcgacatccggaggtccaattatacatactgcaccacagtagtgacaagtgagcaagttcagatcgagtagctcaccttgatcagcatttgtctcatttgacatctcgtagctgaggactagttgcagaacaaattgcttgcttgcttccttactggtgcaagtacaattgatttgggcacttggcttggttggtcaccacagatatgtttgattttgcagtctgcaactattatacactcctgtcatcttgattgtgtgtccaaagctgaactgggagggaccagaaaaataagaagcagcaaaaatgatgcgtctactagcatctgaccgatcggccaattttgtcatgatctatgtacgtacgcacgtagcaacgaaactgttagctatattatacaacaaaattaaatatgaaccacgcacagagctcgattgaacatatccgtgcattattatatatagcataatattacaaaaatgatgcaaagatctgcccgccgtgatgtgggatcgtccaatagcacacaacacaaagcctccagttccgctgctgtacgtgttcactcatttgttatataagatcgaggaagcagaaatgagtgagaagaatcagatgcgtgcaccatccaccacccaccacgcgcgtccacgtacgaaggcaaggcaccagcccaaaacagggagagcaagcatagcagagcgccagagccaagaagaactcaagtcagctagctagacactctctgatccttgctggttcgttgatgcatggcttccttgttgcgttggaaggacaggtacgtgaaggagaggctgctaggcctctctggcctgtcctgctcctccgcggcgtccacctccgtcgtcgcctccactggccgcgccatcgaccgccactctccgcgccttcgtgactctcaccggcgtcttccgccatccctgcccaagccaccctgctctcctttcagtagtgccaaagattcctccacctccatgaagcagcagcagctttgccactacgacgacgatggcaaagacagaaggaagaagaagagcacagaagcagacgctggtagtggcaggggttgctcgtcgacgacgccgtcgtcagagcataggaaaaacaagaagaaggaggtgcagctccagcaggtgagccccgcgagctcgtccaggttcctgctcaactcctccaggctcatgatgcagtccgacgacgaaatcaccgtcgtcgactccttgccgccacttccgtccccgcggccctccttcattaaggacgccgacgacgacatcgaaatattcccaaccagccacggcgatgccgtgatgccggctggtccatcgaggcctcagctcctggcgccgccagtggaattattcgccgagccgtctgcatcaggtgcagggtcctcctcgtcatcgtcagaaataggaagaggccatgtcgttgccggtgacaacactgtcgtggtgagatcatgttccacgagaacaggccagaaccaggtgagaacgttacgccctgcttcatcgatgatgatattgatcgatgcatgcatgaacttgtaattgccaacatacaggtggtggttttgagggtatctctacactgcaaggggtgtgctggcaaggtgaagaagcacatctccaagatggaaggtgaacttttcactcatcttatcccttcacctccagttgagtttcgataactaacacatacgagcatgcatgcatccaatccaggggttacttcttttgacatcgacatcgcgacgaagaaggtgacggtggtgggagatgtaacaccgctaggcgtcctcaacagcatctccaaggtcaagagcgctcagttctggacggacactcgctcgtatttgtccacgccgccgcgagcctccgccaccttctgagctactccaataccttcaaaacccacttgatcgtctcggactgggacgccacggtctttcgagccttttctccatattattgtcggttggaaaatatatttgtaaaatccaatcagaaaattgttctattacaaaacgcgcattttacgacatgtaaaacttttactatataaatatgtagaagctgcatctatctgtggtaacccgtgtcgtatataaaattcttaaaatactacgtatgatttgcaattggacatgtagccatttgttatagtatttgtggtacatgtctagagtgctttttatagaagaacaagactaaaacacattgtaaataggatacaataggccatgcaaaccgcccactggtccctccaaagcctaggaaatgtcaaatttcgcactggtacacaaaacatttgtacaggcggtggtagaagcatttacataggcggccaagcccaccgcctctatcaggggtcagtacaaatcgacttgcacaggcggccaagcccaccgcccgtatcaggggtcagtacaaatcgaccatagtacacagggtcgagagtgagccatctatgaaaattaggttttcacaggcggttcacttagtaatccgcctgtggaaatgtatgtttacacaggcggctaactatgtgagccgcgtgagaaaacctatttttcacaggcgg

SEQ ID NO: 4294 - DNA, 2609 bp, Sorghum bicolor
atttctgcttgggacgcgttttatttggctgttttctggatgttaaataccatcggatggttactttttattggcattggaaacacattacattatggcagggcaacgtttcacaatttaatgaatcctccacttatttgatggtcgggaggaagaaccggtaataagcacaaaaccatccattctggttctacatttgtttgaataaaatgtttcgccaattgcatgcgtctaatcaaaaaaacttttcttattcgtctttttctatcttcccattcatctccactatacccctcgtcttctaattccttccattctaccaaagaattctctataataattcgcaaatctaaatccgctaattgttctctaatagcacctgctcctgttgcaatttcccgatttcgaaatgttgcaaagcctggggtagaaaaaaagggagaaatactgtggttacaggatgaaatttcatcctcgaataaaccccgtaatcgtaagaaagtaggttttttagcgctgggcctagcaaaagagaaatcaccatatactaggccctccaatttcttaaggggtttatctaaaagattcgcaatataactaggaagacctttcaaataccacacatgagtcactggacatgctagtttgatgtatcccatttgatatcttcgtatccgagaatcaacaaattctaccccgcatttttgacaaaatctttcgtcttcgttttcagctacgctcgctcgagagtttccacaagcacaaattccgcttttatgggtccaaagattctttcgcaaaacaatccatctttttctggtttatcggttttataatgaaaagtggagggccttgtgacttcgccaacgacttccccattaggtaggatttttttagcccaagcctttatttgtttaggggaaacgagtccaatttgaagttgtttatgtttatattggtcaatcataaaatagaaataataaaaaaatttatatttattccgatcaaacatcctccctattaacccggaagttcttctcagatacaaggaaatggttcagttctagagccaaagatcgtagttctcgaacgagcactcgaaaagattctggcggatcctcgtcaaatccaagttggtgaagatcatgatttgggctggcatagtagttattacctttgcaattgcggttcgaatctatccgatctttatctttttgctcaaagaacgaataaaaccccttgttgaagccctttatgataagcttccctggatctgggaagtttctctttcacggtattgggatcgtttgatcgatttccttgatcgctacttatgggcgtgcgctcaaaggatacaaacagggattcacaaacaaaaaggggaattcgtagtcactttttcctgtcgcgtaaaaaaaaggctttacgcgagagcaatagaggttgggatacatctatctcttctgagcaacctcttttggattcttaagaccacccttgcagtaggataccgtctgctttaggttctttattatctccttcgaggggtttttaggatcatttgtcaagtttgatcagtactataatcctaagtattttattgattaggcggcacccagatttgaactgggggtaaaggatttgcagtcccctgccttaccacttggccatgccgccaaaaaatccgatctaaaatcgagaaaagagcaagtattcatccacatttttttactaattactaaaattactaaaacctttttttcttttatcttgaatctaattctacttactttcttttttcgaatctttttcaaaaaatcaatttctgcttttttggatccagtttcgcttattctcctcgatggattctatcttaaaacacacattgctaacactagaaaacttcccgtttctttctattctattgagatgacaaataagaaaaagtcccgtcgctgtctcggctgtgctaccggaggctctagggaagtcggaggagagagcactcatcttggggtgggcttactacttatatgctttcagcagttatcctctccacacttggctacccagcgtttaccgtaggcacgataactggtacacccagaggtgcgtccttcccggtcctctcgtactaaggaaaggtcctctcaatgctctaatgcccacaccggaataatggaccgaactgtctcacgacgttctgattatccgcaaaaaattacggtagagcgtgttatgagtgtctacgcagtggacttgattttaccaaagatgatgaaaacgtaaactcacaaccatttatgcgctggagagaccgttttgtcttttgtgccgaagcaatttataaagcacaagccgaaaccggtgaaatcaaggggcattacttgaatgcgactgcaggtacatgcgaagaaatgattaagagagctgtatttgcaaaggaattaggggttcctattgtaatgcatgactacttaacaggaggattcaccgcaaatactactttgtctcattattgccgcgacaacggcctacttcttcacattcaccgagcaatgcatgcagttattgatagacagaaaaatcatggtatgcatttccgtgta

SEQ ID NO: 4295 - DNA, 4369 bp, Sorghum bicolor
gcttttgttgaatgcttattatctagtggaagacaagtacagagggagaacattaaattaagcagttctgccataagaagtgtcaccgacaccactccggtgactgaacttgaagctgatgacttctctaaagttgggtcggctgttaacaaaagagcgacgtgggccaagaagaagagcgtacgagtccttgggtcggaatggattaactagcccagtcggccctgcgtcgctcagcatggagaggctcccaaccccttcttgtaaaggctgctgagaaggagaactcgaacttggctattgttgtgaactgagccgagtaggctgcggctgcggtggagcccggcatctcgttggcgttccaaacccttgttccacaaacacttatcaatacatgtaatagatcctatttatagctgtttggttatacgtgtatacagattagaaaagggagaaaatacactgtgtttgaagtgtttgtcatgtaaatcaacagtccaacgtttgaaggcctatatttacgaaatcaatgttcactagtacaaaagtgttcaaagccagcggtggaacataatttttacaggcggttttaattaaaaaacgcctgtggaaagaaattggcttacccgactacaaaacctcctgtgaaaatcaatttttacaggcggtttttctaacaaaaccgcctatagaaatcatgtatttctacaggcggatttcttaagaaaccgcctatacaaatatgatttctacaggcggtttcttaagaaatccacctgtagaaataatttgaacttgaattttttgagtttttcaaatgacctcgtttgagaaaaccgtcaaaataaaagttgtagatcttgaaaagttatgaaactttgtagtagataattttttatttgaaatcatcttgtcatcgaaaactacgtttgaatttctcaaatttgaaattaaaattttgtaaatgacctcggatgaagaaactaccaatataaaagttgtaggtcttaaaaagttgtaaaactttgtagttgacgacttttccatttgaatccgttgaggacctcaaataatcaattcatgcttggtttatgatagtatgtggggaactaaactctatttcaaacaacaagtgagtgataggttgagtggtagaggagggtacgcgcgagggtgaggtctcaggttcgaatcccaccgaccgcgtagcgcgcgatttcaaaaatacgagattaacatctttttttttctatttttaaaaaacgatttcatattttttaccaaaagatttctacaggcggttggcataactgaaccgcctgtagaaatccatttccacaggcggttctcagttacccgtccgtggaaaaatttatttccacaggccaccaatcacagacggttcgccaaaccgcctgtaaaaaggggtttagaaccgctacctaccagtggtttgaagtcctaaaactgcaaaaactgcgaaacaagacaattcgagtcccagctatacaattttcttaatgaactcgtagtcttttgacattagttaaaggcttgggcatgagccccagaattctaaaaaaaaaagaatctgatgctggtgctccacaaaacatttggttgttgtttagctttcctatttttcgtagacgtaatttcatttagccttttttaggatctgctgtaatagaatgtcatatgtaaatagaatcgattgaggaaatttgcgtgtgaacaaaagttcacaacataatatgccagctgagagactagcacgcatctccggatacacggttggtaaaacgtcatgaggttgccttgtccagtatccgcatcacttgggccttggaaacgggaagggttcgtcaagaacctgtaaaaaaccagaggacaggagtgccctattcaagcattgcctcaaaatagcaaaggccagacgctcatttcgtgtacatatcaaacgatgctcctctgtctcaagcaaggatatcttccgtaacatccatctccccagcggcgaggagagccggccaccacagggagaaatggcttccgcaagcaatgctctcagggtgttcttcatcctagcgatcctatgcgcggtatgcacagcgaaaaggaccggagcaaagacgggagactcggcagcagactctgctgcttctggagccagcgggacgttcgacatctccaagctcggcgcgacgggcgacggcaagacggactccacaaaggtaaaccatcgatatgtggtgcgttgcggatgcagttgatctgatcgatacgatgtcgatcttgctgacggtggtgattgaatgatctacttctcaggcggttcaagacgcgtggacgtcagcgtgcagagcgaccggaagcgccacggtgctcatccccaagggcgactatctggtcggccctctcaacttcgttggcccgtgcaagggcgccatcaccatccagctcgatggcaacctgctgggatccaacgacctggccaagtacaaggcgagctggatcgagttgtcgcacgtcgacaacatcgtcatgactggctcgggcacgctcgacggccagggcaccgccgtttataaaaaggccaaaaccggcactgtgaaggcgatgcccaacgtacgtgcgatgctcaccttaattcttatgtgtcggtacaatgcgacgcataaatatacatgtgtattatacagatagtagttattatgtgcattcatgtagacattggtgctgttctacgtgaccaacggcactgtctctggaatcaaactactcaactccaagttcttccacatcaatatcgacgcttcaaagaacatcacggtgaaggacgtgaacatcaccgcgcctggggacgttgagaacacggacggcgtccatgttggaatgtccaccaaggtgagcatcaccaactcaaccatcggcactggcgacgactgcatctctgttggccccgggagcgacggcgtcatggtgaacaacatcatctgcggccccgggcagggcatcagcatcggctgcctaggccgctacaaggatgagaaggacgtgaccgacgtgacggtgcgggactgcgtgctcaagaagaccactaacggcgtgcgcatcaagtcgtacgaggacgccgagtctgtgctgacggcgtcgcatctgaccttcgagaacatcaggatggaggaggtggcgaaccccatcatcatcgaccagtacttctgccccgagaaggtgtgccccggcaagaagagcgactcctctcatgtcatcgtcaaggacgtcacgttccgcaacatcacgggcacgtcgtccacgccacaggccatcagcctgctctgctcgcagtcacagccatgcagcggcgtgtcgctcatcgatgtaaacgtggagtacgccggcaagaacaacaagaccatggccgtgtgcagcaacgccaagggcaccgccaagggcagcgtcgaggccctggcatgcctggcctgagcgatgagcatgcatctgcatgcatgttatgtgtttcctcaaacgatgtgatcatcatctggtagttttctagttctcgcttttgcaaatttgattgcgtttaattcacaaatggtccggccaggcatcgaccttttctgatcttccctgcatgtgcagtaaatgtatatctgcaggcacttcaatggtgtggacgacgcatatatatatatctgggagttgtccgccttccctggtttagagtattgtaatattatagacaacagggcgttttgttgtatttttacgtccttcgatatagtagcgttattatatgtcctgacattatacatcactataatttacgatgatgaggtcctgtgagaagtcaggcgttgtattggaaacttctgcgttttgcctttcttaattaatgcaatgtcatgcactacaagtcaccagttcttcctgataatggcgtccaaatatatgtggtcggccatcattttaccacaaaggtcattcctaaagccttaatggaaactctattgcttgtccgaagtgtttccgatccggagcagtcttcgattggttcattcttctatttttcaggaagagatagctctattaatcacttagaaagtgtaacatttcctagcaactatatcaatgtttaaaatagcaggctattgaaaatagcggcaacttttttccagcagctatgcagctataacggcgctataatagatagcgtttttttataaaaaaatatataaaaaacacgaataataacaaaactatatgctctacacatattggagaaataaaataccggactgtacaatgtcgtgtactcttcgccttcgccaattctgcgagttcatgggccgcgctattgtgctgt

SEQ ID NO: 4296 - DNA, 9168 bp, Sorghum bicolor
cgccatgggagtgcttcctcgagtggtttgccacccctcacatgcatgctttgtgagggcacgccgccgagcagccactcgagctgttgtggccgcggccgcggccagactcccgccgcgtcccttacgtgtcaccaccggactcccgccgtgtcccttgcgtgtcggcgctttgctccatggcgcacgccgcgacgccttcgttggacctctacgcggcggcggagggcccgctggaggacatcgagacgggctcgtgcgacggcgtcgtgctctgctgcctcccaacgctcgtagaaatggcgccaaagccatggaatttcccctccaataagccttcacggatgcctagaaaagggaacaatacatcctcttgtcttgaccgttgctgatgggatcaatggctcatgtgtggccactgcttaagttgcagtgtgagtaggcactgcatgtgatccgtgtccaaaaatttgtttacttcaactaaaagagtcagcaatctatgcatcaaagaattcttagtgcgatgtgatacgaagctcttgtttgcattgtagtctttggaaatatcttccaaaagtttgatcggttctattcactagatctttcctagtattcaaccaatctaacataattaatccatcctccttattaaactttttttgctttttcgttttgggcctggcaccataagtacttgcagcaacaatagaagagagcacatcaaattggctgaacaatccatccaaatacagatcatcattgttgctattcgccatatccatccaaatacagatcaccattgtcgctattcgccgtatcaatctaggaacttggattatccatgatctatatttacattcaacaaacaataagttacaaatacgccatatcacgacacgtatgaatgtgttgttcatcaaaaaaagaagagaaatttcatctgctttcggccgattgcctatgacaaagctatcatacaagaggcaacaacactattgaggcgatgtggaaccaactagtgcccagtagggcaagggagctccaagcgactggctgaacatagctatagattcaatggcggcgtgcagatgtgttgttgctctgttatacaagacagaagtgaggtgaaggtgagtccgtaccaatggtgccagactaaaagaggggaggagtgggggtggggggagaacagatgcccgctaaaaccaacaatatatctcgtgcaaaaaagaaagttgctcacgcgagaagtaacacagaaacaaagccagagaggcggaatactaagttctcagtttcaaaaactgatcgctcgcacgagatgtattgcgaaaaccagcccacaaaggagggatataaagttctctcgactatagaaacatatgagttggagatattattttacaaatttttatttttaataagcttttttatcaaactatcaaagagaactttttttggctaaaaaatcaagatagataattgttttataaaactcctagagatgcttaagaaaaaaacgagatagctatttcagaatttgggcctgtcttttaatttgcctgctctgatatcacaaatggtgctataggcatcaatacaatcaaacttctccttttgctggtacataccttttcttcaggacattaagtatgctgatatagatattaaatatattgatatcacactgttttttaaaaacactgtagttgtattaaaaattgagacatgaaactccacaccgacctcagtggaaaacgataaatggctgaagaaaaagagaggccattgaccgaccaaccacaacaacacacactttgcattgcacccatccgttcctcgttacgcttaaaaatttaaaaccccttcagattccattaattaaaccaaatcatcaaccccctcaaaaaccccgtcgggtcggcccctcccaaaaagaccaatcgctctctcctccggcatccaccacccaacggagccgcggcaaccgccacaccatgggatcgctgcggggcgcggcagccccgtccccggcgccgcgcgcgggcgacctggtgaccacgcaggttagcctgggcggatttgacgccaccgtcaaggcgctcgatcttgccgactttctcgagttgaaggcgggcttggtctggcgctgccgcgtcaagacctcctggaccccgccggacgcctatcccgacttccttctccccaccgtcacctccgccgccgcgcagccgccacagtacgatcgcgtgcctccgcacgccttcgtccactttgcgcgcccggagggcgcgcgcgccgccgccgacgcagcggggcggtccgagctcatcctctccgggaaacccctgcgcgccgcctccgcgcaggagagctcccttcgggcctcccgccgccgcagtgtctcgccattccgcttccctggctcacgcctcgaggtcggggatctcccggccaaggacgccttcctcgccgcctggcgcggtccggcctctgggctcgagttctccgtcgatccgttcgacgggtcttgccgcctcatcttcgcccgcgacaccgcattcaaagtccgggagttccgcgagtctgtggtcatgcgctgcgacgtcaagctcgagttccccgtacgcgacgtcgccgaagtcagggtgttccggctcgactgctcgctgctgatccggctgtcggcggcaccgctggtttattaccgcacggcggacgacgacatccacgagtccgtgccgttcgacctgctcgacgacgatgacccgtggatacggaccacggacatcacccccagtggcgcgattgggcggtgcggcgcgtatagaatcacattctcgccgcgcttctggccaaagatggaacgcgcgctggcgtacatgagggataggagggtgccgatcgttgattgcggtggtggttggggggccaggaggggcctcaccgtgcgagatgagcctgagtttggggagcgaatgcaggacctgttcttctgcgtgcagcactccgagggtctcaagtttccggtgttgttcctcgtgaatgctctggtgcacaagggagtaataaatcaacaccacctcacgcctgaattcttcggcttgctccagaggaaggaggatgatgtgaatgtggctgctttgagggaattttggggggacaaatttccagtttttgatgcatgtggcaggctgaagaatctgcaagatagggttgccaggtaccccaaacttcttcgcaacaagattggggatgacaattcagaggtgaggaggctggtagtcacgcccaccaaagcttattgcctgccaccagaagtggagcgctctaatcgtgtcatccgtcattatcgtgaagtcacagacagatttctcagggttacttttatggatgagggtatgcagctactgaacagtaatgtgctgaatttctctgctgcgcaaattgtcaaagatttgatgtcaaactcgttcctgcataagacaacagtgtacaagcgtattaaaacatttttgacagagggattccacatgtgtggtaggaagtactcatttcttgcattctcatcgaaccagctgagggacaggtcagcttggttcttcgcagaggacagaatgagaacagtggaaaccattaggaaatggatggggcggttcacaagtaagaatgtagcaaagcacgctgctcggatggggcagtgcttctcatctacatatgctacagtggtgatgcagccgcatgaggtcaatgagtgtctcgaggaagttgaacgcaatgggtacattttctctgatggaattggcaagattacgtgtgaccttgcacttgaagttgctcagaagctgcgattgacagataatcccccatccgcttaccagattaggtatgcaggcttcaagggtgttatagctgtctgggaaggagaaaatgatgggatacgactttccctgaggccgagcatgcacaagtttgagtctaaccataatgtgttagaggtggtctcatggacaaagtttcagccaggattcttaaaccgtcagattattacattactgtcctccttgaatgtcccggatgctatcttttctcaaatgcaggaagccatgttgtctaatctcaataatattttgtcggacactgatgttgcttttgacattgtaaccacctcttgtgctgagcaaggaaacactgcagcactgatgttgagtgctggcatttcacctggaactgagccacacctgaaagcaatgctgttagctataaggtcctcacagctactgggtcttttggagaagacaaggatttttgtgccgaaggggaggtggttgatgggctgccttgatgaacttgggatccttgagcaaggacagtgctttatccgggcgtcatctccatcactcaataattgtctggtaaagcatggaccaagattttcctcagcaaacaaaaatgcagagaccattgtgggtactatcgtaatggcaaagaatccatgccttcatccaggggatgtccggatccttgaagctgttgatgtgcctgaactgcatcaccttgttgattgcttggtcttccccaagaaaggtgagaggccacatgccaatgaagcatctgggagtgatcttgatggggatctctactttgtgacatgggatgaaaaccttataccacctggcaaaaagagttggaaccctatggactactccccaactgaagcaaaacaactaccgcgcgcagtatccccacatgtaagctcaactttttggcatttaggcatttgttcccttaaaagttcaatatatggatgcattgcttcaaatattagctcattttgataccctcccattactaatttcttcttgacatgttagtgttcttactgagcaatctctgttgcagctaatatttaagttgagcataaacttccatggaaattgtattgtaggattgactctgaatcagggattctttttcttcctattgattccatgcctgttaatatttcctagagttttgaactatgtgtctatgattatttgtcttctactccctccagtccggtttctaaagtgtccttgtgttttagagaaagtccgtaatattattaggcgtcactcgaatactgagacaggatttaactcatagacagaactgaatagtcacttgcatggagatttttccctttttcttctggcatgattaactgaatctccaataaaaaatcggtagctagcacttgactaataccaggcaattgatgtgctgcaatcgcatgcatgccgcaaaaaacgatccaataaacagagcgattaatatgatgtcacaaacaccccattgctccttggtatttgaggtttcatcttatgcaccttagaaaccagactggagtgagtatttgaataacagatgatagctctgatgacatttctttagtaacaaccctgaaagttaccatctcttcttatgtatcaactttcatggacttactatctcttatactgacaatggatcgttgtacgataattttatgatggtatgtatttattctagtatcttaatatgaatcatgcaaaatcccatataatataattttactataacaattcttggaattaatgtgctctgcacagaatacatgtataatttgcagaaactgtgttcatgtcatttgctcaattaatacatgtttctaaattttcatttgacaatctacatccacaacgcaacggcattattggtcaaagttaaaagagttttagttgcaaaatcacttgtttctgacttcatttctatcccacatccttttctttgacaccaattggtagtagcgggtcactttgttacttcatttctatcccacatccttttctttgagatcttaattagttcaattaaattaactttgggttgacccagagaaaataaaactttgcatctctagtgttttgtgtgtattaggtataggtataggttaaaggcttgatcattctgaaggtagtaagctaatgtgcacagctggatttcaataacatgttggcagaactctaaaggcttgatcattctaattagttttcatttaattcttggagaactgtacctatagagtagtagagtactatcatagattttacttatcaaatgtctggtcttgtagttgtagatcaaaaacacttttgcttcatttggtcatgtagttgccaacggataaggacctgtatggatgctgtggttttgagaaactgtattatcaaaaccacggtttacaaaaaagaggtatatagtggagtttctagaagagtaaagttcatcaccggtccctaaacttttattgtcgtgtcatcccggtccctaaactcgcaaattgaccgtttatgtccttgaacttgttcgtctgtgtcatttcggtccctaaacttgttcagttgtgttatcccggtccctaaacttataaatcgcccgtttaagtcctcaaatttgttcagttgtgtcattctagtccctaaacttgattttgagtctcatctgggtcaaaacaaaacgatttaaaaactttatatcaaaaaataattcataactttttcatatgaactcaaatgaagataaactttatatcaaatttgtagccctcaatgcgatctacgactttgtagttgaaaagttttttatttaatatcgtttagtgtcacataattttaaatttctagatctaaaagctttcaaaaaatattttgggaccccacaaagtttcaatttagaaacttttcaactacaaagttgtagatcgtattgctgactacaattttgataaaaagtttattttcatttgagtccatatgaaaaagttatgaattatttttctatatagagtttttagatttgcctcgttttgatccatatgagacttctaaagtttagagactgggttgacacaactgaacaagtttgaggacctatatgggagatttctaagtttagggactagaatgacacaactgaacaagtttaggtacctaaactattgttttgtgagtttagggacaggaatgacacagccaaacaagtttagggaccggtgatggactttactcggaactccaaaaggagtacttttagtaataccatgtttttcaaaaatacaaatctccttgcatccaaacaccttatagtttgtcaaaaccaaagtatttcacaaaaccatggtatttttctaataaagtaacaaaaatacttcaaactaggactaaggtgttttcataggtcggaattaaagtcaagaactcctgaactacatataagacatcaatacttttcagttcatcatcaactagcactctcttggcttttgagactaacatttgcactttttatccaatcgatctgatcatattgctaatatacaaaaattatgatcatttcacatggtttcttcaaattgctttgtccttggtttgtgataaatattacttttttcagtacatttttattaataagatattgtactgttaataggatattgttgatttcttcttgaagaacatggtaaatgagaaactgggtccaataagcaatgctcatgttgttcacgctgatatgagcgagtatggagcaatggatgagaagtgcattcagttggcagaactagcagcaactgctgtagacttccccaagactggcaaaattgtgtcaatgccaccatcccttcggccaaaattatatcctgacttcatgggaaaggaggatgccatctcctataaatcagagaagatccttggaaggctttatcggtcaatccaagaagcctccagtggtgatttggttccagaagaaacttgcacattaaacgatttgccttatgatgcagatatggaagttcctggtgcaactgattttctctcaagtgcttgggagtgcaagtgctcatatgaaacacaactgaatgcactgctcaaccaatatggtgtgcgcactgaagcagagcttgttacagagcacatatggtcgcttcccaaatacagcagcagaaaacagggggacataaaggagagattgaagaatgcatactctgctctccacaaggacttcaggagcattttcgaaagctttgttacagatcaaactgagatctctgatgatgagaaaattcggttttatgagatgaaggcctctgcatggtaccaggtaacctaccaccccaaatgggtccaaaagtcaagggaaatgctcaaacctgactttgaggacatgccagcaaggcttagctttgcatggatcggggtcgagcacctggcacggattaagataaggtgccatggagaagtgaaagtggacagccgaaggcccgttgagaggctcgcagcctacatatctgggagcatgtgagctggcgtgaagctccatgcaatagtgaagcaagaccactctgcccctttctgccatgccatctgaactctgaagcatggctccgcctagtcacttcgtttttttgttttgttttttttacgaaattacatagttgggacacagacactctatatgcacgtacaccgtatacttatctctatgaaccaacattaatgcatttaccagagtcgaacttgtccaaactctattactaccagaatgtttgtggatataaagtattagttcatggtgtctgaattccaaaaggttttgttggttgtgttgttccaattttgtcctggaaaattggccaaacctggtctggtatgtttttgtggccattagatgatgcctgaattcaggttcagtgcagctgtgtaactgtgttcaacatgtgaacatgtttgtcgcttctcgtcgtacgccaatctccttagcgtgaaacaaaaaccttaactgttgactagcagcaaatccagcaatcgatcaaaatcgcggaggttcgaatctcctgtgtcagtattgacaaccaaaatataatcggcggatttgtaaagacttgtttggatgtctatgtatttatcttaatctatagttgaagtggattgaagtgaaatttgactaaatttcattttaatccgcttcaacacatgtgaattgaagtggatacactcatacacatgcattaaacaacgcctaagatggaacaagacaatcaaatgaaattcacaagttttagggaaaaatcggcttatgttggtt
